United States Patent Application Publication US 2004/0265849 A1 - sequence listing, part 6

SEQ ID NO: 6837 - DNA, 141158 bp, Homo sapiens
aagaaggtaataatagcttacaacaacagccaaggaagttagagtcaggtgatgtttggttctctatagaaaccaaaaatagggtcttaagcgtgagctgcgggattctccttgcatggcaacccgcaaacaaatgccctcctttctcttgttgcaaaaccccactgtgggtgtttggctttactgggctgggcaagtggaccccagttttgttcagtagcagacaatgtgagcatgatacctctttatgcttaaattgcatgaaaatgtttttttggtgaaagtccttttgtcctttttgtatacactttttccagttgaaagatctgcgtgagaatgggatataactgaacaaaaatatatgattgctgaataggactctctgactttgtcgcaatggaaaaaaatagaaactcagcccccagggaggcataaaggagaggaagtcattaacaatctttttgtttttcagaactgttcctggaagatttcccttctgtctgacggaaatcttcccacgctgtctttccaaactcctacttaatgctttgaattcagattgctgagcctctgagcacaacagacagcactggggttggaggtggggatccactctggaactttccatccagaaaacctcagatgtcttcctcactcctgtgtttggaactgatagcttgaaggcagttcctctgaaagcaaggacttcagtgtattttttggactggaatggaaaccttacggtggtaggccccaccatggaaggccacatggtgggggttgtaaacctgtactgcctaaggcatgtcccgcttgggctgccatgcatgtcctctgggattgtgctttgtgtctgtgtgtacctgactgtcatgacactgtctcagcccaggaaggtgatcaggtccactttactttcctggcctcagctgtgatgtgccaccaggttaaaagtttaatatagacatgtacggaggaagctctctggacttctaagatagacctttataattaatcagatttgtttaagctggctaaattcaggatccttaaaagaggataaatactgaatgtattggaaaaaactgagatcaatactgacagagatcctagaaataataattttactataaagttgccttgctaaggactaaggggatggaccatgcagagttagcatggcaagtttgaaactgttatctttagaaagacttgcttgcaaggttggcccttggctaacatcagggaacttggatttttaagttttctagctattctataaatgatatgggtggcttactatgctaagactgtttatgcaaatgatggagtttatgctaacacttgctttccttctcgaagtctggaattttggtacatgctaggcagagggtgcatacatgatcagtccccagtaaaacccttgggcacacagtctaactggcttcacatgtgttgtcacaatttgatgctggaggaattaagcacaacctgatgactctaccggccctcttggaaacctatacctgattttctttggacttggccccatgcactttttgtctgtgctaattttgctctgtatacttttgttataataaggcttagctgtgagtatgaccatatgttgaatcctgctcatctttccagtgaatcatcaaatctaggggtagtcttggagaccctgatgtcaatttcctagaattctctttagaaaaaaacaatgcagcaggctattagaatataacagctccctctgggagaccaaaggagagaaaagacaggctaagcctgactgagtgtggctctttctccaacctacgcaatttcctatgaggatttccctttgtaagattttctttccacacaatagctgtccccagattcctcagccatcatgcgcatggctggggatgttgcatcattcttgggcatacctaggacacctgtccatcccctggtggatcttggttcaggattttgttgctggtatgttccacataaatcagaagaaaagaaggtgcagggtcatcaaaaactcttctgtttattgcgtcagactggagtcaatgtctttccctttataatcaagagggagctcaggagggttgtgaaatgatatttggcaggaaatcaagggaagtgaatattctaacaggaaccaccctgacctttatgctttatgagatattcatataaagggaccatggcaaagagaaaatcattttattcatcaaactctagttgagcagagcttgtgttgcagggtgaattatgacactgtgaacaaaggtcattttggggaagatcccaggttggatgttgaactagaaaaagaatattagtgggacaactggtaaaatttgaacaagacttgtagattagttgattatatgttgtcactgttagtttcctgtcttaaagattattctatgtttatgtaaggtgttaacatgatgggaagctgcgtaaagggtatatgggaattctgggcaccatttttacaactttaagtctaaaatcatttcaaataaaaagggttaaaaagtcaaattataggctgacaattattttctcttggcattttgaaactatttcccactgtgttttggttgctattgagaagtctgagcttaacctaataccaattccttcacagatatttcttctgttttttgtcgttttaaaaatctttctgcctcaaaggcacttaaaagatactactatgtttttaggtgacatctgcttgggtgatcttttgtggaattcatgtatttgaggattagcatttttcattaattccgaaaatttcggtcattgtctcttcaactattgcctttcctccattcccttttatttgttcttctgcaactctgatcacatgcattttaacttcctcactttgttctccatgtccctgaatatctctgttgattttccatctcactgtttttctgtgctgcattctgagtagtttcttcgaatctgtcttctaaatcaataaatgcttttcagctgtgtataaattacttttcaacaaatcctttgagtttctaatttctattattttagtttttatatttctaagttttgtttggttcttgtgcaaatatgcctaatcaaatttaatacactattgttcctttatttatttatttatttatttatttatttattttttgagatggagtctcgacctgtcacccaggctagagtgtagtggcatgatctcagctcactgcaacctctgtctcttgggttcaagagattctcctgcctcagcctcctgagtagctgagattacaggcacccatcaccacacctggctaatttttgtatttttagtggagatgggttttcaccatgttggccaggctggtcttgaactcctgacctcaggcaatctgctcacctcagcctcccaaagtgctgggattacaggcatgaggcactgcgcccggcctattcctttgttaaaacttaattttttctttctttatcttgaaatttactaaatacactaatacattctttttttttttattgagacagagttactctgttgcccaggctggagtgcagtggtgcgatctcggctcactgcaacctctacctgccaggtttaagccattctcctgccttagactcccaagtggctgggattacagatgcccgccactatgccttgctaatttttgtatttttagtagaaaccgggttctaccatgttggccaggctggtctctaactcctgtcctcagtgatacacctgcctcggcctcccaaagtgtactaaatacattcttttttattctctattcaattacaatatctgcagttttgttgctctggcttatcgtttattatctggcaacttttgcacattgtggcttatttatttgtgtgtattctttgattttgtattatgacctgatattccttggaactttatcaaacttggaaattctttgagaactatgtaaaaagtgtttccctttgaggggtgtttttatttgcttttgttaggtgcatgggagcactaccaagccagaattgcttaaaatgaaattttctacttgaggtttttttttttttttcttgccgcatggatagtgagaatttcagcccaaaacaatcatgcttctccacttaagattagaaattatcaatgactttttttcctccctgctttacttagggccaaagccaaaaacaggcatgtgtagccccatcatttacgtctgcaaggagtttgttctccagtttaacctctgaatgggtcctggttttatgtgagttctatgatacaatgtaccacgtgcaggccccagactttgtcttccatctccttcataatgtaatgtagtccatgagaaagtgatgtagatcaccaacacaaatgaacacatgcttattctggtggattttcactttcctgtcatttctggacttcagggaattccttactctcttataaatgcagctgtgcatttaaaaaatatgttttgcagattatatagcatttttcattgtgatacacaggctttttgttctgtgtatatctggtctaccataatgcttgtaaggaaacacatttaatcttctgtgaggtataatttattattcccaggttttatgtaggaatatcttagggtcacagaggttaggtgatttttcccaacactgtagagatactaagtggtggaggtgaggttgaaataggtctaaacccaaagccaaggcacttttaaaagattaataaagtttgtcgaatgatacttggactaactcctgcctgaattaagctagaaattaatataagttctttaattcagttaggaagatcccaaatcagaaacaaatcataataaaaattgagatcaggaagcttcctgagtgtagctcctcatatcactgtcccacacataagtactgccccatatggcaatcgggaggccccaggaatgcttgctagggtcaggccctgctcctctaagttagttgaaagctccctccctactcagtgactgctctcatacttcttcactgtagctgttggctctcagaacatgatgcccaaagtatagcgcctcggtgtgctgagtactttgaactgaaagacattggaagggcctccgaagaaagatctctttgaccttctcctgccctcttgtctttcatgcttctttctcccctggagtgaaccatggaaactagaattcctcttccgcaagacaatgatagaaactagaagccctttccccaaagcaagccataaaacttaggaaggtcactctctcccttctcccttctcatttgaagacccttaatccagaggaatcctgccccatacttgcaaagaagaaatgctacacagagagtccaagaagaatttgaacccagtctattaccattagatcatactcttgtccaaacacatctctacagagctgcccattcttcatggaacctaagcacaaaaacagttttccctggatctttgggtcttcatttctgaaggctctcatatcacataaaactttgattaagtaaatttgttatgcttttctcttgttaacttgtcttttgttataggagtgtcagccatgactcttacaatgagtaaggagaggtattacctacctccttttacccctacatgctcttggagctgattatcacagtttgtaatttttccaccttccattcctgcttctgtgtattttgataaatttttgcaggtcagtagacttcccatggcagaatatttcctgcttctcaccagcccttaagccaatccaaggaaaacaaaagaacatcataatgctttgtcatatgacaagattacaaaagcagcatccagtggcagaatgcccaactgctccgggacacagccaatagctgacttcagtgctccccatccctgcttgtcagtgattagtctaaattgttatcacaagcccagtctgaccaatgaatgtgagtgaggggccattttgattgtcagctcctgattctgcagaaaacaygaaactgagctgtacaaagatgctgatgaggggctgcagcatgcaattcacttcaccagcagtcactaaggtctgatctcttttctaaccatacctggaagatggaatgctggacccagggtatgcatagaaaatgggagttattagaaaagcagctttgcttgctttaacccaggaattgtatttctggtatgttgtttccttttagacaattgccctaaaggttcttttgtttaaggagcaggaggatgggggaggttatttctgctctcagcaaaagtcttagaaccagggtctcctcgtttgtaaggaagcaagtaggtccctggacctgggctgsgatatgatttgtgatcagccaggcaagagttaagagtggaagtctgtgctctctgcccatcttataatatcttaagggtgatcatctgtggtattcttgagtggtatgtcccattccatctagcatttcattagaattattgtataaaggatgacaggcagaggacacttgacatgggaatgctggacctattggatgtttattcattagctgcagttaccccccattagccttttttaatacaaagtaaaaatttagttgacatgtaaaaattgtatatatttatggtgtatagcatgttttaatatatgtatacattgtggaacggctaaatcaaattatttaacatatgcattacctcagctacttacctttctttttgtagtgagaacacaaaatctactctctcagcaattttcacgtatgcaacatatcattattaactatagtcaccatgatgtactatgttagcctcttaatacggtataatgccttggcaaaacccaaaatccctagcaggtctggatctttgagtttggaaatggtccaaggtgcatatactatgtctgtgaataccagagggcaactctttatgggttcctggtgtaggktctatattctaaattctgagagatgaactcctttagggccacagtctttctgccacttatgaacctacaagcaagtttccaggtgttaaatcagctagggaatcatttcagaatttatttcaaatattacattaattcctaggggataaggaatttaaaaggaaagtgttcaaatgatcatcttatacatttatatacttttacctttctgtttacacctttgtgactagatattacattcatgagtgaattaaaaatgaactgcagaagttaatctcaagagtccatggaggctattcccccatgtgtttaagagacctttgctgtccaggtctgactttaacctgaacaaaatggagctcaccgtgtcagatgctggcagtttgaaagggactgctgtagacctggatggatctctgcccttttgaccagcctcacactgatgtccctcacactctgtcagggaggcatttgcccagatattcctgggcttacagcaaccctgtctacagcagcagctgctaactgggcatggggcttagttggggctcctaggctggaaagacagtcatagttcctataatgtaaggataggctgccttcagggggagggtgttcattctaagggaggggctcaaatgaacatgtcgagaatagtatggtacggcttagcaattacccactgttcctagtaggagaaattttgggaattaatattactgttatagtcccatacacaaaccacacaattacctctattctaacagagttgaaatgtttggatttattgtagcattactatcaggaatacacattgattatggtattgctatcaagaatacatataaatacatgcctgaagctataagtgagataagagatattccagggttagtcaaaagttaatctttgagttccagaagtctggatgaaaatgagatgagactgcaaattttgttgttaggcagtcaccatttatgacccttggcagggagggcaggaatggtggttatattgtgaactgaatgaaaactgagaactaatcagcatcatgtgggcctgaagcatttattgctaccagtgattagttgtaagaccttcggactatgtaactgtaatgaactataatgaacatgagaaaacaactcttttttttttttttttttttttttgagatggagtcttgctctgttgcccaggctggagtgcaggggcgcaatcttggctcactgcaacctcttccttccaggttcacgccattctcctgcctcagcctcccaagtagctgggactacaggtgccagccaccacgcctggctaattttttgtatttttagtagagacgggatttcactgtgttagccaggatggtctcaaactccagacctcgtgatccgcccacctcggcctcccaaagtgctgggattacaggcatgagccactgcgcccggccaaaaaacaactctttaaaaatgtaccttagagcaacatgcaaagcttccctgctcagcaatcccaggttggggccccctgtcttcctatcstcctacccgtcacaaccaccactgcaggcttctgatgctctgttttcctcctctgtctcagttcagttgctctgagttagagaggagctctctgggactggagctgactgcgccctggcccatttcctcactaccatcctcaagctcagatgctgacaggaaaatactgcctatgcctgaaggggcatcccttagcaggcggcccagttccttctcataacatttggctgcttgcagcagatctccattctgcttatgaattaatccttgaagataccaataattyggtgcattttgtggaagcagattttcrgatacattctgtggttggtctttgatctcttccttgycagttgattttttgcttatggacaaaccctctaaaccatgttgcacagcagtgtcttcagacttcccattatatttctgaaggttgcagtagcgctgatgggattgttgcttttcagcatcagggacttccttattgaatggtgtctgataacattcygtctccaggaactcagcgagatcggagtatgcattcagaggattcagtcccttctcaagagctttattcgaatagtccatagcatattgctttagtgcttcaatcatctctttatttccactagcttcagattctcctgtattctgcatttgtcttacttttgccttgtagcagcacccaatctggtgatagaggtagccattgtttggtgtggattccaacacccgttgaaacagttcaatagctttgtctaggtcaccttttcttctgtaaaatttggctgcactgcggaggacatctgtttggcaaggagacttttccaaggcttcttcaacaaactgctctccttcagcttctttattcatcttctgcagtttcaggcccaagagaaccttgacgtattggttatcaggactcagctcaatggcctgcttcaaaacatcagtagagaactgtttctctgggtgattatccagatggtacatcgcaattgccagtccagaggagaattctgggttgttgggcttttcttccagagcyttctcaaaacacaccttygccctttcatttcttccacayttcagttgtgtccacccttcctcacagtcaagttcagaatactcaatactgtatggatttgaaaatttcttgcaggtttgtttcaccttatctacataaatctgagcatctgagartctgcccaagtgatagtaracccaggcgtagtttccccaagtgactagacttctgatttctgcttggtcagcatgttcttgctggattaactcttcagcttgccgtaagcattccagggctgcctcgttgttaccatctaggtgttttatgtaggccaacaagttgtacattgtagctttgaactcagtgtttaaaaattcaatctggttacacactctatcttctagatcccttgagacactgtcttccttgaataagttccaggtgaaatggcatttcagctgtggaaggattttctccagggaattcttggtgacctcactgtggagaaaataaacatggtcactgtgatgtacactgccaagcactgcaccctgtgatcattaattttatatgtcaattgaactgggccacaggatgcccagatatttggtccaacattatttctgggtatgtatgtgaggttgtttctggaagacatgaacatgtgaattggtggactgagtagagcagattgctctccccagtatgggtgggcrttatccattctgttgagggccttaatagaacaaaaaggcagaggaagggagaattctccctctgaccgactgcttgagctaggacattggtctttttctgcccttagactagacttggactagaactttcaccattggcttacctggttctcagacttttagacttggactgggactacaccatcaactttycttggtctccagcttgcagacaacagattatgggacttgccagtctccataatcaggtgagccaattcctcataataaatctctttatatatagatgttccttgacttatgatggggttatatcctgataaacccatcataaattgaaaacattgtaaataaaaagatgcatttaatacatctaacctaccatagcttagcctagcttaaatgtgctcagaacccttacattagcctacagtggggcaaagtcacctaacacaaagcctattttatactaaagtgttgagtatctcatgtaacttattgaatactgtattttaagtgaaaaacaagaatggaattatcacttttgtaccatcacaaggttggaaaaattgtaagttgcttcctacattcacttttctttagctacagtctgtgcagacacccacaaagcacatcccttacaccgtgtaagcagatatgcaggaggtgaggtaagatgggtaagaggaggcagcttcagtgacaggaaatgagatctctctcacgctgctcaattaccaagtcagccaggaatggtgactcatgcctgtagtcctagcactttgggaggccaaggcgggtggatcacctgagcccaggattcaagaccagcctgggcaacatggcgaaagcctgcctctactaaaaatacaaaaattagccagggatggtagtacatgcctgtagtcctcgccattcgggaggctgagacaggaggatcacttgagcccaggaggcaaaagttgtagtgagctgagatcacaccattacactccagccagggtgatagagtgggaccctgcctcaaaaaaaataaaagtaagaataaaaattaaaaaataccaagtcagttctcattccttgtacattctgggtaaggtttgtttagctatcccatgactctttattgggstacctctttttgtcactttattagatattatggatactaagaaaaatagagattatcccaaccttctctgcccgccaggtgctttcagttttgttaggagacatgtaaagaaataaaagcccagatatgtctgccaacatgttatgtgatttaggtatttttcccttcatcttttccaccacttacaaacagacccacggaggctcagcttgagtctgactgaagtagtctccccaccacacaggccagattcccagacagaatgaatttgttgcaacaaacaaacaaaatggactcatttttgttttgtagttggaagatactaaaggagatcacttgccttatttagctggataaattgcaagagttctctaagtgtgttcccattatctacatttgcctggggcttgggctgtatgtccctcactcttgagtttgtgcttcttccttcttaccagtggagtcacggcaccataagattggaaagaacctccagaaatcattaaaccaagtgtccttatttttggatttcacagacaagcacaatttcagaaaaaaagttatgaaccaaatagggctgctaatgtatctgaaaagataccaaccatctattctgaccaatattttattttaaaagatagaaaagaaagaattttccttgccactgaaaaagtaatctcagaataaacaaaattctttaaattgaatgcattttgttctacaaggagccattgactttatttgcaatttaccatggacgagcactggccctcacaccgctactgcaagtgtactgatctattatacttcctgtctgtctctccagtaatgctgatctaaaccatttttggcccaatatgattgcacatgaaatgctttatagtgagagatgcagaatcaactcaagggcaatgggagtgaggagggaagttgccatctacatccggctagcctctttatgtgtgtgctttgatttggggacagtccttttccttttcttggtccctgtctagggttccagtgtcaatatcttccctgtctattatagggtccttcctttcttccttccttctttccctccctccctctcttcctccctccctattttccttctttcctcccttccttccttccttccctccctccctcccttcctccctccctattttccttctttcctcccttccttcctttttttgcagagacagggtctcactatattgcccagagtggtctcaaactcctggtctcaagcaatccttctgcctcgacataccaaagtgttgggattacaggtgtgaaccaccacacctggccctaggggttttcaatttggctttacctgggtattctaactaccctgtatgaaggactacaagtcaaaagtcaagttagcaattatttaaaaaatgaataccaaaagtaagttataacgatgataattgaacaactctgcttatatctgttatgccactaaatcataataaagtcatggaaacatgagttaactttgctgatgtgtgaattaggaaggttaaaaggagaaagtgtgagtctcagatcaatagaatgtatctgcagatttgtaggtacatatgggtgcctgaaaaaaatagctgaacactctagtaattaatagagagtatccagtggacctgcaggatgacaggtgatgttggatgtattgttggatgtatttgcctcaacgaaaccggaaaccaccttgcaagtctgatgacactatctctctctctyttttttttttttttggagggcagaaggctttgacatatcaatgcaccagggatcttaccaaactaaattttaagcacttatagctcaagattctccctctgagatgaaacatacttccaccctgtcatgtgtcagcttcagaagatatcaattgctcaagaaagtgttggacaagcagaaaagcacactgaacatttctggacttgtgaaagagctctgaatatggatctctcagggatattccatccccaccaatgctttaccaatgcgagagctggccaggctgagacatttaatgataacatggaacaatttattcaggaagatagtcaactactcatgtggctttatgattataaaacccactgaaaattgggtcccttgattctcttgatttttcctaagccttactccctaaagtctccaatttgatgaggtatttgatacttgatctctccttgaagtaaaatttggagcaaaatatattggactggaaggcctgagacctcgataagaagaaacatgaaccccagagccacaggtcaggaggttttcattataatactattgccctcttaaaacaaatactccaattgccaaggtttcctcacttaataatttatctcatatgtgtttttgaaagttactctgaatacttcttatatgtataaataagttagttaacagtaattaatgcagatatttaaataaatacaagcaggcaggtgggatgatgactacagtcacttgataaagaacagctaggtggccgggcgcggtggctcacacctgtaatcccagcattttgggaggctgaggcgggtggatcatgaggtcaagagttcgagactagcctggccaacatgatgaaaccccgcctgtactaaaaacacaaaaattagccgggcgtggtggcaggcgcctgtaatcccagctactcgggaagccgaggcagaattgcttgaaaccggaaggcggaggttgcagtgagccaagatcgggccactacactccagcctgggcgaaagagcaaaactccgtctcaaaaaaaaaaaaaaaaaaaaaaaaaaaaaaaaagaataaaagaaaaagaagaaaaaacagaatagctaggttcaggtgaaacttggggagtagaatgccagtcctacctggatctgcatctagtagaagaccttagggagataggattccctcaggtccagaaagagatttcccatgacctcggattgcagacataagatttcgcttactaaagcagttaaagctagtgctgctagtccttaggaaatccccagaatcaacatagttacagtctctcacctaacccagatcatgaccacctgtcttgcccacagactccagggtagataccacatctccttcccagtcaaagctattactagagtagaatcttgaaattttcagaaagtggctttcttgaagtggtaagagtggggatttccccactcttgtctgcacatgtgcagcttgtccccagcatgtgctggttatgctccaactgactacgtgaaggaactggcagacctgtgctcagttggttggtcagaacaggcccaatccaaggagtccatcacttcagaaagcaagtgaaggaactctccagagccggacttctcaacctttaatgtacatatggacacaaacatctggagatctttttaaaatgcagatctggattcagataagctgggatgttacctttcttacaacctcccgggggatctcagcttcagaccacactgtgagcagcaaggctctgggaagacttccctttttggcagtgatttccaatcaccagtttctcatacttaaattaccctttaaacagtcaaactttgctttatttttattttatttttgtttttttgtaggtctcactttgttgccaattctggtctggagcccctgggctcaagcaatcctcttgcctcagcctcccaaagtgctgggattacaggcttagccactgtgcccagaaacaagctttgctttatttcaacattcttcccacccctcccccctcctgcctcttggggtttcctccttcacatttacacacatacaatgcaggaagccttgtatgcatttaaggaagagaggatttggagatggacatttcttctgtaagccattcagtatgcctatgaagtacttgtggtcctctttaaatatatgtttgtttctggaccttatttctgttttactcaatcaggatttcagaatgcaggacctagaaatttgcattctattagaagactcaggttgatatgattcaggccactcgcagaacacagtttgagagactgcaagcaacaccttctccctgttcattgatcacgtgggaggcttagcaggtcactagacctgctagaggacaactcaagtagacatatcccccaattatgaaaaagtgcatttcaaggtaaaagtgacctcaayataaattggaattttgcagtgctgaattaattattgacacatttgctgagaagcaagcatggtttaaaaataaccacagtcacaacaaaaccacaaacctctgacttaggctttctaaatataagaaacaaaagacgaaccagracctccagtaacttccctccaggccccagctttcactggcccgattttacctgaaagsatctgagcatgggctctctaggatctctcaatatgccccgwcccttcccagctcccagctcccatttccctgtgtcctttggctgcctawctctatacatcacaaagagctacagaaataaaaatgcatgaattggtaaggcagatttatgcttgaattagataaatgyatatttcatctctaagcaaacactgaaatagcataagtcaggaagttgtacataagaaattctgtttcctatcagagaagcagggactatttacctcatgatggctgtttccctgcagttctgaaaagctggggtcccggttgattttgtttttagcttactgattccaagcaaatgctgaagaggtttccacccagggtrctgttaggtctgtgcttttatgaaaggggaaaggaaagtgaaactgwtggaaccctatcaagatccctcttgaggggaaactgaaacasaatctgtgagaactgagctcactcacgccaggaacatgttccagacagatttggaaaactgtggtttgaaagttgtaaaaaggcactgtaaaaagaaaataaaattttagaagcttccaaatgtgttatgtcaagaggcaaagttaagccctgaaaactgactcacgtaacgtgactgttttttttctcaggtgcatgactgttgctctttgacctgtgtggtgaggggttacatgttaaccagactccctagtctcactgcaatttctgcctctcgggttcaagtgattctcctgcctcagcctcctgagtagctgggattacaggcgtgcaccaccatgcctggataatttttgtatttttagtagaggcggggtttcaccatgttggtcaggctggtctcgaactcctgacctcatgatctgcccgccttggcctcccaaagtgctgggattatagccttgcaccaccgtgcccggcctcagacaacctagtctttattaaaacgtagacctcatgttatggaaatagagacccttttgattgttacttttttttttttttttttttttgagacaggatctcactctgtcatccaggctggagtgcagtagcacgatctcagcttactgcaacctctgcctcccaggctcaagcgatcctcccatctcagcctctccagtcratgagactataggcacrtgccaccacgcctggctgatttttgtatttttagtacagacggggtctcactatgttgcccaggctggtctycaactcctgagctcaagcatctgccctcctcggcctcccaaagtgttgggcttatgggtgtgagccactgcggccagccatgttacctctttacaaaagaatattaagcaattcccttggactgtaatcaatagtagccaatcaaattgtatatctgtatgttagcctctgtatggaaaatgttggccaggcacggaggctcacgcctgtaatctcagcactttgggaggccaaggtgggtgcatcacttaaggtcaggagttcaagaccaacctgaccaacatggcaaaaccccattgctactaaaatacaaaaaaattaaccaggcatagtggcgtgctcctatagtcccagctacttgggaggctgggtrggagaatcccttgagcccaggagtctgaggctgcagtgagccatgatcgggccactgcactccagcctgggtgacagagtgagactctgtctcaaaaacaacaacagcaacaacaaaaacaacaacaacaagagaagttgtcattctgttgaacacctctgtctttgcctatgtaaacagtcctcatttttctctacactggaagtactgttcaccattcttgggtgcagctctactcctgggactgctgccctcaactttttgttgaataaactcttttaactggatcctgagccttctgattattgtatattgacagtactgactatgcrgtcctactcccagagattctggtgcagtgaatctgatgtgagcttagaaacctgtgttttcacaagtgccttggaaattcagtgcaggagttcctgtaccacattttgagaagtgctgtcatagaggtattttaaaaagcagttttcccctttatttrtggagctaatgtggtgaattaagcagcattatcaggcatcttgagtgaagggaagaaaaccacaggacacctggatttcagtgacctctttgcttagttctgggatatttcttgagtcatatcactgagcctcattcccttatccttaaaatgccctaggatgaatttccttttcccttcatccaaatgatagaaaattatgccctggggagaaccactttcacccttctccaagatctgggttcagttcttgtggctttggccactctaaggcatgggtaaccatcaaaggctggcccttactctccagataggaagcccatccctggccccctctctaaagtgagcatagttgaaagcattaagatctttcaccttttggccattgggcatagagtcagatgatcagcagtagagtttggtgcctccattaatgactctgctctgacacctgctctctatctgatgtcttgggcaagtaatttgcccttctaagccccattttggtcatctagaaaatgaggctaataatagaaataatagctcttacttcctagggctgttggaagggtgatatgaggtcatgcgtaaaacgtgtttaacacagtgcccacttgtcaggcctctgagcccaagctaagccatcatatcctgtgacctgcatgtacacatccagatggccagttcctgccttaactgatgacattccaccacaaaagaagtgaaaatggcctgttcctgccttaaccgatgacattatcttgtgaaattccttctcctggctcatcctggctcaaaagctcccctactgagcaccttgtgacccccacacctgcccaccagagaacaacccccctttgacagtaattttcctttacctacccaaatcttataaaayggccccacccctatctcccttccctgactttcttttcggactcagcccacctgcacccaggtgaaataaacagccttgttgctcacacaaagcctgtttggtggtctcttcacacggacttgcatgaaaccactaactacagatcacaaagaaatgttaccaccatgattgctggtactaatatatttgtgttataattttaagtgaatttgtgagtgtgtaaagggagcaacagagttcctcagtggatggggcagaggaggatgcccatcagctggcacgtgccagtgagttctccaggtgattttcccatttggaaatttttagcacaactggggaggagcagcccaatctcttcctgttcctatagcctctggaaataggagcaccttgatgtgaacctgagtccagcatagttcagagagcccccctcagacctcctcaggtcagtggctatagacacacctaaagacaggaccctgtaaaacctttcctgcaagctggctactaagacgccttgctctctggtcaatcccactcacacagacacaattaacatcactcttgaccaggaacttattctatataaaagggtattctatatactgaggtatttggcagtgaattcctcttacccatctcatccccaaacatgacattgcagagcatcttcaagtccttggggcagagtaaggtagggaatccagttttccttttctgcccccctgaatggtcgatggggtcttccctccctggcaatcacctcctcactcctttcctagagatgcttggtgggaaaggcatccttttctcttagttctccctaacatgctatcccctgaagaactccaggaggwcaatatataaatttaaaaatcaagtttactgagattatgctttatatacaataagatgcacccattttcagtgtatagtctgatgagttttggtaaatgtttatgcatatgtagccaccatcactacctccctatagactattcctatgattctaaaaagattcttttgggagccttcctactcaatccccaccatctccaggcaaccactgatctgcttcccaccattagagattagactagttttagataatagattaggtcattacacttttgaggagaaattctttttttgctgctgaccagcattcactacatcaataaaaataaatgctaagctttgggtttgtttttatataagaaatgacaaaaatgcccatttgtaagaattgtttcttccacttcccaccttaaagtaatgcaacgtttcagggcaaaattgccttcttcatgagtgggtttgcagtactgattgtatctttcacaatatctgttgaaaataaattcctccttttaaaattacaagaaaaaaagcctgtgacttaatcttttcaaacaaaatgacaataacagaaaaacccaaaagagtaattcccttaggtctacccttgaatcagccaagtttgtggctgagtgaaatacaccgctcctgccaagccttcctctcattgcaggaaatagctgcacacagggaggaaacatgagctgatgcattccccaccctgcctcccsccatgtagttccgtagggaaccattccagaaayttaagaagcctgtgtgtacaccaaaaaaagccacagggaaaaacccctcaaacatcttacaaatgctcagactgataaagacatattgaatctataaacatcaggacaattcaggaatgtgcctgcacagtaagaaactcaacttacaatttgcactcaaaaacaagcatgattatgcattcttatttcactgacctcatgactgccctctgtgtctctgctgttscgaaaagctggtgaccaggctgatttgttcttcagaagtcttcctgtctgcctcaagtaaatactgaaggaactayataaaggggtgggagagtagggcacgcatcagctgatgttttctccgtttttgagtaattgcttttaggggaaggaagaggaaactggaaagtgaaactaatttaaaatcgttgggaggaggaaaatgaaacctaacggcttgagacctgcaatggctgagccrgagtacgttattcaaaactgtgactaaaatttgtttgagagaatgtggaagcattcctaatgtaaaccaaaaaattaaattctaaggccatactcaccaaccatgtgactggacccctgcttttggccaagggcattccaaagttaacctgaaaactgatgtgaaggggaagctggatatgcctcattacatcctttttccttttggaattactaatagaacacactctttttttgtttttgtttttgtttttttttgagacagagtcttactctgttgcccaggctggaatgcagtggcatgattgcgtctcactgcaacctctgcctcctgggttcaagtgattctcttgcctcagcctcccgagtagctgggattacaggcacccaccaccatgcccggctaatatttgtatttttagtagagacgaggtttcgccatgttggtcaggctggtcttgaactcctgatagcaggtgatccaaccaccttggcctcccaaagtgctgggattacaggcatgagccactgcacccagccagaacatgctctttttaagtgtattaagaaacatttacaacctattctctctgaagcctgctacttggaggcttcatctgcataataaaaccttggtctccacgacccagacattcctttctaatgattgtctattgaatttctattggatgtctccaaacattcctttctattgataataactctttcaacaaattgtcaatcagaaaatctttgaatctgcctatgacttggaagctgccccgcttccctgtttccaattgtcccacctttctggacctagccaatgtacaccttacatgtattgattgatgccttatgtctccctaaaatgtataaaaccaagttgtggcctggcacatgttctcaggatctcctgagggctgtgtcacaggccataggtcattcatatttggcttagaataaatctcttcaaatgttttacagagtttgactttttttgtcaacattaggtatctgaccatcagtctagggtggggcccaggaaacagcattttttaagccaattcttattatttttaaaaattttttgtggacacatagtagatatatatatttatggggtacatgagatatttgatgcgagcatacaatgagtaataatcacatcagggtaaatgacttcaagcatttattctttgtattacaaacaatccaattatactcttttagttattttgaaatgtgcaataaactattgttgactatagtcatcctcttgttctaacaaacactagatcttattaattctatctaagtatatttttgtacccattaaccatccccacttcccccgctactactcttcccagcctctagtaatcatcattctaatctctatctccataagttcaattgtcttaatatttttagcttccacaaacaagtgagaatatgtaaaatttgtctttctgtgcctggcttaattcacttataatgacctccacttctatccatgttgttgcaaatgacaggatctcattctttttatggctaaagagcactccgttgtgtaaatgtaccacattttctgtatccattcttctgctgatggacacttaggttgcttccaaatcttggctattgtgaatagtgctgcaataaacatgggagtgcagatatctctttgatgtactgatttcctttctttttgatgtattcctggcagtgggattactggatcatatggtagttctatttttagtcttttgaggaacctccgaactgttatccatagtagttataatagtttacattcccaccaacagtgtacaagagtttccttttttccacatccttgccagcatttgttattgcctgtcttttggataaaagcaattttaaccagggtaagatcatatctcattgtaggtttttttttaacttatattttatgtkcaggtatacacgtacaggtttgttatttaggtaaattgcatgtcatgaggctttagtgtacagattatttagtcaccccactcataagcatagtacatgataggtagtttttcagtcctctctcttcacccattctttaccctcaagtaggccccagtgtctgttgttcccctctttgtgtccataatgttcagttcccacttataagtgagaacatgcagtatttggttttctcttcctgcattagtttacttaggataatggcctccagttccattcacattactgcaaaggacatgatattcttttttttgtggctgcatagtagtccatggtgtatatgtaccacatttcccttatcctgtcttctgttgatgggcatttaggttgagtccatgtctttgctattgtgaatagtgctatgatgaacatacttgaacatgtgtctttatggcagaatgatttatattcctttgggtatgtacccaataataggattgctgggttgaatggtacttctattttaagttctttgagaaattaccacattgctttccatagtgactgaactaatttacattctcaccagcagtttgtaagtgttcccttttctctgtaacctcaccagcatctgttatttttgttgactttttaataatagtcattctgactggtatgacatgatatctcattgtggttttgatttgcatttttctaatgattaatgatattgagtattttttcatattcttttttttagggtatctgaaggaagaaatttattttctttttttattattatactttaatttcttgggtacatgtgcacaatgtgcaggtttgttacataggtatacatgtgccatgttggttcatatgtttattgcggcactatttgcaatagcaaagacttggaaccaacccaatagacygggtaaagaaaatgtggcacatatgcaccatggaatacaatgcatccataaaaaaggatgagttgtgtcctttgcagggacatggatgaagctggaaaccatcattttcagcaaaatatcacaaaggacagaaaaccaaacaccacatattttttcatattcttattggccgcatgcatgtcttcttttaaaaagtgtctgttcatgtcctttgcccactttttaatggagctgtttgcttttttgcttgttaatttgcttaagtttcttatagattctcaatattagacctttggttatgcatagtttgcagatattttctcccatctgtcagttgcttgtttactctgttgatagtttcttttgctatcagaagctctttagtttaattaggtcccgtttgtcaatttttggttttgtcgtagttgcttttggtgtcttcatcatgaaatctttgctggtttctatgttgagaatcgtatttcctaggttatcttccagggttttaatatttttaggttttacatttcatccakcttgagttgatttccatatatgatgtaaggaaggggtccaatttcagtcttctatatatggctagccagttatcccagcaccctttattgaacagggaatcatttccccattgcttgttcttgtcagctttgttgaagatcagatggctgtaggtgtgtgcccttaagtttgggctctctattctgttccattggtctatgtgtctgtttttgtaccagtaccatgcattttggttactatagccttgtagtatagttcaaagtcaggtaacatgggctctctattctgttctattggtctatgtgtctgtttttgtaccagtaccatgstattttggttactgtagccttatagtatagttcaaagtcaggtaacatgatgcctccagctttgttctttttgcttaggattgctttgggtatttgagcactttttgttctataggaattttaaaataggtttttctaattctatgaagactgtcattggtagcttgttaggaatagcattgaatttgtaaattgctttgggtagtatggccattttagcaatatcgattcttcctatccatgagcatttccatttgtttgtgtcatctctgatttctttgaacaatgttttgtaattctcattgtagagatctttcacctcctgcgttagctgtatttctaggtattttattctttttgtggctattgtgaatgggattgtcttcctgatttggctctcggcttggattttgttagtgtataggaatgctactcatttttgtatgttgattttgtatcctggaactttgctgaagctgtttattagacctacgagcttttgggtagagacgtgggggttttctaggtatgcaatcaaattgtctgcaaagatagatagtttgacttcctctcttcctatctaggtgccttttatttcattctcttgcctgcttgctcatgctagcagtactctgttgaataggagtgctaagagtgggcatccctgtatttttccagttctcaaggggaaatctttcagctttcgcccattcagtatgatgttgaccttgggtttatcatagatggctcttattatctggaggtatgttccttcaatatctagtttgttgaggatttttaacattaatggatgttgaattttatcaaaagccttttctgtatctattgagatgatcacgtggtttcagttttaagttctgcttatgtggtgaatcacatttattgatttgtgtatgttgaaccaacagaaacaagaattttataaaggaatgggaaatgagaatttggctgtgggacataaattggaagctctagcaggcatggcttgcctggctacaagaggccagggtaggtggggttgcctaccttgcctgaatgtttcccaggacaacaggaggctgtgctctctggctgaattcagacagaagtggaaccactgggatggaagctctagcaagtgttgcctgcctggcaaccagtggcaggggtagatgtagtcacctgtcttgccctccaggtgcttcctgggagaacaggaggctatggtcactggctgagttcagacagagaagtaggaccagtaggctggaagctggcaccaagccccatccagaaagggtttgagatggggcaatcttactgctcctaggcactgggactgcagcctttattgggctatggcaccagtgctggtcttcttgggggcacaaggcttgcagaagtctccttggactagagagttgccctccaaaatgtctggggggctctctgcctcagtctagaagcacggtggtggggtcgggggtgggcaggggtttcaggggcattctcccatttccagtcttgcacaggtccctgtcgagagtgtgaatcccctagggggttctcactcactcaccctttccagtgttggagaaattctcctggatccacgctgagcccggacaggctggtatctagcttcacccctttctgctctctgtaatccccttacatcttgaaggatcccgaatccctgacatgatttctcagatgattggcctgcagggtcaatgctcactagcccttttgtttcctttccgtgatagcctggcacatgagttgcttctagtttaccatcttaaccccgagctcgaaactgcattttttaaaattttactttaagttctaggatacatgtgcacaacacgcaggtttgttacatatgtatacttgtgccatgttggtgtgctgcacccattaactcgtcatttacattaggtatatctcctaatgctaaccctcctccctccccctaccccatgacaggccccagtgtgtgatgctccccatcctgtgtccagttgttcttattgctcagttccgacttatgagtgagaacatgcggtgtttggttttctgtccttgcgatagtttgctcagaatgatggtttccagcttcatccatgtccctacaaaggacatgaactcatccttttttatggctgcatagtattccatggtgtatatgtgccacattttcttaatccagtctatcattgatggacatttgggttggttccaagtctttgctattgtgaatagtgctgcaataaacatacgtgtacatgtgtctttatagcagcatgatttataatcctttggatatatacccagtaatgggatggctgggtcaaatggtatttctagttctagatccttgaggaatcgccacactgtcttccacaatggttgaactagtttacagtcctaccaacagtgtaaaagtgttcctatttctccacatcctctctagcacctgttgttactgactttttaatgatggccattctaacgggtgtgagatggcatctcattgtggttttgatttgcatttctctgatggccagtgataatgagctctttttcatgtgtctgttggctgcataaatgtcttcttttgagaagtgtccattcatagcctttgcccactttttgatggggttgtttgatttttttcttgtaaatttgttkaagttttttgtagattctggatattagtcctttgtcagatgggtagattgtaaaaattttctcccactctgtaggttgcctgtccactctgatggtagtttcttttgctgtgcagaagctctttagtttaattagatcccatttgtcaattttggcttttgttgccattgcttttggtgttttagacatgaagtccttgcccatgcctatgtcctgaatggtattgcctaggttttcttctagggtttttatggttttaggtctaacatttaaatctttaatccatcttgaattaatttttgtataaggtgtaaggaagggatccagtttcagctttctacmtatggctagccagttttcccagcaccatttattaaatagggaatcctttccccattgcttgtttttgtcaggtttgtcaaagatcagatggttgtagatgtgtggtattatttctgagggctctgttctgttccattggtctatatctctgttttggtaccagtaccatgctgttttggttactgtagccttgtagtatagtttgaagtcaggtagtgtgatggctccagctttgttcttttggcttaggattgtcttggcaatgcaggctctattttggttccatatgaactttaaagtagttttttccaattctgtgaagaaagtcattggtagtttgatggggatggcatgaatctataaattaccttgggcagtatggccattttcacgatattgattcttcttatccatgagcatggaatgttcttccatttgtttgtgtcctcttttatttcattgagcagtggtttgtagttctgcttgaagaggtccttcacatcccttgtaagttggattcctgggtattttattctctttgaagcaattgtgaatgggagttcactcatgatttggctctctgtttgtctgttattggtgtataggaatgcttgtgatttttgcacattgattttgkatcctgagactttgctgaagttgcttatcagcttaaggagcttttgggctgagactatggggttttctaaatatacaatcatgtcatctgcacacagggacaatttgacttcctcttttcctaattgaataccctttatttctttctcctgcctgattgccctggccagaacttccaacactgttttgaataggagtgttgagagagggcatccctgtcttgtgccagttttcaaagggaatacttccagtttttgcccattcagtatgatattggctgtgggtttgtcataaatagctcttattattttgagatatgtcccatcaatacctagtttattgagagtttttagcatgaagggctactgaattttgttaaaggccttttctgcatctattgagataatcatgtggtttttgtctttggttctgtttttatgctggattacatttattaatttgcatatgttgaaccagccttgcatcccagtgatgaagctaacttgatcatggtggataagctttttgatgtgctgctggattcagtttgccagtattttattgaggatatttgcattgcatcratgttcatcaggggtattggcctgatattctctttttttgttgtgtttctgccaggctttggtatcaggatgatgctggccacatcaaatgagttagggaggattccctctttttctattgattggaatagtttcagaaggaatggtaccagctcgtctttgtacctctggtagaattcagttgtgaatccatctggtcatggactttttttggttggtaggctattaattattgcctcaatttcagaccctgttattggtctattcaggaattcaacttcttcctggtttagtcttgggagggtgtatgtgtccatgaatttatccatttcttctagattttctagtttatttgcatagaggtgtttatagtattctctgatgatagtttgtatttctgtgtgattggtggtgatatcccctttatcatttttaattgcatctatttgattcttctctcttttcttctttattagtcttgctagtggtctatcaataatgttgatcctttcaaaaaatcagttcctggattcattgatttttttgaagggttttttgtctctatctccttcagttctgctctgatcttagttatttcttgccttctgctagcttttgaatgtgtttgctcttgcttctctagttcttttaattgtaatattaggtgtcaattttagatmtttcctgctttctcttgtgggcatttagtgctataaatttccctctatacactgctttaaatatgtcccagagattctggtgtgttgtgtctttgttctcattggtttcaaagaacatctttatttctgccttcattttcttatgtacccagtagtcattcaggagcacgttgttcagtttccatgtagttgagcagttttgagtgagtttcttaatcctgagttctagtttgattgcactgtggtctgagagacagtttgttataatttctgttcttttacatttgctgaggagtgctttacttccaactatgtggtcagttttggaataagtgcaatgtggtgctgagaagaatgtatattctgttgatttggggtggagagttctgtagatgtctattaggtctgcttggtgcagagctgagttcaactcctggatatccttgttaactttctgtctcgttgatctgtctaatgttgacagtggggtgttaaagtctcctgttattattgtttgggagtctacatctttttgtaggtctctaaggacttgctttatgaacctgggtgctcctgtgttgggtgcatatatatttaggatagttagctcttcttgttgaattgatccctttaccattatgtaatggccttctttgtctcttttgatctttgttggttaaagtctgttttatcagagactaggattgcaaccctgctttttttattttccatttgcttggtagatcttcctctatccctttatttttagcctatgtgtgtctctgccatgagatggctctcctgaatacagcacactgatggttcttgactctttagccaatttgccagtctgtgtcttttaattggggtatttagcccatttacatttaaggttaatattgttatgtgtgaatatgatcctgtccttatcatgttagctggttattttgctcgttagctgatgccgtttcttcctagcaccgatggtctttacactttgacatgttttgcagtggctggtaccggttgttcctttccatgtttagtgcttccttcaggagctcttgtaaggcaggcctggtggtgacaaaatctctcagcctttgcttgtctgtaaaggattttatttctccttcacttatgaagcttagtttggctggatatgaaattctgggttgaaaattcttctctttaagaatgttgaatattggcccccactctcttctggcttgtagagtttctgccgagacatctgctgttagtctgatgggcttccctttgtgggtaacctgacccttctctctggctgcctttaacattttttccttcatttcaactttggtgaatctgctaattatgtgtcttggaattgctcttctcgaggaatatctttgtggcgttctccgtatttcctgaatttgaatgttagcctcccttgctaggttggggaagttctcctgcataatatcctgcagagtgttttccaacttggttccattctccgtgtcactttcaggtacaccagtcagatgtatgtttggtcttttcacatagtcccatatttcttggaggctttgttcatttctttttactcttttttctctaaacttctcttctcacttcatttcattcatttgatcttcaatcactaataccctttcttccagttgatgaattggctactgaaggttgtgcatgcgtcatatagttctcatgccatggttttcagctccatcacatcatttaaggtcttctctacgctctttattctagttagycattygtcgaatcttttttcaaggttattagcttctttgccatgggttcaaacatcctcccttagctcgaagaaatttgttattaccgattgtctgcagccttcttctctcaactcatcaaagtcattctccgtccagctttgttccattgctggcaagcagctgcattcctttggaggagaagaggcactctgattttttagaattttcagcttttctgctctggtttctccccatctttgtggttttatctacctttggtctttgatgatggtgacatacagatggggttttggtgtggatgtcctttctgttttttagttttccttctaacagtcaggaccctcagctgcaggtctgttggagtttgctggaagtccactccagaccctgtttgcctgggtatcaccagtggaggctgcagaaaggcaaatgttgctgcctgatcctttctctggaagcttcatcgcagaggtgcactctgccgtatgaggtgtcagtcagcccctactgggaggtgccttccagttaggctactcagggaggagtaacagactaactcccacttgaggaggcagtctgtccattctcagatctcaaactccgtgctgggagaaccactactctcttcaaagctgtcagacaagggtgtttaagtctacagaagtttctgctgccttttgttcagctataccctgccccagaggtggagtctatagaggcaggcaggcctccttgagctgtggtgggctccacccagtttgagcttcctagccactttgtttacctactcaagcctcagcaatggtgggcgcccctcccccagcctcactgcygccttgcagttccatctcagactgctgtgccagcagtgagcaaggctccctgggcatgggaccctctgagccaggagcaggatataatctcctggtgttctgtttgctaagaccgttggaaaagcgcagtattagggtgggagtgtctcaatattccaagtaccatctgtcatggcttcccttggctaggaaagggaattccctgactccttgcacttcccgggtgaggcgatgccccgccctgctttggcccacactgtgtgggctgcacccactatctgacaagccccagtgagatgaacccagtacctcagttggaaatgcagaaactaccatcttctgcatcactcatgctgggagctatagactggagctgttcctatttggccatcttggaacctcctctgaaactgcatttttaataatgtctctaggagattctgatgtaggggtttctgggagccggttatatgaaagacttccaaaatgttttgtaaaaaaaatagtagttttagtatacatatgtaactaacctgcacaatgtgcacatgtaccctaaaacttaaagtataataaaaaaaaatagtagttttgtccagtaaattgtcccccagaagtaaatttagacctagagacctagatttaattatctctgtttactttactagttctcgaattttccaggggccatatcattgagccagaatttcctttttgcctcacactaaacatacgaagccaggccctggaggratctgtgagctgtttagctttccaagctctggataataatttagtttacccagctgtaaaatgggcaaaagtaatacacatattattgtttaatggatggattatatatttatgctttgagctctgaaggagttgatactaccctgagaggttttttttttcttttcatttttataatacttcccaaccatgatgtaaatattcataaaaacctagggagtatagttgtcatgactaatttgataaygaaggaattgttagctagaagcgtttcctccatcctgtakctgcacaaagcagagactcttgtgtagcaaaattaacatgacatatggtgtttccaacaacagagtctcatgagatacttcgagttcagaggttgttatagtctaagaaagaaacctgcaacttggaaaagtctaattctgattggttgtttaacttaacaatttgttatcttggtgataataaagtgacatatctttataaaaggtacatatatttgtgatatcataaatggtataaataccatccttatacccagttagaaggtgcctttggccccgtgctttagagggtcccatatatcacagatacaaacatgtaaaattttgaaagaacaaatagcacctctgttactcagaatccagtgcttaattctggtagaattggacttgaaaccctaaacatccagcccagggaaaagttgcctatcttcccttctttgctcacaatgaatggagattatatcatgcatgtttgtgcattgtgagggagctgatttttagagacagattctgctttggagttcagagaggattgtagcaataaagatcagagaaaaggcaaattcagcaaactgctcaaagactgtctttcaccagaatgcaatagattcttatgtaatgaataattatttttccagtacagtaggacctattgtccattttcttgcttttctttttgttctaattcctggctcaaaaagtactcatgaattagcagtatttgcaacagttgcacatggtgactgaataacattctgcatcattaagaaattcatactattcttttttttctttttgacagagtctcgctctgtagccaggctggagtgcagtggcacaatctcggctcactgcaaccttcacctcctgggttcaagaaattcacctgcctcagcctcccgaatagttgggactgcaggtacccaccaccatacccacctaatttttgtatttttagtagagatggggtttcaccatgttggccaggatggtctcgatctctaaacctcgtgatccacccrccttggcctcccaaagtgttgggattagaggcgtaagccactgcgctcgggcataaattcacattattcttaaacttgtacacatgcagatttgaacttacatatggagtcaaattctcttctgtatttggactctttctttgtgccaatttgccaatcagtaaggttcctgcgtatgagtatttaaatataaaatcagatgggaccagattttcatagcacacccaactcagaaaatagaatacataacttatctaacatatctaccgaatgtgaaagcaatgacagtattcaaaatgctactaataaggatacaacacaatgaaaacaaacttagaagtaaaaatagataacaaaagaaaaattttctttattatatttggaataagagtgcccatttttaacagctataataaaatataattcacatatcatataatccactcatttaaagtatacaattcaatagctttcattatattcacagttatgcaaccagcaccacaatcaattatagaacattctcaagctgtcatctcccatcgtcacaaccccctcccctagccttaggcaactgctaatctattttctgtgtctataaatttgcctccgttccacatttcatataaacagaatcatacaatatgtgactttttaaattgccttttgtcactttgcatgttttcaaggttcatctgtgttgtatcatgtatcagtaagtacttcacttatttttgtttccaaataatattccattatgtggctctaccatatttaatttatcaattcatcagttgatgggtccactttttggccatcgtgaataatacagctatgaacattcatgcacaagttttgtgtgaacctatgttttcatgttttcctttttcttacatatgtatctaggaatggaattgctgggtcatatggtaactatgtttaaccatttgaagaactgtccaactattttccaaagtggctgcaccattttacattaaacatacttatttttgaggtaatacagattttcttatctgagatctcaagagatgagttactgaaagagagagaaggctgtaggaaggaaaatgtgctggtatgatcttcatttctgactaaaggataaactgaaaaatggaaccagattgaattggttgcagttcagtctatacctctgctattcaaggtgtagtttacagactacaggccttgttttgacctgagagcttgtgagaaatacagagtctcaggctccacccagatctactgaatcatagtctacattttaacaagatcctcaggtgattgtgcacatgaaagtaggcactgcacattaaagtctgagaaatactggtctagttagaactctagatattctacaggtaataacatgtaagacagtgctggactacacacaaaagtgtgtgctcgtgtgattgaaagctagagtgtattctaggtatgcaagccatgtcctctgccagtcattttctccctcctcccatgtctccttcttggataatttgctctcattcctgcagaaagcatgcactctaagcccctgctttctctggaatatgatctcattctcttggtcaactggattattattattattattttttttttttgagagggagtcttgctgtgtcacccagcctggagagcagtggtgcaatctcggctcactgcaagctctgcctcccaggttcacgccattctcctgcctcagcctcccgagtagctgggactacaggtgcccgccaccacgcctgtctaattttttgtattttttagtagagatggggtttcaccgtgttagccaggagggtctcgatctcctgacctcgtgatccgcccgcctcagtcaactggattctattggtaatggatattgacttgaaatgagacaaacagatatttctttggaattttgatcagaagaaagtgattctagaaagtctttattgaattattattattatttattttttgagacagggtctcatctcactgtgttgcccaggctgtagtgcagtggcacgatctcagctcactgaagcccccacctcctgggctcaagtgttcctcctacctcagcatcccaagtagatgggactacaggtgcatgccaccaagcccagctaagttttgtattttttgtagagatagggtttcaccatgctgtccaggctggtctcgaactcctgggctcaaacaatccgctcacctcagcctcccaaagtgtggcgattacaggtgtgagccactgcacctggcctttgttgaattattaggagaagagataaataacctggtaggcatgttttccacttcatgcacagagacgcaaagtcatctctagaaagagaaacttgaaggaagaagacgtaaagggaagataaaagtgagaaagaaggagagaaaaaggaagagagagatggtggggacagacagagagagaggagagaaaactagcattctgggtgtggagaggatttccgtcatacagattccacacttgaacattttatttttctgtgatctatacgccagtgccttttttggaaatatatgcatgcactcatcagattgacaaaaattaaagactggtaacattcagtattggtgaagatgctgaaaacagtatttctcatacattgctagtggaaataataatttcctttttaacacctagacaaatcaactcttttccataacctaaaagccttaatcattatttaaaatgtttctatttaaatattctagtgaactctagttttccttaatcaacaattagaagatatattacaaagttttatacatatgttttaaagctccaacttatgtaggtgtttcactaaatgcaaaaaacgtacaagtaggtttgagggtttttttttttttttttttttttgagacagggtctacctctgtcacccaggctggagtgcagtggtaccatctcactgcaactaccacctcccaggttcatgagattctcctgcctcaacctcctgagtagctgggattacaggcacacaccgccatgcctggttaatttttttttgtattttttttggtagagatggggtttcaccatattgatcaggctggtctggaactcctgacctcaggtgatctaccctccttggcctcccaaagtgctgggattttaggcttgagccaccacgcccagccaggtttgagtttttaaatgtagtgcttgatgacaaattagtaagtttmatttaaaaatgagaaaggaaaatgtgtgctcagtggttttatatcacagtgcctttgctctgtaatatctgtgaatcaaaagcagaacataaataggctcatttacttgggatatccaggattctggaaaggtaaagaaagacttttcaaatattttaattagattatatctgtataaacacactggggccaatttccagatctctagaagggtttcaggaatttctaggttcagggcagaatttactrtrtatttttacattttactcagaaataacacaaactatgactcattatgtttccaaaacaagtgagacataaaccaaggctctggggtctatttgtatcgtttacctgtttggtagcctccttttcaacagcagcctacagagaaccagaggagaagcagaactgtttgggatttgtttccacaggcttccaacaaatcctgcctctggtctcttctctagtcttaagtcctgtatgtaaagcagctgaagggaggccccatgtagagctgagaatgcctctcttacaagtgcatgcacctaggtacatctaaggattttagtgggtttccctctttgcagcctccctagaaggtgtagataatcagcaatgaggtagctgcactattaatcatggggaaaatttcttacatattagtctaagttagtcccttttccaaaaagggcaatagggcaaatgtaggttgcaaactgcaaccctcagattggcatccaaggttgattgcacgtatggtagggatcctaacacaaggcctatctgtgttataatcagaattctaatgcttccagtcttccagttgcactggatccagttgtattggatatgtcaattgacatagggtatgaaggaaggtgaaagtgcagcatgactcaaggtcagctgtccccagggactgtgtctgagctctatggagaaagacaagcagaagtgatgaatctttttcactgaggactctgaggcagagaaataaataagaactacttggaaccaacacagagataagaggaattcttctcactctttcactggcactaacacacttgaaaacattgttggcagagatattagtactctcaaggtggcaatcaaatacagagaatgtgaaatgtattgaaggcagttttaggggcaatggtcattgatggatatgggtgttgaagctacataagtagcagatgtggtccgataactctgataaacgggttcatgagcacataggagacatctactaggggcttgccgtgttggatgaatatatgaagggagtcaaatgtcctgccccgggaaatgtggctaaaaggctgggaattacaagtcaagcccaattaatgtgacttcatttgttattcttggatagtgaaatttcaggaaactggagctatgtacataattttcattgttttccaatcatttgttaactttaagccctcatattaagtgtaatatgttatgtttcccttttctacccttcttgctgttttcccactaagggtcctgttccagcaagggactggaggcatgacatgcaaggacaagattacatacatccatctttagcacacacaggtaccaagggtcctctctcaaggtcggcatacctgtccattttaaccttycactcagaatacgtgtggtgttccttcccaggcaccagatgtagtcctaatttactcagatcaaggtgagctagatcttcccctgaaacatacacttgtccattttgatccaatgaaatgagtttacctttgcagttggtgtgatttgtgttttccattagaggcctmttgaaaaataatagagattttgggccttcttgtctcttcctattctttacttaatagggaagactctttaacatgcatttggattgcgtccaggatggggcataaaatggaatcagtgacttttatttctcataacagaggtcagaatagagaaaatgtgatgaaagcacaaaatttaacaaagaaaaggggagcagcccacccaccatcaaggtggagacagaatgtctgtgttcacgtaggtcaatggtagcaggtggcagatggcagctgttatccgaagccctggactcttaaagctgaggaaaaagttttgttctgttcaggtgattatgatagtagaccagtcgaggttatttggatttggttcacacctgtgtaacgtttcatttatcagtagctgagtctgaaagatttaaagtacagcaaaattccagatgaaccagaacactgctttatgttttatcatatttaggttatttattaatgaaaatatatgacattttcaggaatacaaattttgcaccctgatgacctcaaatgcgtgcaacaagatgtttaatacagaaaataacacaaaaactgttgttacagtggttagaatttttaactttaaaaaaccatgaatttgtattgttttaattgcacaataaaataatgttgatatatacttaagcttaaattaattccaacaggcaaacattttccaacccagagtgtggctgatgctgggtcagctgactctattttggttcacaccaactttgatgtctaggctattcagcatctacctagaaaatctcaatcgttccaagcataccgtgaattttgtgatttctcagaagattttcggagttaaaagaagtgtttatatcacttaatatccaacatttctaaaggggggaaaaccccaccatctattatcaatgacatttcccaagtccttgcaccaggcccttagtcaccaggttcccacgttttgttgctttcctaccgtctcaaaccaggttcatgaaagcatttgaacagagttcagtcttcattttacaaaaaaaaaaaattcctaatagtggctaaaatactgcaaatttctccattcgattacaatctacaaagataaaccagcattcctttctctttctctcttttggttacttttcccctatccctactggtggaacatttattttttcacacaggttttaaagaaatacattatgttggtttctagtgtattgtacagaatccattctcattctttacttgctacattatgactatgaggagggcagagtagaggtgaactctctgtatacttgctgaaagtcttcttgtacacattgctttttgtacccgtcgcttctagctatgtatcttcctgttctctgccctcgtctcaaactatgttgccacctcaattaatcaggcacttgaattcacattgtgtagaatactcaaggttgatgatagactgggaaggaggaggaaggaggcagagataagcgatgggggatactgagccctatttagactttggtccsccagcttttggatgaacttagcacattactggctatgcaggactaacctctatgggatgcaaaatgactccaagtatggaacaacattgcaaaaatggacttcaatattacatgaaggatttggctgctttatataaatatagaaacaagcccagtrgattactccactaaaggtgactaagcaaatgttacagttcaaattgcactcaagaagtcaatcgagaaataattctatcaccaagcccgtggacctaccccccaatctggtccctctcccagaactccttgggctctctcaagacccagcaattcaggtgttaacataaccctgtccagtggtatggccagtgtcttagtccaatcttttgccataccagtcattacatattttgaataccaacttggtggaggaatttcagctccctttcagcagtagcctagtgggcaccacatctctattcttcattccccattccagcttgatgctgaagggatgaggcttccagactccaaacccctctcagagtcttcatctgcttgttgcattttttcattcagctcctgaaggaatgccaagacatgcaaagcctcagaatctgctccatttttagaaagtcgcattttggcaattttttgcagtttgtctttcatcttttctttctcccttgatttctggtttatttttacaccctctataaagtggtggatggccttgtcttcacacttcatttggtacagctgaaagttgccataccgcagatggagcagttgtttcgctacaggagtaagctctttactgaattccttttggaagtaatactctgcktcttcatactgatctgctagagcatggaggctggcaagaatggaacagacacggaagagattatcattggcctcatcagctttcttcagatgagccacagcgtgtcctattagttccagtaactttcttttcccayacattccattctctcttagattcattrcttggaagacttttgccctatagcagcacccaatttggcaatgcaggtaggcattgtttggtatgtattctaaagcctttttaagcagttcaatcgctttgtctggctcatcttttcttcgataaaacttggctgcactgcgaagwacatctgttacacctggggctttctccaaggcttcttcaactaacttctctccttcaccttcctcttcaccttcttcacgcatcttatgaagcttcagagccaggaggactttaaggtactggttgtcaggattcagccgaatggcttgcctcagagggtcaatggcgttmtgagatggtggccagttgtccagacggtagcttgctattgccagtccagaggtgaattctgggttctttggcttcttttccagagccttctcaaagcacaccttcgctctttcattttggtttcctccacactttaacsgtgtccacccttcctcacagtcaagctctggactctcaattctatagggactggaaaacttctcacagacatgtytcaccttgtctacataaatctgaacgtctgagagtcggcccatgtgatagtagacccaggcatagtttccccaggtgaccagacttctgatttctgcctggtcagcatgctcttgctggattaackcttcagctttacgtaagcattccagggctgcctcgttttgccctttgaggtgctttagataggccagtaggttgcacattgtggctttgaattcacgattctgaaactcagtccggtaaaatactttgtcttcaaaatcatccaaggagttttctccctccatcaagttccaggtgaaatggcattttagttgccgtaggctgctctccaaggaattcttattgttctcactgtagggaaaaacacaaagatggactttgagacacagatttatatgtcaagaaatgggagcatggcaaataaaatgctcctcctcctaaaggctgttaacacaaatcaaagaaactccccttcttttctttctataatatgtttttccttattgttaattcctgcatgtggtagcaggagtttagggactgtgggcagcagaagaattagggcgagggcagtgggttgttctctgagtctgtggctaggttttcatgaataagacagtttttgttaaacagctctgccctctctgctttcgagggtctctgtggaggcttggttttatttatgtagttttaaagaagtaagtctttttcattgctgtttctgttcttcattcttccctagctttacttttgtactttgaaaatttcagctttataattttttattcttttaatgttttgccatggtgattttaatttctcatccctccgaaatgcagcttcattttatctttgatattcttaattccttagttctccttcatttgcctttaaagaaatctttatcactttcgattttctgtctatttcagcttttaatatatccttcatttattttgtctattcaaactttctgagcttttatcagattggttttattttgtattggtttattactttaacatgctacattctcatttttttctgtgaatttttccattttaaccatttgaatcttattttcaaccattcttaatttttactcattttatctgcttttgtattattctctcatttaatttcaagtattatttatgttagcaatgtcttaaacatttattttggaataaaatgtaattttttttcctcccctcccccccatacctctatttcttaaactggtgatttctgttcttaacacatctcattgagttgctctattaataattttgtactttattgttttaattttttttttgaaattttatttttctcttctgggttttgcttttataataaggggcaagaagtgcagctacagggaaggctcacaaggccactagctccttttcttatagaaagagctcttttttctttagggtacccttatgactctcctggaaagattttccattccctttagtgttggtcctcaaaataaataaataaaccaaaatcaaccaaaccaaaaaacaaaacaaaacaacaacaaaaaaamcccgaaaaaacccagagaacagacaaatgagcaaaagcctgtatttcgaattactttggagataaatagtattctatgccccaaattatttctcaacactgtctgtgtattggagtctctgtaatgttgccttttcttatttaaatttttttttcgtggtatctatacagcaacccttgtatcaggagctgtatttctaaatagtatggcttcttatacaaccaatagatatctggaatgtcatgcaatgtggcaggatcacttatgaaacatatgtctagatagaagattatgtgacccctctttctaactgcccctctctctcccactttttataccactgcttcccactcccattttgattgggaatcttcctgtaacctcactaagaataaaaacagatctgtttggacatgagcttttcaacgggaatgcatctgccattaggatgcctgataccaagccaagcactctccggggctcccgcrcctggggttagttacatcaagggacttagacaacctggctctttgctaagacctatttggagctttgaatggaaggcgggtccttcctataaactcctgcctattttccatcctatttttgtttgtttgtttgtttattctgcctgggatagttaagtctccatttgttccaagaaacagaggtgagcaggaactgatttaaagttactagagtgcttcacaggaccatgggtaggactgtagtgaccccaggaggatcagaacaggacactggggagcttggagggctcagaccctgtgttttctccatgtgcatctcagtcacactctctactgcattcattacagaatatggtgagtcctacagaatatgaccactctcagaccccaagcatgtgcagcacgcatcctaacacctgaagactcactatagcttccttgctccctctcaattctatttccaacttccagttgagtttgggagctcattcccttaacacataaactccttagctcctttctcattttacaaaagaaacagagagagtaaatagaattgaggttatctccaccatataaaacataaagtctattgtgcatttgcaggatagagatatttaatatacacacttaggtaaaagccctttgagcagccatttaaaaggcatccaacttcactgcttgattttgggtttttatttccactggtaagttagagaagctgatgccagacacttgcttcctgggctctggcttgtgaggacctattctcccgattcctatagaagttccagttgtatacacaacaacaacaatttcttcctttgcctcttatctggatgaaagccacagtgacattatcaaccaggctcagaactaatgctaccaccgcagtctcagaatcactgaggagccttttagaaacacacatcctcagactctaacccagacccacttaatgagaatctctggggagtcaaccctaggactctgtccttaataagctgtccaggcaatttttatgcatgctcaattttgagaaccactgtcttagggcacaagggcaatgcccagtgaaagtcacaatagataaagaattaaggaaagaaaggacagatgggtctgtattgtaatgggaaaaattctaagataagaccatgctaaaattctaagaaataagaaaagggttctatagattctgggtgactacaaaaaaaagaaatctgtaaatatctcaaatcttttttttttttttttgaaatcaggcagaacatttagactagcaggaaataatatcgtttcaagaagagaaatcaggaacctcacagacagarggcaaggtgtctcataggaagtaagcacaggggttggtaacacgggattccagagctcccaggatgagggttaggcaaccaggtccggccaccccaccttcaaactggagaaaatatttcccttcctattcaatgagctaacacttcctctccagggcagtctcatgttttggggatagaagggaatgttagaggtgagaacagaactattttctccaagcactccatctctaattcatactcaggaggcattttggggtgaaaatatttaagtttaccagcccttgtgcaaatctgagatgaagaactacattaaaagtaaaattcacctttgcaggaagtggggtttgctattctgtgtatatctttaacagtatctgctgaaaagaacccttttgttaaataattgtattacaagtccccaacttaatcctttcaaatatgaaataagacagggtcagtgcacaagagcaatgcccccagacccatctttaagtgaagcaccaggccgatgaaacatcatccctctctgctgccttctttctctgattgcaactcaactccccaggcgtgcagttctggagatgaatttaggaagcttgccagtgtgaagcagaaaattgttcaggagggaacaaaccaccattggtaagacagatttacaaccaacagaggtagaggcatagtaaggctataaacaaacactaaaatggagctggccctctttgggaacatagcttctcaggatttgcattggacaagatgactcaacagcactaccgaatacgaagggaaaatatttacctcatggttgcagtgcaattctcagctgttcggcagggctcggttcaggcagctgcactcttcagaaatcttcctcttctgccaccaataaatgctgaagagacctatatatacaagtggcctctggttcctttttgtttgtttcccttcagctgacgttayaaaagggaaagtgaaactagaaagtgaaattggcaggactctttttctttttttctttttattatactttagaggactctttttcctccggagctgagttgtgatcagagaaagaaggcagcagagagggatgtttcatcggcctggtgcttcacttaaagatgggtctggggacattgctcttgtgcactgtccctctcttatttcatattcgaaaagattaagttggggacttgtaatacaattatttaacaaaagggttcttttcagcagatactgttaaagatatacacagaatagcaaaccccacttcctgctaaggtgaattttacttttaatgtagtccttcatctcagatttgcacaagggctggtaaacttagatattttcaccccaaaatgctcttgagtaagagccaagcccagctgcgtagtgagttagaagaacttcctctttgtggaatgtactgatggcatcaagggagcacaactcctaggaggacacatttacaaagctccctgccttgtgattaccatattaacccatctttgctctgccttataccaatatgatccacaggccactgtaaggagcagttatttagcctcgacagggcaggggattttagtctgaatcattgctgaatctccagtccctgcaaaacaacctgcacattgcatggtatggcaagcattccaaaagtagttgttgactaaatgaatacatgattagaagcatgggcagtgatgtctgtctatctggatttgaaatcagcttccacctttatgctatgaaactctggggaaaattattgaatgtctctgcttcggttttgtaaattgggaataatacaactactggtttattgtggtgttgggaggatgaaatgagagaatacgtgaaatgtccttagaataatgcctggcagtaataagtaaatgctagtttctattataattattaactaaaatcgttaaccaaagtgatcagaggggaaactctttttttcaggctggagtgcagtggaaagatcctggcttactgcaacctccacctccctggttcaagtgattcgcctcagcctctcgagtagctgggattacaggcacgcaccaccacgcctggctaatttttgtatttttagtagagatggggttccaccatgttggccaggctggtctcgaactcctgatctcaggtgatctgcccgccttggcctgccaaagttctgggattacaggcgtgagccaccacgcccggccaggggaaatttcaatgttggctttttccagaactttatctcctctgacattcaacaatccatcacaattactgacctaagccaaacaattcctaacatctccttatgttcttggcttccccaagccccacaatattttccccctttttattgatgtataataatttacatatttatgagttgcatgtgagtgtttgttacgtgcaaagaatgtttaatgatcaagtcagggtaattggggtatgtatcaccttcagtgtttatcatttttatgtgttggtatcatttaaagtcctctcttctagttactttaaaatatacataatattgttgctaagtatagtcaccctagtcggctatcaaacattagaacttattttttttatttaacggcatgtttgtacccataacctaactctcatcttcccaccaccccccttcccagtctctggtatctattattctattctcaatgtccatgagataaagttttttagctcccacatttcagtaagaacatgcagtatttgtcattctgtgcctggcttattgcatttaacataatggtctccagttccaactacattgctgcaaattacatgatttcattcctctttaatggctgaataatatcccattgtgtatatatacaatattttctttatccatttgttcactgatgagcacctatgttgatttcatatctttgctattatgaatagtggtgtgatgaacatgtgagtgcaggtatccttttgatttactgatttattttcctttggatagacatccagtagtgtgattgctgggtcttatgaaaattctatttttagttttttgagagctttccatactgttttccataatgactgtactaatttacattcctaccaacagtgtataagagttccctttcccctgcatccttgccagcatttgttatttttttttttaataatagccatactaactggggtkagatgatatctcattgtgatttttatttgcatttccttggggttgagtgatgttgagtattttttcatatgcctgttggtcacatataccagagctcctttataggtgatgagatgcttttcctttgctgtctttaaaattttctttttgtcactgactttagatagtttgactataatgygccatggagaagaacgtttttcactgtatctgattggggattgctgggcctcctgtatctggatgtctaaatctcttactagacttgggaagttctcatctattatttcattacataggttttcaaaccctttcagtttcccttygcctttggagatactgataattcatatatttkgtcaccttatggtgtcccatagatcgtgaagactttgttcatactttttaattctttttttttctttattttcgtcttattggattatttcaaaagacctgtcttcaagttctgatgttttctcttctgcttggtctagtctactgttgaagcttcttgtatattttgtatttcattcaaggaattcttcagttccagaatttcagtttggttatttttatgatacctatttctttggcaaatttctcattcatatcctgaattgtttctccgatttctgtgtattgtttgaattgtattggatttggaaatctcttgtatcttgctgagcttctttagtattttttatatatacatatatattatttttttattttttatttttttgagatggagtctcactctgttgcctaggctggagtgcagtggtgcgatctctgctcactgcaacctctgcctccctggttcaagtgattctccttcctcagcctctcgagctgggattacaggcatgtaccaccatgcctggctaatttttgtatttttagtagagatgggttttcactatgttggccaggctggtctggaactcctgacctcaggtgatccaccctccttgtcctccctaagtgctgggattacaggtgtgaggcactgtgcttagtataattttgaatagtttttcctggatttctttttgattgggatctgttgctggggaattgtattcctttgaaggtatcatatttccttgcttttacatgcttcctgtgtcctttcactgatatctgagcatctaatataatagtcacttctttcaatttttgaatttgcttttgtaggggaggactttttcctgaagatatatcaacaatattggttgagtaaggcacttcaactttgattctgagtgtgcatggtagtgtagcctctgtacaatttatttggctgtgatcagtgatatatatgatttccttgatggtttagggtggggtttattcttggaggctatcgtgacattttactgggaacagggttgccatgtgggccagtcttcaggccccagtggtggcagcagtgggttgaggatgtctgatcttcggccccagaacaacatacactggcactggtgttagtgggaccaggtaggctaattcctgggcccccagatagcttgctcagatgctgatagtggcagcagtgggccaggtgggtgagtgggttctcaagtccctgggcagctgatgtgatctgggcaatggcagtagccaacggtgggacaaacccttgggttctgataagtgtacactgatgttggcagtggctgtggtgcagggttgccacctataccacagacacacagctctcaggctctttcattctctgtaatagcaaccccgcagcactgtgcagagagaggagagacgctgttctttaggtgtgagcctaggcacagaggccatgcgtccagtgggggtgcagtcaccactcacagcaccagacaggcggccatctggcttccctgccccagcctctggtagtagcatcagtggctgtgcctgcagcagtgtgtagaggacaagaaggggctctgctctctacatgtaagcccaagcacacagcctgcttcactagtgggagagtatctcactatccacttgtgaggccgagtacagagtttgtggtgctgctaagggtagggtcacttctcacagccccaaacaggaggctctggaaaggacatgttttagtttcctttgtatcaggggctgtctttttggcacattgcaccattctttccctggggagtagtactccctgtgggctggggtgctgcggacactgtattacctttgggtctagccagtgctgtgtcactgtagcccactgggtggatactgggaaatatcactgggggctcctgggatatggagatatgggagctgcggttcccaggataggatgtaattccatgactatagtctcacaatggtgccgcttaggtcttgggggagctgagagacccagcgtgagttccctgtctcatgaaatacccttgtggggtctccaaatcaccacccatactggtgtcagagtttgtatgggtagagaaactctctcatgtttcagattgcagcagtttgcaggagggatgtggactgctgaagttctctcatttgacctttccctgaaatgccaaggccctctgttatcctggccaatctcagccaagctggccacttgataccttcttcttctgcgccttgggtgtttcccatgacttctctgttgaattctagtgttgtctcctagatgttctattcgaggtataattatctattcataattttggttcttctttctagagagggtgggtgtctgatgtctctagtcagccatcctgaaccagaatccccaccatattttaaatccctgcttgttgccctggtatttgacatccccaaatcacaatgtacagccatagtgttttgtaatgatagaagaaatgtattttccttattcatacccttagtcacaaagggggtaatcatgtatataggcccaaaagaaaataatagtacctcaaagattgaggtcagaaaattacacaaagcacagatagaacacattctccagcaaaactgaggttgttaaggtaggttattcagtcttgggaaaagttatttaccataattttttttctgcctagggcagggaggaaaaagaaactatccttcctaaaaagtctccaccctttgattaggatgcacagctaagcctgtcccagttggaaacccttacttttgtgtcttacgcaagagtttcaagttccttttctgtttacaagttcttcttcttcttttttttttttttttttttgagacagtctcgctctgttgccaaagctagactacagtggtgagatcttggctctctgcaacctctgcctaccgggttcaagcagttctcgtgcctcaccctcccaagtagctggctacttggcccagctaccaggcccagmtgatttttgtatttttagtagagatggggtattgccatgttggccagtctggtcatgaacttctggccttaagggatctgcccgccttgggaagcactcccaaagtgctaggattacaggcatgagccacagtgcctggcttctatttacaagttctattaggtacttacagaaatgtatgttaggtttttaagaaatgctgaaataggaaagtggaaatgctgtgggtttggtttgatttattttttgaactcagtattcaagaaaactattggataggaattttaaaatcttgtgaataaaggtactggttggggagaagcatagagaaaggttttgccatggtcactgtgctttgaaatggttgagatactgatttacacttcagaaatttgtatggctagtgcctgtatataatgttaccacagcaggtatgcatcagctgatttagtagctgggttagtgtgagactatgcatgcaatgtgattgcaaaatagcaactgaaaaggaaaaccaactttctcctggtgttatttctattttgagaaaatgaaacttattagaaagagttctgcctaacctcgttgctacaaatatatatgtgtctttttcctggaatataggccctgttcatatttcctagaacaatagatttcatttatatagaatatagatttgcttcctgttcctggaatgggttacatcaactacagatggtataatgcaataattctcatattgctacttgccaccagcaatatcagcatcacctggaagtgcaaattcttaggccccattctagactgatagaatcagaaattccagtgtgggacccagaaatctaggtgttgataagccttccagataattataatggatgctaaagtctgagaaccaaataatatattgaatgtaagcaaaaatacttttacttctataaaatgaaactctatgctttttccttgagattttttaaaaaatttgaccctcttttttgttttgagtctatttttaactgaagttttgtccacctagaagagctggtgactgttcaatagtattcgcacttgttagaggaatacttaggtagcccagtgggttctcttgatccccacaatgggctgtaatttgaaaacaatgtgttcccacctatatgacattcccttctgtactcattcacaaatacacgtttaaaatggtcttccacatgaacttcaaaaatattgatatagttaataaaatagctccccattcttttttcctttccattcctttcctttcctttcctttcctttcctttcctttcctttcctttcctttcctttcctttcctttcatttcatttcctttcctttcttcctttttttcttttttcttttcagacagagtcttgctctgtcacccaggctggagtgcagtggcgcaatcagagctcactgtcgccttgacctccctcccaggctcaagtgatcttcccacctcagtctcctgagtagctgggatcacagatgagtgccactacacccagctaattttttatttcttgtagagatagggtctcactatgtttcccaggctgctctcaaactcctgggatcaactgatcttcctgcttcagcatcccaaagtgctgggattacaggcataagccacagcacttggccagctccccattcttattcttttttcaaaaattaattaaacaccatttcttcttgctgtggtttgaatatgtcctccaaagttcatgtgttggaaacttgatccccaatgtggcagtgttgggaggtgggacctaatgggaggtatttgggttatgggggcattgtcctcttgaatagattaatgccattattgagggacggagttccatataaaaggatgacttcaaccttctcttgctcaccctcaccccctatttacccttccatcatgggatgacccagtaagagggccctggccagatgtggccccttgatcttggactttccagcctccagaaccatgtgtccataaatgtctgttcattataaattacccaatctcccaatctgcccatctgtggtattctgttatagcagaaaaaaatggactaagacatttttcagcattaattttttagactgcagttgggcagtctttgagtggaaacttgatgcgggtaaatgactttatctttccatagtcctattcagaaataagaccatgctaaataaacttctgctgggacaatttgtacacttatccctgttagaacactaggagtatttgtttcattcattcattcaccattcgttcatcaaatcaatacttactgagaatctactatgtgccaggcaccattctaggctcttaagatacatcagtacacaaagatctctgtcttcatggagcttatattctatcaggaagagatggcaataaacaactgctttggactgaattgagttcccaactcctttcccaaaattcatcattgaagccctaaccctcaacgtaactttgtttggagatagggcctgtgaggaggtatttaaggttaaatgaggtcttaagggtggggcccctaatctggtaacccctaatctggtaacactgacgtcttcatacaaacaagaagaaaaagaagagacctcagatayctctctctctctctctctctctctctctctctctctctctctctcgtctcacacagaggaaaggccatgtgaagataaagaaaaggctgccatctccaggtcaggaagagaggtctcaccagaaaccaacttggacttctagcatctagaactgtgagaaaatagatttctgttgcttaagccacctagtctgtgatttttcattatggcagccaatgtagactaatacaataataaataaattagacaatatgggacaagtccatggggaaaaaaaagagtaagtggagaccgtaagaggaattacatatgggtggagaaaagggggccgggatctgactgctgctgttaagtaatagagatggaaactgtgttagtctgttctcatactctagaaagatactacctgagactgggaaagaggtttaactgaatcacagttccatggggagggctcaggaaacttgcaatcatggcagaaggcaaaggggaagcaaggcaccttcttcacaaggcagcaggagggagtgaatgtaagcagaggaaatgtcagatgcttataaaaccatcagctctcatgaaaactcactcattatcatgagaataatatgggggaaaccacccctatgatccaatcctcccatcaggtcctgcccttgacacatgaggattatggggattataatttgagatgagatttgggtggggacacaaagccaaaccatattagaaacctttctgtgcctcaatttcttcatttttaaaatgagaattgtgcccaggtacagtggctcatgtctgtaatctcagcactttgaggggcagaggcaggagaattgcttgaggccaggagtttgaaacaagtctgggcaacatagcaagaccctatctctacaattaaaaaaaaaaaaagtagccaggcatggtggcatgagcctgtcctcctagctacccaggaggattgctttagcccaggagtttgaggctgcagtgaaccaagattgcaccattgtactccagcctgtgtgacagaacgtgactaggtctctaaaaaagaaaaaggaattatgttagtatttaccacatagggttttgtggagattgagtggactactatgtataaagctctgagaacagtgcttggcacatggtaaatgcccaataagggttagttattactaccttctactgccacccataccatttaccatctttgaataccacttacttctagggccaggggccactcacctgaaagtggtctgttctctaatgtggagctttgactatagtattatcaggtattggtggctgccgctggattgctatttcagatcctttttttctttttattcgctttgttggccacagtgagaaactgggatgctactccagaagaagacaaatcagtgcctctgtacaaagggatctttgtgctgccaaaagagtagaaaagtttatcccagaaccaaaatatttcagaattgtggaaaatcaagttttggaaacctactcaaaagaagaagaaatattgctatcacagaatccctgaattagtatacacctagccgctgtaacaaagatgctcaaaaacataaatgacactgtaaaagaagtttatttcttgttcacataactgtccaaggctggtgttcctgggcaacttccagttctcttccatgcaatgattcaaggacacagagttcttccatcctgtgactctaccatcccctagagcctggaaattgagagtaaagagggtacacctgattcttaaccatctttacttggaaatgacatacatcacattcactcacattctattaggaagcactagttcatggcccacctggggagaagtgaaggttagttcatgtagctgcagagtaggaagcccccttcctggtgacgacttcatattatgaaggggaaacactaatttggaaggatcatgagttgtttccacaacagtatcctgctctggccctaaataaccatgtatacacttcttcccaaacatagaacataatgggacctttcccaggggagccaacccacagtcaaggaatcattgcactcagctcatggtcagggatttctgagtaaagcactgtcctgcctaaaggtcagtatgtgactccttgtggtctcatgcttaaaagaaaaaaaaaatcaaaaggctagttaagactatataactcatgtgtatcatggtatcatgtattgtggtaggttaactataataaatactttaaactgaaaaaagacagcatggaagaatctcagggtgtggcaacaaatcacaaaataggcaccaaaagagttatatgtggttacctctggagactgggaaatagggtggaatggggaagggggttgctatgtctcctaccttgtagatcacgttgactatttaaatgatgtgaatgtatacatttaattaagctaaaaaggaaggaatctggaaggcagggaggaaggggaaaaaatgaggaagaagagaatggagggaaggaacaaaggaaggaagtaagaggaaggattggagagaaggaaggaaaaaaggaatgaaggaggaaaggaaggaaggatggaagaaaggaaatgaaaaaaagaacaaagaaaggagaccgagaagtcatcctacatcctacatccatattttgcaatattattatgaagctctcaatacccatgtcattgaaaaattgtaataatatcagaaaacactcacaatataatgttaagtgaaaggataagatgaaaccaactgtaacatacacccttaactttgaaatattttccaaagaaatctattttatatagtttcactcttttccacgtgaagagaccaccaaacaggctttgtgtgagcaataaagctttttaatcacctgggtgcaggcaggctgagtctgaaaagagagtcagtgaagggagatagggccggggccgttttataagatttgggtagatagtggaaaattacatcaaagggggttgttctctggctggcagaggtgggggtcaccaggtgctcagtgcgggagcttttgagctaggatgagccaggaaaaggaatttcacaaggtaatgtcatcagttaaggcagggacaggacgttttcactttttttgtgattcttcagttacttcaggccatctggatttatacgtgcaggtcacaggggatatgttggcttagcttgggctcagaggcctgacattcctgtcttcttatattaataagaaaaatagcataaaatagtattgaagygttggcagcaaaaattttgggggtggcatggagagataatgggcgatgtttctcagggctgcttctagagtgggagagattaagctgaagaaagattttgtggtaaggggtgatactgtggggttgttagaaggagcatttgttgtataggatgattggtgatggcctggatacggttttggatgaattgagaaactaaatggaagacataaggtccaaataagaggaggagaaaaacagataataaaggactaagaattgggaggacccaggacatctaattagagagtgtccaagggggtccaagagggtttagtgtaattacttgcttggttggcaagtttttaggctctatctttgagttttttttattgttgtcatataccaggccagattgatttaggtaaaaacagcactcttcatgtgaaaatatacagagtccccccccccctttttttttagcagtgagtaagtcaaggcctcagcgattttgtaggaaagagaaatgcaaagccagcaattgtttgttaaagaaggattagaaatggctaggagagagtgactgagattgatagtgtggtggagatagctggggagaggtagagggtggcctaagaatgggaacgagaataagagtaagtgtaaaagtaaagaataggacttcatcggggtgaaagtattagagtatactttgtcaccaaagatcttctatccgttcaaacagagacttaagggtggcagtttgaggtaaaaccaggcgccactgaataccaagagcctgagaaactgcttgggtgatttgactaataaaggccggttcgttattagactgtatagaggtggaaaggccaaacagaggaattttgtctcacagaagggaagaaatgaccatggtggccttttcagaccctgtgggaaaggcctctacccatccagtgaaagtgtctacccagaccaaaagggattttagtttcctgacttgaagcatgtgagtaaagtcaatttgccagtcctgggaagaggcaaatccccgagcttagtgtgtaaggaagggagggggcctgaacattccctgaggagcagtagaatagcagatggaacactgagaagtgatttccttaaggatagatttccatgatggaaaggaaatgagaggttctaagaggtgggctagtggcttgtaacctacatggaagaggttatgaaatgacgatagaatagaatgggcccgtgaggctggaaggagatattttccttggtccaagaaccatttgccttgtgtgggaagagattgataggtggaagtttcagtgggagagtaggtgggagtgaccattgagaaggagaaaaactggccgtgaaggacagaagttggaatgctagctgcttctttagctaccttatcagcataagcattgccctgagcaatgggatctgatgccttttgatggcccttgcagtgaatgactccagcttcctttggaagtaaagcagccttgagaagagtttttattaaagaggaattaatgatggaggacccttgcgtagtgaggaaacctctttttgcccatgtaacagcatggtggtgcaggatatggaaggcatatttagagtcagtataaatattgatgtgtggtacttttgcaagagtgagggcccgagttaaggcaatgagtttggcttgctgagagataatggagggggcagagtggtagcctcaatgataggtgtggaagatactatagtatagcctgcctttgctggtgagtggagattaggcctggtggaactgccatcaataaaccaagtgtgatcaggatgaggaacaggaaagaaggaaatatggggaaatggagtgaatgtcaggtagatcagagagatacagtcatgggggtgggggccagcctaaaacaataaggtcaggttgtttggacagaaaggctacaggatgcagtcctggctcttgtgtaagaattttgactgcacagccctgtactttcgctgtgtgtaatgaaaagggttgggatgagttagggagagctagcatgggggcagcttctagggctgtttttaaggaatggaaagaggagtggcaaaaggatttaggatctatggggtcagctaggtttgcttttgtcagtttacataatggtttagtcaggatggtaaaactaggtatccaaaggtggaaatacctaaccatgcctaggaaggaaagcagttgttttgtagaaggagttggggtttgggagattagtcagacatgatcagcagggagagcacatgtgttttcatggagaattatgccaagataggtaacagatgaagaagaaatttggacttgactgaagtaatgggggctgtccgcaaagccttgcagcagtacagcccaggtaatttgctgagcctgatgggtgtcggggtcagtccaagtgaaagtgaaaagaggctgggatgaagggtgcaaaggaatagtaaagaaagcatgtttgagatccagaacagaatactgggttgtggagaggttgtggagggaggtattgaggacaaaagagtgtacgagttgggcactacagggtggataggcaaaacaatttggttgataaggtgcggatcctgaactaacctgtaagacctgtctggtttttggagaggtaaaatgggggaattgtaaggagagtttataggctttaaaaggccatgctgtaacaggcaagtgataacatgctttaatcctttttaaagcgtgctgtgggatgggatattggcattgagtggtgtaagggtgattaggttttaatgggatggtaaggggtgcatgatcrgtcaccaaggagggagtagaggtatcttatacttgtgggttaaggtggggggatatgaaaggaagacatgaaggaggctttgggttgggaagaagggtggcaatgagatgtggctgtagtttaggaatagtcagggaagcagataatttggttaaaatgtctcagcctaataagggaactgggcaggtggggataattaaaaaagggtgcataaaagaatgttgtccaagttggcatcagagttggggagttttaagaggtttagaagcctggccgtcaatacccacaacagttatggaggcaagggaaacaggaccttgaaaagaaggtaatgcagagtgggtagcctctgtattgattaagaagggaatggacttaccctctactgtaagagttacctaaagcatctgtgatggtccaggaggcttctcaggtgatcgggcagtgtcagtcttcagccactaagcccagaagatctkggaagaagtcaatcagagagccttgggccagagttccaggggctctgggagtggctgccaggtgagctggacagtctgattttcagtggggtcccacacagatgggacacagcttaggaggaatcccgggctgtgggcattccttggcccagtggccagatttctggcacttgaagcaagatcctgatggagaaggtcctctaggaatgcttgactgctgcggcttaggcattttgaagttcttgtgtgctggagatgtggctggggtttctctcacagtggaggcaaggaattgcaactcagaaatacattgttacttggctgactctactctattattgtacaccttgaaggcaaggttaattaaatcctattgtggggtttgagggccggaatttaatttttggagttttatttaatgttgggagcagattgggtaataaaacgtatattgagaataagacggccttttgacctttcagggtctagggctgtaaagcatctcagggttgatgccaaacaagccatgaactgggctgggtttttatatttgatgaaaaagagcctaaacgctaactgatttgggagaggttggataaagaaaaaggagcattaaccttgactatgcctttagctccagccacctttttaagaggaaattgctgggcaggtccgggagggctagtcgcagaacgaaactggaagctggactgggtgtgaggaggggaggtgatagaaggattatagggtgggggagcggaggctaagggagaattggaactggctcggcctggctaggagcagcctggggaggaggggagaggtcakatgggtccgtagaaaaggaagattggaaagacttagtgacacttggggttggaactgaggggacaggcaggagggaaagaaggaagatttgggatgagttgcattgggaacagagattagggagggacgagggaccgatgtgtaaaagaatgcctggacgtcaggcacctcagaccatttgcccatttttcgacaaaaattatctaggtgttgtaggatggagaaatcaaaagtgccattttatggctctttggaaccactgtcgagtttgtattggggttaagtggcattgcagaagaaaataaggcatttgggttttaagtcgggtgtgagttgaagaggttttaagttcttgagaacacaggctaagggagaagaaggaggaatggagggtggaagtttgcctatagtgaaggaggcaagtccagagaaaagagagggtagagacacagagagaaggggtggggggttcttgcaccccaggaacatggggaaggggtggggtgtttgtcccccagggaagtggagagaaaagagagggtagagacacagagagaaggagtggggggtgcttgccccccaggaaagtggagaaggggtagggggtccttgccccccaggaaagtggagagaaaagagagggtagagacatggagagaaggggttgggtgagcagccctgggctgcaaatgtgggtgagcagccaaagcaggtgtccccacaattgccttgccactaagggaatgtgggtgaatgaccaaggcaggcatccccacggtgatcagacaccaatgaaatgtgggtgaataatcaggcaggcatctctgcagtgattaaacaccaagggaagactgtcttcccgaatctgtgaccagcactggagttttgagtccacagataaaacacatctcccgtatctctaccaaaaaaggaaaggaattgaaattaagagaagggaaagattgaagtgtggtgccgagattgaaaggagaaagaggttgagggatagtgagagagattggagaagagagtaaagacaggccacttacccgatttaaaattggtgagatgttccttgggctggttggtctgaggagcagaggtcgtaggtggatctttctcttggaacaaagagcaggaggacaggggattgatctcccaagggaggttccccgatccgagtcacggcaccaaatgtcactcgcgtccatgtgaagagaccaccaaacaggctttgtgtgagcaataaagctttttaatcacctgggtgcaggcgagctgagtccaaaaagagagtcagtgaagggagatgggatgggctgtttttataagatttgggtagatagtggaaaattacagtcaaaggcggatgttctctggctggcaggggtggggggcacaaggtgctcagtgggggagcttttgagccaggaagagctgggagaaggaatttcacaaggtaatgtcatcagttaaggcagggacaggccattttcacttcttttgtgattcttcagttacttcaggtcatccggatttatacgtgcaggtcacagggtatatgatggcttagcttgggctcagaggcctgacatatagcgtatacaggtgtacacagaagcataatgtttaaatattttaatttcagtgggtgatataaggggcagtatgattttttttcgcttatacttgctggcatttttccaaagtttctttagtgtgcctatagtattcatatcctgagaaaaatctttcatgattctaatctttttattattattattttttaaagatcactgagaactaagagcaaaatgcaaagggagatctttttgaggtctgatcaagcccagcttcactggaggcttttaggggcctcagaggtgtagatgctggtttagtgcctgactgtggctccttagaaaagaaccagctaaatgcagcctgtcctttgctagagctgccaatgctgagctctgacacagagaaaccctgcctctatgatgaatatagcctcatgctcctgactttcaaatgaaaaacagaaacacacatgcttgttaagaacgtttcagcctggtttgcatcattaactgatgaaaatgtgcctgcaaggacagaatgaaatagatttgcccctcctcctccagcaacccctcctatgagggacgttcgtctctggctccaggctctggccacttcctggttaggattgctaaaggcttccatcagggaatgttgatatgagtctggaagcgccacagattttaaaatgcctgaattaacaagaaacaagtattctctaagatatgttaaatatttaagcagatgcccaaatccagcacctaagaaaatctaccttgaggttttcaaaggcacasaacataatttcaagggataaatgcaagaaaaaatcctttacctcatggtcgcaggctgggcgctgcactggtgtcctgcagtgttctggcaaaggctgatttgctgcttagaaatctgcctgagctgatggcagattcagaggaaaggaagcactgtgctgctgatgaaggatacctttatgtgtacttgcaaatatgaaatggaagtgtatcctggcaagtacaaacaacataactacactggtttcctgctggagggaaaggagatttcagcagggagagctttaatctttctggctgggcactcaactggaacaacgtttagggggaatagtgtgtaaggaagttcaaggtagatgaaaatttactagaaggaggattagcaatgtagtggtcagagaaccagaaatctaaaaatgaccacaggactagggtggattccggagaactgttgtcatcactmgctaatattaatagtgacatcagtagctaatgttaaaagaaaaaccttagacaaattaaatttagtagagtttaattgagcaaagaattattcaccaatcaggcagacttccgagccagagtggcctcagagagactccggtgcagctgcctggtagaagatttatggacagaaaaaggaaaatgacctataaaaaacagaagtgaggtacagaaatggaagtgttggttacagcccagcatttgccttattttaacatggtttgaatggttggccacctttgattggccaaaactgtgagtggcacaggagtaggttacagtctgtttacacatccagttaggttatagtttactatgtacagaaaaactgtcagggtgaacttaaaatatgcaaggaggcagctttaagtgaaacttaattcaacactaatattgattgagaatttttgctcakggctttataggacttacctaatttactccattttacactcatgtgaaatatggccatttaacagatgagtaagagaagattcagagaacttaagtgatatgcccaaggacagaagtccaggtctgcccaattctagaacttcccttgttcagtgtgttccttaagtgcagcaagtctctggatctaaactatatagtttctgatttcaactctgaaatgcactgcttgtgtgaacttgcatccgttcttcatctgtaaagagtggtagcacctatttcataggcttgttgtgaagctcttagaatagtgcctggcacataatggattcgatgaaagtatctgttttctttctttcttttttttttatttttttgagacggagtttcgctcttgttacccaggctggagtgcaatggcacgatctcggctcaccgcaacctctgcctcctgggttcaagcgattctcctgcctcrgcctcctgagtagctgggattataggcatgcaccaccatgcccggctaatttttttgtatttttagcagagacggggtttctccatgttggtcaggctggtctcaaactcccaatctcaggtaatctgcctgcctcagcctcccaaagtgctgagattacacgcatgagccaccatgcccggccaaaagtatctgttttcatttgctgttcagaatgagttttggcctcagctgtatttcctacttctgtcaccaactgtttgtgatattagataaatcataaaacaggtctcagttttatgctcagagaaataaaaatcgttggtctggatgatccttccaggacctttctcagtatgaaatatgatgactaacatttcatgaatccatatcctggaatcaagttcaaggtgcaaaccagtctaggtctgaggttctgggaaagtcacagtagttctgtgccttggtttccatctctgtggaatgagaagagtaaagttgattaactcttgcctcatcaacagcaacagtgtagaccctgcatgtgaatgcacatggaacactaaagggaaaactctaatagtaccataactgtttattctgatggagaaccaagagccagggttgaatatctcagccaggaacactaagtagggatagtatgtatagttctcagtagctggccctatgatgttcatgccagaggactggatttcataccccaatagtgtggcttattgccaaataccatcatcatacatcctgcctaatactttccctaaaactggcatttatgacctaaactggttccaaactgagatgttttcacaaactattgagctgagaaagtcagacaaaaagtgcagtagcgaagtgtttgtttggtttctggaatatcagtgcttgagttcacatctgttcctaccacttaccagtggtttgaccttggataattacttgatctattggagccttagtttccacatctgtaaagtgttgagtattgatagcaaccttgtggagttaaagataaattttgcagtgggcacctgttaaaatgtcaagagagacttttattttttttcaagactattacaatgagagagacagactattgcaatatgggagaaagactaaactcaacactgaatacaacaagtgtggatttgtagtcaacaggcyggatgaaggagtggatrgaaaattactaaaaagaacttgcttagatatcaaggcctgggaaagaagtacttaattgtatatcagggtgggggggcattcttgataaagtggctcagcaggattctttgctaaaactggtctctgaaggagaaggatgagagccatgttgaggcctagtcaagaagagggctctgactaaaaaggaacctgcctaaagtttggtcaaggagggaatccttctcaagagttgcaaatacttaacagacaaatatttgccttctttttaaaatcataaatagccactgtttttaaaaccaaagttatttattatttcctctgtggcatgaccatagttggaaatatattaacgtgctttttcttcttgtacttctttgtttaagacttttcacctataatatctgaggcaagagtttctttagggtaaattgggattataatagctggaatgcaaagaggtaaacagaattaatattcagccatgaattccaaaattggccattgaaaccaacttcagaaatgataccattaaaaaacactggagcagcttagtcagaaatttctactttggartaataacgaggaagaaggcatcagataaaacatcctcacacattctatctttagtgaaaccagatggtgaagaaaacttcagacttccaaccgacacataaatatgggctacggtcaaaagtagcagaaatcagcagaaccaacatgagaaactctgactggagatgaatgggtgaagctgggaccaacttaaaatggggacagtgtttggagatggcagatcacaaaattagaattgagggtcccctcctaggagagaccgtcactctgagtgcaaacttctgaaagcagaaatgtaatccagctgtgtttaacgccaggcgaggcagtgggaggcgaagggagaatgtacccaggagacccctcccctgccttctagtgtctcaaggaacctttcctgtttgcctgagagcacgttcactttttacctgactatggagggagattcttccttttgtttttttctttgctacacattgatacccttaaattttttgcatatgttttctaattataaaaataaaaatctatatattataaattcatcagtataaacaaaataaaagtctgaagttaaacttggatcataatgtgctttaatcactccccatccatgttgttttgtagctgtggttttcaattcaatgataaatcttgggtatctctccatgtcagtacttataatcttgctattttttttcaaggacaacatttaataggcatattttaatgtttaattaatgtatttttgctggacatttaagtcattttcagattatcactattacaaacaatgttgaagtgaatatcactgtatgtccgtctttgtacaattgtgtgggtttttcaatacgatgcattccggaaattagaatttccaggtcaaagaaattgaccagatgcttcacaccatgtcttaaatcctggccccattttttgtccaaaatggtgttgagttgctatttaattcacacttggctaccatttcccacttccttacttaagtacagtgtgtataggccaggtttaggctggaaaatccctccttccactgtcaattctgttacccctctgggagcatgggaaggtcactttttgtttgtgggtttatattttcctattactttctcaggaaatgaatgaatttttctatcaattgttctctatcatcccttgtggtttggctcgaagccctggtctccaatcaagggtcatgacaggaacttggctcctgccaatacatttagaaatctggaatccttccataaatgcaaaccccttacactcccatctttccctatattctgccacctggtagaaagcaaatccctgaatgcttctccaaaactctcttccaaccctaggaccaccaaaggcctccctcacactcttcatttatctgctaattcattctctctctccttttctagaaaatagtcctctttggcttaactggttggaaattacactctcagtaagctaagagggaaggaataagaggatataccatactatgggcagggagggtggtgaaaggccagggttcatttcagctttaaagcactggagctccaaatggacacaaatcatcacatagaaactcatgatcagtgcactttagaatgcttctcatctccctttgggggttattctatttctattaatgtagtcaagaatggtggctatttttctgggccagattattttggtactaactggtctttcacagaagccattttctcaagtatgttctacattagctacaagcaattgttggtaaaaacctgttaccattctgtatgtttccattatatatatgtctctgtgtgtgtgtgcatatgaaagaagactatatattatttttatcaaaatatatttagaccatgtacattcttttaattatactatatataaaagtaattttatattacatattttaaaatataaacatatgtaaataatattactataacacatatgtaagtaatatatattttgtgttcttccataattactttttttaacctagactgaagattttacatttttcacaattcaattatattttatgagacttcttacttttccaaagcataaagaactatttggagcctgtctttgtaattttatatttttggttaatattccaaactaagataacattgccaggtcttccaggtctgaagcaaaatagagcagcattttagttgtgtggccctggggaacttgcttaacctctctttccctctgcttcctatcacagatgtttattgtaaggattaaatcagctaaaccaagaaaagcctcagggatggtgcctggcaaactgcacgctgttaatacatgttagtggacccttctccacaccttcctgctacactaaagcagagagaattacctcctgaatcatgtttgcagaacttctgggcacagtgactcaactcccagctattcttgtcatggattttttctcttggagccaatccagccatggagatcactggtcttgtgacttattttttctctttcagtatgaaatcattagaactgagaaaatgaaaacattcctgttattacttcctgagagaaagaaacttagtaacatgctttggtaggaattgttcttctttttcctgctgtgtccctcttgctggtcccaccagggctcttggtcctgagcctgatttacaccaggagcataatctgatcaaaaagagggaaactaaagaaaaaaggcaggattgtatgaggggttctcacaatggcagtacataatcccttatacctcgtattatgtagacccctgtgtttccaagttacctttgtaatttaggtaagtgagcacgaaacacttaaaaaaacacaaatgaaaacaagagaaaggaaagagtggggaggggtttgtttatttttgaaaacaacgacaacaacatagagtaaaagttaccaggtaagttcaaatatagtagtactttgttttcttggaagatgaatgaaagaagtcaccttactgcctccaatccagtcatatccctgaacccaatcatgaccagcagaggttgttctaaattgtttcctccaatatagagataattgccaataatttttcagtggttgttttctgtattctctgtattttttagggaagctgaactcagaaaacatactttgtccatctagccatccatttatctttatggatccatctttattcattcattaattcactcagtcaatatatattgaatttcaaccatgtgtcagacactgttccatgcctctaatgttctgcgtataatgcaagtaaaactaaagatagctaacatttattgatccctaccgatgtgccagtaaccctcttaggtgttttacttaaaatatgtgtttaacctctgaaacagctttatgatatatattgtgattatctgctttttaaatacgagaaagcagactcaaaaggattacataacttgtataagatcgcacacttgtaagtaaaaatgcagtaatgcagaaatgcagtaacgctatttcctctcgtattgcagccactccactcccagcgaaccttcctactgcatgcaggctttattcttccatcactttcctcctctgtttctaaatgacattttcacccccatttcctggatacttccttcttttaatacacagtaagtttatgtgactgggtttggcattcatctaataaaaacagccattaggtatatattcaataaacatttagtgaagccaactgatgagctctggggtgagtactagggattcagcagtgaatgagacggagggtcgagacagggctctgggggctaggctgccttcgttcgacctcagacctgccactcgctagctcctctagccattatttagtatttctgttgcagtttcctcatctatcaaatgggaataataatggtaattattaattaattgatattctaattttcaattaaaaatctaatggagttgtcaggattaaatgactttatacatgcaaaccacttagaataacactttgcagccactaaatattaaataactggcatatgttattattattagatggatcctaccctcaaatgccttacagtttsgtagacagaaaaataagtctcttccaacgatactgttaaactaatcagaaacttggttaaggtcatttgatcatctaaggctctacaacagtacagttttacagctcttattttaaaatgttcccctctaatccrtaaagatatctcaagatagggcaatgccattacttggtgtattatagttaaccaatactgtatgtggaacataatgtggtgtgatacttttgaatttgtgtctatctgctgttaaagagcctggctgctaattgagtttctggaaaaagttgagaaatgtcttagctcaggctggtataacaaaataacagaggctgtaactacaatcacacttgcaagtagaagatctttgcttcaaacctagcagtctggctctagaaatcaggacttggatgagggtgaagtgagtgagggcctagggcataaaatttaaggagatacttactctgcaggtagttcaagtgctgaccacacatttgcaagacgtgagagtgagtgtcttcttaatgtgcattaagtgccttgcttaccttacctatctagwcccagccctatccagagcctaccttttacaactctaccttttaaagcttarcatcctctacaaaattatactatggagtagaaaggttgtactgtgaactgagctggcattattctcacacaagctatgtacttsagcatcaaagatagtattaaaatagatgcaatcataacataatctccatacactgcagttagaaagttatttatgaagcatctggtatatctggacatacaatcatcaagtcacctgatagccctagagctggaatgaaatttgagaggatcatttggtaaaaggcatatactttaaaaaaactgaggcttaaaaaagtaaaataattttcacaaaacgacagagccagaattggcagaaatgaaagtagatcactagttttctaatcccagtttcactcgatatctctgattgtgtattagtcaggatccagcaacagaggcagagccactggaagggatatacacgtttcttttgggtatttgatcttatgcaattgtgggagctggccaagccggttctgtaaggctcttgatttcatgtctggtactgaagcttcaagtacataaggcaggtggaaaaaatgggaagatggatgaatgtccagtgggcaggacaaggacaggctggaaccacaaccacgagctgcagttccacaaatacggactagaacccaagtcagctctcactgcctctaacccctcctgcaggagaagcaggagcccttcatcatggagctaactacacacctggcccaggattcagagatgctgaaggaggattcaggggaagttggagtagttgcaggtctggtacaccaaggagttaacccaggagatgggccatagtattctgtggttcacaaacacamctgcttgaacgttccaagcataaaaaggctaaatagttgcttcttttccaccctctaaatcacatgcaaaaatgtctactgactcatcctgactgaaaacacgaggaaattctgggaaacacagttcagcctagctgagttgagacattatttattataaagccccgacagtttcaactctacttctttacctagctcagacactgtcatgtgagccttttggcagtgtctcttaagatagaatgccttttcattttaagaaaacattaaagaataaaatgcattcttgacttctgcaatgatggcagaagtcatagcaccagaagcctcttctaataatgcagcagcatcaacaaattaattcattctgcatctttgtgtgttataggaggaagaaaactccaataaagtctgtctcaacagaggtcacctcccacccatcagacacrgaaattccagtacctgctgggagttctggtggccatccttatccctagtctcttgtcattgttcaaggattagggaaaatwcctctcaacctgctagatttcagcagcaataaacgggattgtttatagggtcagtgagcccaggatactaagggacagrcatcagtcaaaagcattttccaaaaaaatcctttatattttaatcaaatcactataaagacatgatgtgtcctagtttctcagatgttcaacccaacagtctctttctttaacttctgggctgcctttcagaactgagcagagttgtatccaacacaaaagactgtctggactcaggcaccgtacacataccccgtcactgctcctctccattgaggtaatctgttttttctctaatcatctccaaatgattgataatgttgatacccacatataagtttttctttatcatttggacattaaaaggtgagtttcctgtgttctttaaaagagacaatagaaagcaatcctttgctctactttagacctttattattacttaattaaattatatctcacaggaaatgttaaatcatttcaaataaccaaaaaatcccccagtgagcttctgcacttttgtccaagggccactggcacacaaactccagtagttcctatagttttatgtgtctcatggatcccaggaatgtgacttatgtctataatgctgttctatagtggcagtggcaaactttttctgttaagagctaaatagtaaatattttcttcggctttgtgggcagtatggtctatgtatcaactactcaactgtgctgtaaaagtagtgtaaaagcagtcatagacaatacaaattccaataaaactttatttacaaaaacaggtggcagactggtttcagcccacragctgtagtgtgttaacctttgctctctggccctatgaattcttcatgttcacagagcatcttgaagaaatgaggcccaataaaatacctggttttatttcaaatctgccttcttgctgtaaatgacctacagctcaggaatatctcaatgaatacccacacatgttatctgtctttacatyggctaaaacctttgactagattatgagtactgtcctgtcagttgtgaytcttctttccctagcaggctcctcacagctccccaattcacaatatttttctcagcacaacactttccagggtgtcaaaatgttcttaaccatcagctctgttttctcagagcctttgttgatgctttacagaagcctaggtaaattgggttccagtgctcctggtctcctgagctcctgctacattgacactgtgtttatgccacttgtgttgatccasatgtgatattaacttcccagtacccccaaaacagtcacacatagtgccacaaatgcttcctctggctcatccagcaacccctacctctgactccatttccatttttccagaggacactcagctcatcctctcatcttcctcctataatgagggacaatatgttctactctgactctagaaaatgtatcaagttaatttcttttacaaaaaamaaagagaaaaatagaaaggaattccttatgcttccctcccctccaccaaaagaggaattctgatgttaactgtttagtcttcatttctawgacagggcacaaggttgtagctagtgtttataacttctttcttttacctatcttcagagtgaccagacaacctacagaatgggagaaactttttgcaatctatgcagctgacaaaggtctaatatccagcatctgtaaggaacacatttataagaaaaaaacaactccattaaaaagtgggcaaaggacatgaacaaacacttctcaaaagaagacatacatgcagacaacaatcaagtgaaaaaagctcaacattactgttcattagagaaatgcaaattaaaaccacaatgaaatatcatctcacgccagtcayaatggctgttaataaaacgtccaaaaataatagatgctggcgaggttgtagagagaaaggaacacttttacactgttggtgggagtgtaaattagttcagccattgtggaagacagtgtggtgattccccaaagacctaaaggcagaaataccattcaacccaacaatcccattaccgggtatgtacccagaggagtataaatcattctattataaagacacatgcacgtatatgttcattgcagcactattcacaatagaaaagacatggaatcaacctaaatgcccctatgatagattagataaagaaaatgttgtacacatacactatggaatactacgcagcaataaaaaggaatgtgatcatgtcttttgcagggacaaggatggagctggaggccattatccttagcaaactaacacaggaacagaaaaccaaataccgcatgttctcacttataagagggagctaaatgatgagaacacatggacacatagaggggaacaatgcacattggagcttactggagggcagggggtgggaggagggagaggatcaggaaaaataactaatgggtactacgcttaatacctggatggtgaaagaatctgtacaatcaacccccataacacacatttacctatgtaacaaacctgaacattgtgcatatgtgcccctgagcttaaaacaaaagttttttttaaattttttttttttaagacagagtctcactctgtgtgcccaggctggagtgcagtggtgcaatcttggctcactgcagcctcagcctaccaggcacaagtgatcctcccactgcagcctcctgagtagctgagactacaggtgcgtgacaatgtatctggttagtttttgtgggtttttttttttgtagagttggggttttgatatgttgtccaggctggtctcaaacccctgaggctcaaatgatctgccggctttggcctcccaaactgttgggattacaagcgtaagccactgagcccagcctatgacttccttcttttaccacctgttccatattacacttgcccttggcaaacactggttcttgtcatgactccttatctggtgagctgtcccataccttcattcttaaagggtcactgccattagcagtcctcactgcattgaattgttttcattttaatattgatttcaggatatggaaatacaaagaggcaccccagaagacctcctgcaagccaccatactcctccttaccctcactgtgtggtagcaaccccattttcccttcatagccaggataaatcacccatcagaacaataatcaccttttttaagcctgctggttaattagcataaggagtacaaagtggctggggacagttttactttccaggttaatgaagctacaaatcaatgtaaatccatcactctggtcatctctccttctaggaacaatgaacatccaggtgaaccgttcaaagctctttccactgggggaatgtcccataaccactgtccttcagaatcatccctaaatgtgacaggagtactgcattggccatttttgggtgatgccagtgtattgtgcagaaccatctataaagtagaccaaatagtctcttcctcagtcaactggtcacatggaactccccatgagaagacagatgagagagaaggggcaatgtagtatgagtaggggtcacaggaatcttgctcatgtgacttgtgccttcaggacctacataagtctaatttcatttaccacttccatgtgatggaatactgctgtgcacactcaactttaaggtttgatgggtcagataacatccaattcatagctcaggtcttgggccatcgttaaacattcagtctctactagagccccaaagtaagccagccactgttcatcaaaagaatagttatctgcaggggatgacatagctgtgctccaagatcctaagggtatcttctgtgatttacctgctaaaggtgccatagagcctccctatctgtcacagacacttcgagcaccatcagatctgttgggtcgtataacatgagtagcagagcagcttgcctttagcttagagctgttgcattctcttgttctgggccctactcaaagctggcagcctttatggttattcaggaagtgggctagaggagcaggcccaaatgaggtatatgttgacctccaaagaggtccactaggatcagtgcctctttttcagtggtagaagaaaacagatacagaaatgtatccttcatattggaaaggatatatcaacatgctccagaaaatggacttctggaaattgcaataaggtggcagtcctctgaatttataaggggtttatttcccacccacttgtgtcttgccaaggtgtctagaatgcttgctatttcctgcttacttggtctaaatcagcaaatactgtcagtatcacattggaccacatgatgtattgtgaaayggagaagtgataagttttggcaggtaaaaatctttgcagttctggagaattacatatccctaaaatrggacaatgaaggtggatttctggccctgactggtggaagcaaactgcttcagctgatctttaccaacacaaatagacaatataacatttgtcaaatatattgtggcacaccacatgctagggaatgtgtcaactttctccaaggaaaagacatttagaatagtagctaatttggagtgaccacctggttaagttttaataatccacagctattcaccaaggtccatctgcactttgcacagacataattgagcaatccttcaaagaggaagaaattggagtaaaggtcacacaacttatgtctgaccagaatacaaagctgtgtgtctccaaagtctaggcccacatacccacaactgaagaccttagtggctctgtaaactcatcaggttgctacctacaaatctgtacctgcagattcattactaaaaattagtctcacattttagtaaagaataaagtttaaaaaaacctcatcctcccccaaatttttaatacagcaaagtatggagagtcagttataggacattaacctttggtaaggaaattaatatttttgaagctacaattgcattgctgtattgccaacgcatcgctttaaatttccccaaaagaggaacatataagcttcagaaactccagtctctcatgtacaaactttcatgtcatcttaaagtattatatggttgacttcagagaaaattaatgattatgtcatcaaagttttatttgtcgaatatgttgaagcctttgcacaatgttgaagagaagaataaaatattaattagagcaaaaaaaaaatccttaaagatatacctacattagacctaaaagttttgtttctaggacatgatcctagtgaaattaccatggatatagagcgtatcctggcttaaaaaatagaaataaactaaacttcttaaagtattattattatttttttgactctgtcaccaggctggagtgcagtggtgagatcttggctcactgcaacctctgcctcccgggttcaagtgattctcctgcctcagcctcccgagtagctgggactacaggcatgcgccaccacgcccagctaatttttttttgtattttttagtagagacggggtttcactgtgttggccatgatggtctcgatcttttgacctcaggtggtccacctgcctcagcctcccaaagtgctgggattagaggtgtgagccaccgtgcctggccctaagtatttttaaataaagtaaatcatttaaagtatttttatactttttttttttttgagacagagtctgtctctgtcgcccagactggagtgcagtggtgctatcttggctcactgcaagctccgcctcccaggttcacaccattctcctgcctcagcctcccgagtagctgggactacaggcgcccgtcaccgcgcccagctaactttttgtatttttagtagagacagggtttcactgtgttagtcaggatggtctcaatctcctggcctygtgatccacccgcctcagcatcccaaagtgctgggaagcatttttaaataaagtacatcattcaaatgatttaaagtaaatcattgtaactccagatgacaaaataatacatgcaaccattaaaaatgatttcaaaaaatactgaatgacatatttagatttctactattgagtgggaataaaagtagataactaaataatatatatagcttgagcctatttttgtgaaattatgtatcagaggaaaacaagtttgaaagtacataccaaaatggtaactatattgaacctacatagtaactagaatccattaataatcagcaaataaattggatttataaaaaaaattactgtcaggaaaaatatttaaaaaacacaatcaactaacatctattgagtgcaaggcactattctaagcacttaacacatattatcttatccaaaatttgagatgtccctagacaatattaattctattttacagaagagaactctaactcaagaagaasttaaaaatcttacactagtttgcacagccagcaaattgtagattttgccttgaatgtgggcagcctgacccctgagtctgcactcctaactacaatcctggacctcctattttcctcttccaaaggagagtggataaagatcatatgaaggatatctcccatgtagtattgagtattggggcacacattacatgaacaggagggttgaagataattttaaaatagataatttgtgggagtaaacttgatgttcataaacaaagatattttaagtttcatactcatagccacccacagcttattccccattccttaactcccctgagttccactttccattattctccaccctgccctataaagtgggaggtttacagcagagactatacttgccggttccagtgtcctccggctactggttgggttttgttgacaggcggcacctgcaggagattgaaaggatggagaaagtgatggtagagtaattatttctttcttttttttttttttaagtttctttttttttttttattatactttaagttttagggtacatgtgcacattgtgcaggttagttacatatgtatacatgtgccatgctggtgcgctgcacccactaactcgtcatctagcattaggtatatctcccaatgctacccctcccccctccccccaccccaccacagtccccagagtgtgatattccccttcctgtgaccatgtgatctcattgttcaattcccacctatgagtgagaatatgcggtgtttggttttttgttcttgcgatagtttactgagaatgatggtttccaatttctttggttctctccctgctgggactgcctggagcaggctgtgtcagtctactaaggaataattttcctttcagggaagcttctgtgagactttctccttccattttccagtaacaatctcatctctctgagcctaagggtggttaacagctgaactgctactacctggggctactgcactatcttatgcttcccctgcccaacaactgttaaatagtctgtttgcaaatcagctgtctttgaatcattccattttgaatgcccttgttaggatcctgacatacaagttgtgattcctgtgttcataaagctgacactgagtattttggaaacacatcacgtgaacaggagggttgaagataatataaaaatagagaatgtgtgggagtaaacttgatggttataaacaaagatattttatttgacattcatagccacccacaccttattccccagtccttatttctctgtcctggatagactagatacacttcaggaatatttgtaaagcatgttgcatggtaatcttgatgcactctgcagttttacagatgctgctatctcagaataattacacaaaagcaattctctctgcagttctcagggcaatatacagagcttctggcaaacacagacattaagtcacagaacactttgtagaccattcttgctctggaacagatttatgaggttacttggtagaccctctttaattagaaactgggaaatggaaaatagtcagacatgagtaaaacatttttttataaagcccccttattttccactcaagataacacaaagtacagattgagtatcccttatccaaaatgcttgggactagaagtgtttcagattttggaatatttgcatatacataatatttcaggcacgggatccaagtctaaacatgaaattcatatgtgtttcatatacaccttatacacatagcccgaaggtaattttatataatattttagatcattttgtgcataaaataatgtttgtgtacactgaaccatcatcagaaagtaaaggtgtcactatctcagccacacatgtggatagtctgtggttgtttggcatcaccatcattcttgaytgaatttatatgctaccaatacacagtcattttcttacattaattcacacataagaattttacataaaaaaagacatatcattaatacagtaagaaagaatgtgtttagtgtaactaaacagcaccgtagcatcactggaatatctgcgtcagctgttaaatgacagcaacaacaaacaacagcaggctttcagtctccacctacgatgctrtgttttgattaaaaagttactgtacaaggtattttttatgtgagaatctgaggatagaaaacatatatcatatgtagaaaacatacatcacagctgaagggggctgggaggttctttcttagggacgctgaataaactgtgtgttgtacacatgcattttgattgcaacttgtcacatgaggtcagaatggaatttttcatgttggcccaaaaatgctttgaatcccggagcattttggattttggatttttggataatggatgctccacctgtaataataacatagcatcttctttggtttttagttctctcatgttgaggtctctctcattaactagtgagctattttacaagtctgaacacagcaaagattggagaacttgcaatttaggaggagccaatggaaaatgtttgtctatagtcaagcaccatggacaacatcttttatgagtttccaatctttcccagtgttagaaactagactgcatattatcaatactcactagatattaattgaccctatgaacaacattttaaaaatgtaaaaggaaagtaaaataattccaattcaagtcccaaagaacaaaagcatcttttctgtatcacttggtttatgtagctgaaagctacttatacactgttcaaaaatgattttccacaaaaggatatgtttactgattctgatggcagcagcggcccatctggagtggcctctgcgaagacgccagctgcaccaggggaggtgtgaccaggactgtgtactccatggagatggtgggagccctgtccccttccgagttggcaggtcaggagccccaccctcccaggcacagctacagctgcccagctgtagctgcagacctaggcatccctgcagtttgggggcccaggaccccatggcccccactccccaaccccctgcaccccactcctttcccctcacccctgcaagctcagaagtgcctgctcctactgcctggcctctccctgctcctggcacccactccagaacaaagttgtggccaagcctaggtgctgctgtgacctggttaggtgtggatgtgctcagggtggcaccaacatgccagccccctgctgcctgggcctcctccagactttgggggccaatgagcatgggagggaggctgaagaggatggtgctgagggttgcttagcatgggcctgtgggttcccctcagcacaaacagcccaggggccgtggatgacacgcagatggcagcaggaagcagataggcccctgggcagaaaggggcagtcccagtgaagcaccaccttgaagccagggagggcctgaagcctgggggccaacctrtcagttccaggtggtgtccacagcccagagtgagaacttatggtgctttttctgggcccacccatggccgcccatggaccaatcagcatacacttcctcccttatgagcccataaaaacccaggactcagccagactgggacagatgtcaggatgacctgcctacggataggagctacccactctgggtgtcctctctgctgagggctgcacacttgtcaggacaacctgcctgtgaatagaagctacccactccaggtttcctccctgctgagggctgcacacttgggattacctgcttgtggataggagctacccactccaggtctgctctccactgagctgcacactcattgggacaatctgcttgaagataggagctacccactgggggtctcctctccwctgagggctgatcacttgttgggacaacctgcctgtggaaaggagctacccactttgggtctcctgagagctgtactgttgctcaataaaggacttcttcaccttgctcaccctccagtcgtctacatatttcattcttcctggatgtgggacaagaactcaggaccccctgaatggtgggactgaaagagctgtaacacaaatagggctgaaacatgcccctaccaccccccctgcttgccatgtygccagcaatgagaaggagagaagggcagcagagaagagcagaggcccttccaggagcccaaacctagaggctccccaagccagggctgtgccaccctctttggggcactgtggtttctggcttctccaagtttctggatgccagcacactccccttatccagacttgggtgtccataggagaagctgcttgtggtgcatctgatccagcagtaggcttgcacagaactggcatctgtactggtgcctgcagctgcccaccccaccagagcagctggcttgctgactctccacagtggctggaccccacactcacttgcttatgcacctctcaccactctacacctggctkgaccttggaggcgtgggatctggttggttagcatgagccaagcacagcctgccaggccaagtgggcaaaacaagcccagcaggcctgagtaaagctcaggcaaaggtgccaacagccacacaggcttctggctggaaaagtgacaccctaaggatcttatgacagttccatatgctatcagtacttctttgaactaaatctatgcttctcaagcaacttttgattaatcataactttctgtgtaggttttgtattgcttttgcatgatatgtttggtagggttagaggacaggagagtttttaccatggcaaatagaaaggatcacagagatgaagttgttttcctgaacataaaaccaaccaaagatgcaagcatattaaaagtgacatttgtagtttttggtagcaatccaccaaaaggtctctggtaatttcccacaaaatggagcacttagtaagtaaagtccaataccactaacacaaccttctcttgtttttataatctttctaaagtcagaataaggtcaccatccctgcagcaaaaccaaacctgttgtcatccagcagaaattcaggatctattcatggcccaataggcttgcagttcatttaagaaagttcactgagggagtcttggaggcggtgaagggcaattaggaggaagagaagtgaaagtcaaagccaaaytggccctgataccctatatctattttgtatgtgaagagaagttctaggaagaaagaggtaaggaattcatgaagacttgatggaatctctagttgcctctcccttttattctgcctcagctgccaacagcaacatgttagtatgttttaaagtaactccaacaactgcacatgtaattgggcttggcagtttttactgttcccttcacaaaaagtgattgtcaactgagaggaatcctagacaagagtccactgagatttctgaggaaatgtgaggaaagagtttggaattgttttgatgaaatttactwcaaatatgaaaaatacgtttaatatatagaattagaatcttgtaaagagtgcttctcaaacattcctcatgtgagtcaccctgcgatctgataaatttgcactctgatttagtagtttggaggtgaggccggaattttggcatttcttacatactcccagatgatctcaaggtgctgggccagggaccattctttgcatagcaaggttgtaaaaaggctgggatactctgatgatatctgcagaatgaagatataaaaatgtcaaggtttgcttagcaaagctgtgattcagacaggaagaaagatactgagtttccatgaccctttgctcattgtgctgtcatttaggagccttaggctgtaggtacagagagacaaagaaaagagagactccaacaagtgctgaatggagaatgcagaggcaaagagaacagcttgtgagcagactccagggatgacttgaagccactgagggaagccttactagatactcaatgctgtttaattcatgcctcattgcctgcatagtagcttgccactgtcagatggtatatgctgatttttttttttggaacgttcagtccatttgtgtgtgctaaatgagagagctagcaatcgtatgctttcccatagggaataccaggagtttacaagtcctcagcactagtcaggtaacaataaaaatcttgttttctattatctcatctttccctgattctagcttgaagaagccagcagtaagcattgggtaggtgagtaaggaaagacctgggaaaagggaaaaaaacagatcacataccccttcccatggctggacttcatcttaagcaggcctgaagtaaaagagggagagaaacttttaattgaaaagcgagattggaattggattggttacggcaaaaaaatcaacygggctgttcagggatagggaggggagctcaggaatagcacattgcagggcagcaatagagagacagaatttcttaatgaatctgagcaagttcagcccattcaatataaactagtgttagatgcacaggtctgaacaaggaagaataagaataaaccacagaaggtacagaatgagactagagttctattctcctctgcactgagagggggctggacttgacctatgccaatgagttttcccacatttctaagacatttatttcatcttgtaatcaagagccagcattctctctgtttttcaagagaagccaggattatatatttttatgtgagctcttctgattttttwaattttaattttaattaattaatttatttttttgagacagagtctcgctctgtcaccccggctggagtgcaatggcacgatctgggctcactgcaacctcctcctcccgggttcaagcgattctcctgcctcagcctcccaagtagctgggattacaggcgtccgccatcaaacccagctaatttttgcatttttagtagacatggagttttgccatgttggccagtctggtcttgagctcttctgatttttaactgttgactactaattcaaatttctagaacacccagagggtccagctattttggcaaaggatgcatatctgagggcctctggctatgacttctggactaggcatcacatccaattactcacatttatgtaggagggcactgaaagcttggacttagtcatttctgtgtcctcagctccaggctagttctttagtaggtgtccatacatgtcgttaataggaatcaaaggcaactatgggctggaaattaaagacccttagacaataatttctagaaattcttctggtgctggaatgtgtcactactagctacctttcaccttttgtgatgaaactgactgagaagcccagcataggaaaaggaagaggaacccttgctcaccatcgcgggtcaaagcctggagcgtcctggatatctgaactccatcttcaagtgcatgctagtaaaccttttatcagcgcttccaaccgatacaaaacagaatgggacatgtttaaattgcctccctttgggaggcagagcagtctgccctgtatgtgctctgtaaagcctccttccctttactgagcacacggagatggagggccttgaactgttaagcactgtaatgtgtgtggaggtggggaaaacacagccaaaggcctgtgagactctgaggccccatgtaccagaatgtgtcggcacctccaagtaggaggcccaagcgtgcataggcccagacacggtcttcctggggaactgctgccccctgctggcaatgaagggtgagacaacattctgttctaatcagcttagccaatcttctccacagctacccaacctctcatccataagccaggtgagttgggccttcctgttttgagcctcaggttccccagcttctcgcttcctccactatgcactgagggcaggagccaggtatccttgttcagctcggaatctgcaacccttaggagagtggcctatcacacaaagaactgctgaatgaaaatgggttaaattctcgttagtgaagaagagctggatctttggcattaggctacttgagtttaaatatcatcttcatggcttgagtctctatatcatcatctgaagaaacggaaaacacctctgttgggtggttactgattcaacacgataatgaatgttaagtattaggattatatctgtcatatagcaagggttcaataaatagtaactattagtatttttttaaataggcttatcgaagtatgacagatgaagattaaactgcacatatttaaattgtacattttgatgagttttcacatrtgtatatacctgtgaaaccatcactacagtgaagataacaaatatatttattccctccaagtttccccatgcctctctgtcatccagcctcctctcctccccaaagaaaaatgtcccctctccaggaaaccactaattttctgtgactgtagactaatttacaatttctatatttttatgaaaatgaaatgagacatgtactgtttttgtttgtcctctttctctcagaataattattttaagagtcattcatgttgctgtgtgcatcagaagatcattattcttttattgcagagtaatattccattgtatagatacaccacaatttgtttatccatttacctgttgatgggcatttgtgttgtttccagtttatggctattacaaataaaactgctatgatcatttgtggacaaacactttcatttctcttgagtaaatacttaagagtagaatagctgggccatatggtagatatacttataatcttttatctaaagtgattgtaccaktttacattcccatcagcgatgaaagagtttcccagctgcttcacatccttgccaacactttttaattttagccatcctggtgggtagaatagtgttatctcattgtggttttcatttgcattttcctaatgattaatggtgttgaacatcttttcacatgtttattcatcatccatatatcttctttagtgaaatgtctgtccaaatattttgctcatttttgatcgggtttttagtttttaaggagcagaccaaatcattttataaagttaaaaaaacttactgagatacaatctgcataccattcaattcaccatttaaagggaacaatggcattcagtatatttgcagagctgtgcaactatcattgcaattaattttagaacattttcatcatcctaacttcctcttcttccccatcctttagccatcaacccaccatcatccctaggcaactactaatctacttgctgtctgcagagatttgcctattctggacatttcatgcaagtggaagggtcttttttgagtggctttttaaatttggcataatgttttcaagattcatccatgttgtagttagtatcagtgcttcatttttaaattatagaagaatattccattgtatgaacatatcaaattttatttattcatgtcttcatcagttgatgaacatatggttgtttccactttttggctatattgagtgatgctcytatgaacattcatgtacaagtttttatgtaaacatcagttcttatttctactgggtatatacttgaaagtgcagttgatgggtcatatgataactctatgtttacctttttgaggaacttccagacagactgttttccaaagtggccacaccatttcacatttccagcagcagtgtgcaagggttcacatttctccacatcctcatcaacacttgttattacctgtattttttattatagctatcctagtgggtatgaagtggtatctcatcatggttataaaacgtcttttttttagaaaaaaaagttaytttactttgaaggggtccaatttgttgatattttttcttttataggttgtgctttttgtgttgtatttaaacaatctttgacaaaactcaaatttcttaagattttctccaatttttttccaggaactcctatatttttaactttcaaatgtatgtgtatggtccattttgagttaatttttctatgacttaagggtctaggttcattgtttygcatatagctattcaagtgttctagcaccattgttaaaaagattattctttccccattgaattgtcatggaaccttggtaaaaatcaattgggggtctacttcccagtattcagtattcttattcttattcagtattcttatttttaaaaggcagccttaacttagggctgatcttgctccaatactgagacaatagtcttatgaatcttttattgagtgccttctgtgttacaatgttttcccactctggctggttgtaacttaaaccattccaagttttgtgtgagccttggggatcttaccgtttgcaggtggttctttccactaaactatggtctagcatagtttcttcacatgcaaactgttagttaaagacttgaaggaacccatctgcagctcgccacagcctctctctctcttcagctctctctgctccagcattctgccctgcaactctgctgccttaagagaattcctactgccagatgagaatgcttttttaattctcatttttctcctctatttagataaactgctggattttgcttggatttggcctccctaaactacagcctggaaaatctgtccaggcaattatctgaggcattgcagggatcatttcatttgttttycttttctcaaggattgctctttcttttgcactatttgttgtccaatgtctgaaattatcgtttcatactttttccaacttagctgtttaaagtaggagagtaaaccaggtcattgttactctatctttgctggaagcagaactgctattagtattgtttctgtctttatttcaccagtctggcttatgatataaagtgaccatcccaaacacacatgttcatatatgcacacacacacacacaccactactacctcctgttttctataaaactttctttttatagttgtgaaagttgtcaaaatcaaaatgaagtcctttatattaaagtcctggcaaatggacccatggaaggccataaagggagtattctcacacatatgcctgaaattcagaactatcacaaaagactgccaaaaatgcagtcttgcacagaaaatacttctgcaaggatgtctattcagcaactgtcagtccttggaccaatgccacccttgttattgatcctcgtagccaaggacaattgattcaaaacaacttatttattctttctcattttgcctttaaaaacttccccttgtcttaacttctttaaatatgcacatagtataatatggcacacttattcacattgcaaacctgaataaatatcattttcttatgtagagtctccttttctctctttattaagtttaacttggaaaaggtataggtcatccaccagtcactgtggctcacaatggcccaaagcaggaagtaggagaaatcttcccctacctgagtgaaggaacctcgtggttatattttcattcattcactcacggatgacaacctggatttagtttgcctgggttgcattttgggctacatcactttttacttttgtgaaattgtgctaagccctctacatacagtgtctcasttaatcctcaagactaccttcatacacccattttacaagtgaagacgctgaggcttagaaagggtaactatattgcccaatgtctgacacacagaaatgctgctcaatctgttgctcgtttctcagtactcacttcacttaagctgtcattggcacttgcctgggctgatcatttcctctttcatgaaatttctttcttcagttcatgtcaagtacaacacactcatttctcctccaacctcattgtcttctcagcttttatatcttctgaatctctacgtgtgttctttgctacttatgcttactttataggggatctcctccagcctcatgtctttaaatactgtttctaatctgattagtcacaaatcatatctctagcctggagcttgaatacatctatatatcctagtccctactcaacatctccatgtggatgtttttccaatcttctcctttttgttccaaatcctttccctgtcctacctctgctctgctctgtcttgtggagggtggagtggtctgacctctgcaggctcttgtgtcagccacctttagcctgcctaggatcctcagaagggacttgtggaagactgaaggaagaaggaagaaagaaggggaggtccagctatttctagctcctctctttcttggccatgagtagtgtctctgacagagactgttgctcaacttctggtctatggtrtgacacttccttcatccaataatgccccagctctttccactgttgctaataatttctgtggtgccacccaaaccctgtttgtcttctcagcaatgtcattacctgtgtaaccatgtcctctgtttgcaatgcctagagtggcttctatttcctgacatggcctgagttgacacaggtctctaaaaggcatctcaaaaccaacacatctagaacaaactcctaatttccctctcaagttgttcttcctggtagtttgtccattcaaattcatggcaactccattagtgccatccttgatgctactgtccctctcatacctgtattcaatccaccagcaagtcctattggttcaactttataaacatacctagagctgcctatttttctccactttcactgctatcaccatcctggtccaagtcattattaactctcacttggactattgtggtagccttctgatatggtttggctgtgtccccacccaaatcattatcttgaattgtagttcccataatgcccacatgttgtgggagggacccagtgggagataattaaatcatggggggcagttttccccatacctttcttgtggtagtgactaggtctcatgagatctgatgggtttataaggggaaacccctttcacttggttctcatatcctctcatgtctgctgccatgtaagacgtgccttttgccttctgccatgattgtgaggcctccctagccacgtggaactgtgagtcaattaaacctctttcctttacaaattacctagttttgggtatgtctttattagcagcataagaactgacacagtaaattggtaccagtagaatggggtgctattgtaaagatacccaaaaatgtggaagtggctttggaactgggtaacaggcagaggttggaacagtttggagggctcagaagaagtcaggaagacgtgggaaagtttggaacttcttagagaactgttgaatggctttgaccaaaatgctgataatgatatggacaatgaaatccaggctgaggtggtctcagatggagatgagaaacttgttgtgaactgtagtaaaggtgactcttgctatgttttagcaaagatactgggggcattttgtccctgccctagagatttgtgaaactttgaacttgagggagatgctttagggtatctgggggaagaaatttctaagcagtaaaacattgaaatggtgacttgggtgctgttaaaagaattcagttttaaaagggaaacaaaacataaaagttcagaaaatttgcagtctgacaatacgatagaaaagaaaaacccattttctgagcagaaattcaagctggctgcagaaatttgcataagtaatgaggagccaaatgttaattaccaagacaatggggaaaatgtctgacagggcatgtcagagacctttgaggcagcccctcccatcacaggcccagaggcctaggaggaaaaaatacttttgtgggctggctcaggtcctccctgctgtgtgcagcctagggacttgtgtcccagcctgtgtcccagtcactctagccatggcaaaaaggggttaaagtacagctcaggccatggcttcacagggtacagtccctaagccttggcagtttccatgtggtgttgagcctgtgggtgcacagaagtcaagaaytgaggtttgggaacctccacctgtatttcagaggatgtgtggaaaagcctgaatgtccaggcagaagtttgctgcaggggtggggccctcaaggagagcctgggctaggtcagtgcagaagggaaatgtgggattggaggcctcacacagagtccccaatggggcactgcctagtgcagctgtgagaagagagccrctgtcctccagaccccagaatggtagatccaccgatagcttgcactgtgcacctgggaaagctacagacactcaacaccagcctgtgaaaggagccaggaggaagggtccccctgcaaagccacaggggcagagctgcccaagaccatgggaacccacctcctgcatcagtgtgacctggatgtgagacatggagtcaaaggagatcattttggagctttaagaaatgactgccttgatggatctggacttgcatgcggcttttagctccttcattttggccagtttctcccatttgaaacaggtgtatttatccaatgcctgtacccccattgtatctaagaagcaactaacttgcttttgattttaccagctaataggtggaagggacttgccttgtctcaggtgagactttggactatggacttttgagttaatgctgaaatgagttaagactttgggggactactgggaaggcatgattggttttgaaatgtgaggacatgagatttgggagtggccaagggcagaatgatatggtttggctgtgtccccacccaaatctcatcttgaattatagctcctgtaattcccacatgttgtgggagggacccggtgggagataactgaatcatgggggcagtctagcccatactgttcttgtggtggtaaataagtctcacaaggtctgatggttttataagaggaaaatccttttacttggttctttctctcacatgtgccgccatgtaagacaagccttttgccttctgccatgattgtgaggcctccccagtcctgtgaaactgtgagtcagttaaacctttttccttcataaattacccagtcttgggtatgtctttattagcagcatgagaacagactaatacaccttctaattagtctccctgcttctgtagttcagaatgatctttctaaactagattatgctgcccttctattgaaaatattacactggcttctcatcttactcagaagacacggtaagatcttgacaagtggctcccaaggcaccagacttctaggacttcatgttctattactttctactatgtacattctgttttagcctcaaagacctcaccactctggctaggacccaccaggaatattcctaccacagggcctttgtacctgctattttcacccagaatgtgctttctccagtatctaaggctgttaactacctccttgcctgtgctcaggtgtcacttcataagagtcctttcctgattaccatatacatatcatcctccttatccctgtttttttttttttttttgggatggagtctcactctgttgtccatgctggagtgcagtggcatgatctccgctcactgcaacctccacctacctggttcaagccattttcctgcctcagcctcccaaggagctgggattagaggcacacaccaccacacccgctaattttgtatttttagtagagatggggtttcaccaagttggccaggctggtcctgaactcctgtcctcaggtgatccgccgtcctcagcttcccaaactgctgggattacaggcgtgagccactgtgcccagccccttgttgtttgttgttgttgttgtttgtttgtttttgttgttatttatagcacttatcaccacctcatgtattatatagttattcatgatgtgtctcttcccatcagaatatatacaagagaacaggaaccttgtttggttggtttctatacctccactgtcttactaatgcctggcatttagtaggtgctcaataaaatctttgttttagaaaatgattaataaataatatgtacatattgaatattgtttcctcttttaacaaatctttaataataataaaaaatttaaagcagcaagattgctttgcatcaggcacaatgataagcgctttaaatggagcccatgattcactttcatttatagagcccacatgctctctgtcaggcgcagaaggtgccagccctgcaggagcttcgggggcggagcagaaggccgcctaaaacagcctttgctaagagagcatgcgtaggcgacgcgctggtagagctgtggacctgccagcctgcgaggcggaggacgggctccatctcttagaaacgcctacggcgcatgctctatggggtcaactggggggctggcaagcggcmgcgctggtctrgggcggagtctccgaggcacttcccggtggctggctgctctgattggctgaacaaatagtccgagggtggtgggcatccgccctcccgacaaggcagaccaggccccctgcaggtcccctatccgcaccccggcccctgagagctggcactgcgactcgagacagcggcccggcaggacagctccaggtgagagtgccggcgccgcggcgctgccaggtgcgrgtgcggcgtggaagctggtgccttcagcaaggggagggtcgcgccccgaggctctgccggccggcaagaccctctgcgtttggacccagcgagtcttgcctggggtgcctgcgggtgctttttctgcgggcgttggctcaaggcatctgccaatcaaccagggcaacttcagagagcaacttcagagagaagcccactctcttccctgggcgctgtccactttcctggacaggcgcggtctccggtcagtgaagctgcccagtgctcctggaccgcgaggacagcagggatgtctgattcctctctctgcatcctcgtgctctccccttagctcctccaggcatcccatcctacctctcttgttagccaacggcgtggtcgaaagcagacttgggcatcaatcctggttaaagtcccagcgatactgctttttaaacagctgacactttgcttccagtacttcagctgggtgaacctcagattcctgaaaaatggaattaatggtactgccatagggtcggtggaggagtaattgacagtagatcagaagcgctgcctgcggtggctggcgcctcgcaagagcttaaatgggagtcgtaataattgttgttattagaaagttaaatagcatgctgcgttggggccttttcttctgccactgaactgttggactgctcttatcttttttcagaatctgtactatgcatctaatatatacgtggcactttgcttggtcctgggggtacaaagctgagtcagattgttacaaagtctaaataactgagataaaggtgttaatacagcccagaaaagcacacttaattcagcctggaaggttttttttcccccctccttcgagattttcagagtatctccttcttagtaagaattgcttggcttagtatgttgagaaaaacatactaagtatgtagtgttgtgttggaaggaaaacttaactgggtgagattttcagctgagkagctttagctgttactctcatggaccttcctctgggcgrttgatacaggttctgtaggaaaaccgctgaatgaaagcagctcctgcagatgctattctgttttcaattgtggtaattcctttaattttttccctttcaatttactccttattctctagtaataatrgacttttgggaggttgcatttatgataaaaaatagcctggggctgtacaatccttcctatcatgaagaagtacaaagttgtaagtagaagcagtggccttgctttgccaatgcacactgaaggggataacgtttgctcctgttcagagttcacggycgggcgcggtggctcacgcctgtaatcctagcacttttggaggccgaggccggcggatcacgaggtcaggagatcgagaccatcctggctaacacggtgaaaccctgtttctactaaaaatacaaaaacaaaattagccaggcgtggtggtgggcgcctgtagtcccagctacttgggaggctgaggcgggagaatggcctgaacccaggaggtggagcttgcagtgagccaagatctcgccactgtactccagcctgggggacagagcaagactgtctcaaaaaaaaaaaagaaagaaaagaaaagaaaaagaaaaagaaaaaagaaaaaagaaaagaatttcagagttcactacttcttggaaaaaaataatcccaggaggaattccatcaacagaagggagtcagttcacttttgcaatctcctgagaatcaatttcttaagacttgtggaatattcagtttaaacacaaaactaaaaacaaacagctgtatwggagtattattgacatacaatagcatggcatatttcaattgtacaattgtataagtttttgcatgtgtacacacctgtgaaaccatcagtacattcaatattatgaacctgtacatcacctccaaaatattatttgtgcatacccctttgtgatcctttcttactgccccttctctccaggaaaccactgatctgctttctgtgaatatagattagactgcattttgtggagttttatatgaatgggatcagacagtacttttttttttccttattttgatctggcttcttttggcataattattttgagattaatctatatttttttgtgttccttcccttttatagctgagtagtaggtatataccataatttatccaatcatccatttaaagcatttgggtttttccagtttttgtctattacacccaaagctgttataaacatttatgtacaagtctttgtatgggcatacatgcctgcatctttttaagtgattctatttattttttaaaaatgtagaagttctgggatctagtcctaggtttttctctgaccacttgcgtgatcttaggagaggcatttaactttgccttcagcatcctcaaggtctttgctgtgattttgagtcatcactgccagaaaccaagatggtctttgttgatttgatggttagagaatttcagaaggagagagacgggtcaaatttttcctttctgtttcttttgaaagctctattttctttcatttcacttttttcccatgaatgacaaatttaaatrctgacrtataatttggggcaagaacagaagtggttagataagtaggaggaagagctaatagtggttagataagtaggaggaagagctaatagtggctgaacttaaacatgtctaaatcataggtggaaggcaagaggtgggaaataagcaagctcagaaattttgtgtctctttctttttctcaaactatcctcttctaagtcttgccttttgttatttctccatgaccaatttgtttttaactttggggttaggaggtgaatgggtatgctggactccaaaggtcatatatcaactggaggtggtgggtgggaggtttcttagttaaaagtaattcctttgggccgggcgcggtggctcacgcctgtcatcccagcactttgggaggccgaggcgtgatcacgaggttaggagatcgagaccatcctggctaacacagtgaaaccccgtctctactaaaaaaaaaaaaatacaaaaaaatttgccgggcgtggtggcgggcgcctgtagtcccagctacctgggagtctgaggcaggagaatggcctgaacctgggaggcggagcttgcagtgagccaagattgcgccactgcactccagcctgggcgacagagcgagactcagcctcaaaataaataaataaataaataaataaataaataaataaataaataatwataataataataataattcctttgggaggcggaggcgggcaggtcacgaagtcatctgagaccagccttgccaatatagtgaaaccctgtctctactaaaaatacaaaaattagccgggcatggtggcctgcacctgtagtcccagctactctggaggctgaggcaggagaaccgcttgaacctgggaggcggaggttgtggtgagccgagattgtgccactgcactccagcctgggcaacagagcgagactccgaaaaaaaaaaaaaattcctgggcaggcgcggtggctcacgcctgtaatcccagcactttgagaggccgaggtgggcgaatcacgaagccaggagttcgagaccagcctagccaatatggtgaaagcccatcgctacaaaaatacaaaaattagccaggcgtggtggtgcgtgcctgttgtcccagctacttgggaggctgaggcagaagaattgcttgaaccaggaggcagaggttgcagtgagctgagattgcaccactgcactccagcctgggtgacagagcaagactccatctcaacataaataaataaataaataaataaataaataaataaaataaaaawaaataaataaaatttaaaaattccttattctcctttcagatatggctggagtcatttgtttcatattttcctttcaccttttacttgccctaaatctggttcagaactttttgtgggagcattaakttaccagaatatttttgtgtagtaaaattcaagcaaataataatagactgttttattatacagaatgaaaatgcggttcttggggttggtggtctgtttggttctctggmccctgcattctgaggggtctrgagggaaactgacagctgtggatcctgaaacaaacatgaatgtggtaagtttctcaaagttatgtacttttaaaatgcatctatttccccgatccagttatgtgagctacatgaagccatacccatacattcatctctttataactcctttgcttttcaatttctctgawtttttttttttttttttttttttttgaggcagagtcttactctgtcacctgcccgcccaggctggagtgcagtggtgtgatctcggctcattgcgacctccgcctcaggggctcaagtgattctcgagcctcagcctcccaagtagctgggactacaggcatgcaccaccatgcctggctaattttttttgtatttagtagatacagggtttcaccatgttgcccagggtggtcttgaactcctgagctcaggtgatctgtccacctcagcctcccaaagtcctgggattacaggcgtgagccaccgtgcccagcccaatttctctgaatcttagattcaatttgctaggcttttctcaccaggtaatatgtagccaacaaacctcagtttaatgttatatatacttcttaataagataaattatgattttttattaattcatttcatttttaagtctcactaagtttgtttaaactataaaaaagtatttaaactttgcaagaacattaccgctattgagagctggttttagaatacattgaacaaaggttgtgattaagaatgtccagggaacatatttctatacagaagtcaaagtatctgagctaaattttgttagaaaaaatatgcaaaaataaccactcgactaattaaaacatctgaaagttattaatcgtaagtaaacaataaaatctggaaatacctcatttaggcacaaaatatcagtaaagtacaaattattaaagaaaacagcaactttaaaatagatgttgcagtgacccagctgaagaatcaggcaagcttagggactcgcagagaaattcacagtgagccaggagagtatgayctgataacagggtcttaaagttaagttttacttcttagctcaaagcttttcttttgcctcccaatttttccaacttttaaaataattttttaaataagaatgataaaattaaattctttcaagtacttatggtagagagggtatgtgcacttatttacattaaatcccctggataattgaattatccatatcccactgagctcctgattaacaattgtcccatgaatccttccttatagaaaagtgaatgtgaccataattccctattttgttcaacttttcttccatcccaccttgacattctatgtaattattttagtccattgataaaaacaagttaatattttttatactttattggycagcaggggatctctcaaaacaaagaaagtgttttatacattgacagttctagctgggatatttagaaaagaaagaaatgagcatttatttgtgcccrgtaggcaggatggaaacaaagaggcccaagatgtggtaaagttaggcaaatttggtataaaacatgctagaatgatgaaactgaagtttaaccagacaccggtaggtggaacacaagcgtgaaacaagggaggatttactsttgtgatgagaagttggctactagatttagcagactaaaatttcaatgacaaatgctttcttaaagcctggagaacatagtttatctgctcctttgcttgttaatgtgggagactgtttcagattctgtccacccaatttccatcgtcctttttctctacagagtgaaattatctcttastggggattccctagtgaggaatacctagttgagacagaagatggatatattctgtgccttaaccgaattcctcatgggaggaagaaccattctgacaaaggtatgggaaggctcttaaaagtaaaaaccagaattcttctgggttttgtgttagtaaccaagttcagatttaacttaaaaacattgaaatgggattatttttagacgaaagcactaactgtgttgaggtttgcaaggcaaaraaaaataattttcttttaaagaagtaaggacaagagtcatctaattttttgttcaaaggccagattcatttgaggatatgctaaaatctctgaggctttgtttttttaaggaagtgtatttaatgaaatgttttgagcattaaatagatggcttttgctatttaaaaattatttaatttttttgaattcacataatctaaaaatcagagaattagaagacatacagtgaaatgcctcccttctctctcactccctacttcctgcttttttgtgtatctttttraaataacttcattttaaaatctttttatttccaaaaatctcattagaaacaaatacacacacagattcttatttttcccttgcctccatttkaatgcaaaagatggcactattttgttcttygaattttttacttaatatcttggagatctttccatacaatacataaagcacatcttccagaagtgcatgatatttcactatatgactgtatcattatttatttaccaagtgtcctattaatgcatatttgtgctatttcagtcttctgttaacaaatattgctgctgtaaataagcttttgtgtgtgcaagtttatttacatgatacatgtccagaartagaatttttggatcacaggatatatgcatttgtgattttgatatatattgccaagctgattttcatgtgcatgtgtcctgataattactatcactatgaatatatgaaagttcttgtagctttggcttaaaaagtatatatatacatatatatgtatatcttttttctctctctcattttataactcaagcaaaactgcagtttccagtgcagataaaggaatttctagacagactgattgaaattattaagcagttatcagaagaaggatctaatctttattcaattatctctccagatgtagcttatttatttatttatttwtttgagacggattttcggtcttgttgcccaggctggaatgcaatggtgcaatcttggctcactgcaacctccgcctcccaggttcaagtaagatgtagcttattctctaacatttttttgtttctggagacttttcttggggaaattaaggtttagattaaggtagttagatagctatttattcttcaatttaagtgttatacgggcaaaagagccacctttgcctcaattcctgcccaaattgttattcaaagcaaacttaaacaccctttgtgttaatgtgagcattgtattattatttgctttgttttttcttaatttatcctagtttaacttttttcttccatgtgttctagctgtaataagattttaataatgtttaggtggccacgacaaccattttttttgaaatttgatttctaactcttgagatttttatgctttacagatatatgccattaagcttcctttttataaatatgttataaaatgagtgatgagttatagtgagagcttttagtttttcctgtgctcaaaacactcaaaacatatattttatgctagagcgagcatatgatcttggtttccttccttttttttcccccaaagaataacccctgtatactgatttcagacactgtataaagaaaaatgctttatattatttttcttaaaattatagttgattaattagtaacgtgaatcactgttaaatgatggtaagcatctcagtaaaacttgctgagagctctcctcctatatccagcttcagacttctctctccatacagtggttaaaacactcagagtcacatgccctacctgtgtgtatcacactgttgcaggggaaggtgcagtgccctggaatatgaagaaagtgagcatgagtcttgatatgctcccaggtaatagaaaggagacttakgggaccttggtgctacacctgggtttgcccctgacttcttgtgtgctttgttttttcttttttttttttaacctctgtgggatatattatatatactttattttatttttggcaagagggttggggattgggagagtggagagtctaggtctttagaatgggggaatatagactgaaagtatttactctaagctaaatctgttcatagcatttggtcctcatgttctttctctattctgagaggccctccctgtaggggatcactgatgtgtatgtcatacctgctatgagctaacctcagtggggagtcttcaaggaagtctacagtgaacaactcagttctctaaaggaattgtgattttcctaagaactgcataggcgctttcctgatggtttgcatttccacattctaaaacagagcatggacagaggctctttactgtccttcactcctattcaagagcaaggttgttgccactggtgttatttccrgtgtttaaaggcaaatagataaaaagaatggagaaggcctttcacacccaaagtgaaacgcgtcctcttctcatgcatcccrcttcccctcctgacttcctcctctattattaatagcaccarcatcctcctaatgacctagcctggaatctgcagaatcattcttgaccacgggtcctctctaggccacccacgttaaattgcttcagttcatctttttcttctgtttccctgaccaccagcctacattaggctcttgttaccacttaactgggcgcctgaaataagctcagcagctgagagagtcttgagccatttccattttcaaggctcctcgtatactaacagaaagaaagaatttcaagacaggattatggaaattcastttgcttatatagtttaagaaattaatgcttttaatacacacaaaaatactgctatacattcatactatttacaagtaattacaaaatgtattaaaacattattcattttttggtaccacattccttgtggaacctgagtctacagctgaatggtgagcatctttcagtcctgttgccatgggcctctttgactgactgtgtagcctcacttggagatcaggttttttttatgaacacagggcttggccacatggcttctctgctcatgtttgcttaaaggctttacctaactgctcttttctctgccaggcttcctgttctcattcatcctatgtggttttgcaggattaagtttcttaaagcttagctataatgatgtgaaattgccattcagcaatctttaggggtctcagaaatgaagatacacactgttccttaaatattctgtccagctggtatttgtacctttcacctccattctgcacagtagtagcccttggctactcgtgcagtatgtgcatgctgtttcccaccattaagcaaccttcttaggaagtgttgagcaaygctttgctcctgaagggaattgaaattcagaaattacacttcatagggaagtggctctgttttcatctgctcagccttatttcagaaagtcatggggagttagcactggagggatctcagattcctgcctgggctagggatttttgtttttttttaaacacacttcactggtggattccaaggtagaattcttggttttggcaacctgtgttctagactaacatcctcattttgttggataagacagccaggttcaaatagggaaatgaatttgtctcagggcagagggtcatgtcctgacctgtctgactacagattcagtgatctttgaactggagaatgtggccttacataataaatattaaccaagttgatgccatgataggcacaatatatattttatatatatatacacacaccaagagtggcacatttgtatctgaaagttatgcatctgattgccgagtgggtraagtggcactctagactgtgaaagcctggaatgactgccttcagcatgcagaaacaggcttttcaactgtggcctcagcaaagattccccaggggttgtccattgagctattagagtcatagctgaaaattcacagcgtggcttgtgagttaagtctttagaaggagaccatcagcttgtattttgctttgattgtttattttagaattctggttgatttctagatttttctttccttatagaaaaatccttcacttctaaagaaactattttttgaatcactgcagtgctctaacgggctacacataggcsttggtaatctgggatgtaattcctcacccctggtggtgccgaacagacatggtttcattaatcratgcctgagcttggtgacttgggctgagctcaggctcatgtagcactctgatggcgcattgggtaggggattgcattcagaacctttgcctaatggagcagcataagtgaggtcagctgtacagcttatctcatagacccaggttgggatcagagcagaaagccaagtggaaaggaagatagtgctctgccctgtccccttccctcctcttcctcctggttaaccgctctgacctgtcctctgttctcaacctaattttcacatcttcagggaggatttcctcagcctctcacaccaggtcaggcccctggctacatattcttatagtcctctgtgtttttctccatcgcaattaagacaataaacaatatattattatgtaggtgatgatgtgtgtgacctctgtcatccccaccagactctgcggggatgaagacttttctgattctctttacttggtaaattgctttagctccaggctgcagtctacccaagcatgctcctgcagccctcctgtgacattgcgatttaatagtgtcccctgctcaagggcacactgcatgaaggatttcctactcctgggctcctaggagtccacgaacacaacttaaatgcttcctgtggtgggtaaaacttgaagctgtattgcctcatgattaagctgagcatgtgaagagccaccagtcatgggtgtaagttctggctctactatttaactggctgtgtgaccttggcaattttctttacctcttgaagttttgacttattcaattattaaacaggaagaataatactggctacttcrtaggctgttgtgaaaatttgataaggcctgtgaaatatatgcagtatagtaagtgcaggtgatacaatttcttttacaacatttatttatttaaaatattaatgaataaatacataaatattttaaaagtctcaccgtgtctcccaggctagaatgcagtggtacaatcatagcttactacagcttcaaatgatcctccctcagcctcccaaagggctgggataacaggcatgaaccatggtgcccagcctctgtttttaattttgaaatgtcaacatggatttgatggtggtctctgatattgacttcttcaggattaagccctccatgacagggatgtattctaaactgtgtggacaggaggaagatgcatttgtttacratggacagaagtaagaaaagtaagaaatgtcatagaactatgtctgggggtcaggtgacaagcactgtgtcatttctagccctgtgtcccctgcaggtgctttcttctgtggaccctctgctccttctgttgagggagaattttggatgagagctggataatttcccaaaattcgctcaactgtgaagctctggaactcaagttgctgtgctgcaaagctgtctgaggacaggccgtggtggcagagaggggcagggaagacaggcaatttggcatggagatgatgggcacatttgtcacatgacctgggtttgattcccagctgcatcgtatactaattgtgtgtcctagggcaaatgatttagtctctctaagcctcagaggccccaaaggaggaagaatgatgtaaatggcccagcaccatcctgggtgcgtggaaaactctaattatgataatgtcctggaacgttctgcagtgaacaagacagaccacattactgccttcgtgttgcctggtgatcagagtgattattgctggttttggggaaaacagcattctgaggcatggaacggttttcttccctgctctgtgatgcagggtgctcttgttgtgttcactcctgcaggtcacctgctccccagcagggtgacagtgaagtgtgagtgcagtggactgcacagtggcaaaggccacatgactcctgaatgcatcctgtggacaggccaagcgctgtgccctgtgtgaatcatcaggtgaactctcatacaattctagggtgtaagaactcctattacctcctgttttacagatgaggaaaccaaggtttatagggttaattaacttgcccaagataaagcagctgatgggtagtgaaggcaggagtcacacagcccgtgactgtytctgcccacttggccctcttctcaggctagagaacagctatgatgtccctgataaagtcacactgtggaaagtggaaagtatctgacttagatgtcctgcatctgctagatgtcctgcttgtgcctactacagcaactcagagagctgttaggtgacttatctgagataatgcgtgtaaagtgcttaagtgcttagcatggtgcctgtcacattgtcaacacttagtatgcrcttgctgttactatgattatattacctgggccaaagaatgccacttcactctatccttcttcatagtggttatgttctaataatattttattacatttacagttaactctttaacaacatgggggttaggggtgctgtcccccagagttattgaaaactgcatataacttttgcattccccaaaatttaactaatagcctactgttgaccagagggcttacctgtaacgtacatagccaattaacaaatattttatatgttatatgtattatattccatatatacaataagtaagctagagaaaagaaaatgttataaggaaatcataaggaaaakarratgtatttactattcattaagtggaagtggatcatcataaaggtcttcattcttatgttggaacaggctaaggaagaggaggaagaggaggagttggtcttgctgttgtaggagtagcagaggtggaagagggggaggaagtggaaggggagacaggagaagtgggcacattcagggtaactttatgaaaatacattgtaatttctgtccttttttcatttccctagaaatgtttctatagaatagcaattcttccatcatttgctttagtttcagtgcctgtgtcatagaagcgtcagtgttgtaaagraagtcttgaataattgcaattgccacccttctcctgaattgtytaatatcagtttgttttctarcactgcatctcccatgtcttctttcccatcgtctggtgctgttttagaagcactcgtctccatcaaatcatcttctgttaattcctctggtgtgtctattagctcttgactttatttaagatgcatatattgaaactatttacctgctcccaccctccacctttttgccatatccacaatctttttcttgatttccttgattggctaagtcatggatatggatactgtgaagtcatgcacaacatctggatacacttttctccagcaggaatttattgtttcaggcttgataactttcacagctttttctgtaacaacaatggcatcttcagtggtgtaattcttccagaccttcatgatgttctctctgttggggttctcttccaattcaatcctttccatagtgtatgtgtgtaatgagccttaaaggtccttatgacctcctgatttagagactgaattaaagatgtgtttgggggcaagtagaccacttcgatgcctttggtattgaattcatggggttctgggtggccagaggcattttcctatatcaaaagaactttgaaaggcagtcccttactggcaaagcacttcctgacttcaggaaaaaagcatcaatggaaccartctggaaaaatagttctcattgtccagtccttcttattgtacagccaaaagactgacagctgatgtctatattttccctttaaggctcagggattagcagatttataggtaagggcagacctgaccatcaaccctactgcatttgcacagaacagtagagttagcctatcccttcttgccttaaatcctggtgcttgtttctcttccttactaataaacgtcctttgtgggatatatatatatatwtttttttgttagaatggaacactttcatctgcattaaaaacctgttcaggcagatacattttcctctaggaatttatatgcagcctcttggttggcaggagctgcttcttctgttatcttgacatatttttaaagtttttaaaatttttaattcttaaaattaattaatttttggttttttagagacagcatcttgctctgtcaccaagctggagtacagtggcaccattatagctcactgtaacctcaaactccttggctcaaccagtcttctcacctcagccttctaagtagctaggactacagacatgtgccaaccatactcggctaatttttaaaacaatttttgatagagatggggatctcactgtgtttttcagactggtttcgaacacctggcctcaagaggtcctcccactttggcctcccaaaatgctgggattacaaacataagccaccgtgcctggtctatattggcattttaaaagccaaacctctttgtaaaattatcaaagcatcttttattggcattaaattctccaactttagattcttcaccttcttttttctttaagttgtcatataatgactttgctttttcttgaatcttagagtctagaatctattcttgctttatcttgaatattagagtctagaatcatattagagcaatcctgcacccacataaaagctgcattttcaatatgagataaaaggtatttcggaaaaagtgcaaggttttggcacttgctgtcatagctgcaatgacaaatggcttcacaaattttctttccctttttttttaacagtcatctttatgtgtcatttatcttgaaatgaagataattgaagctgcagacctcaatctatgacacatatcaagcaattcaactttttcttgtctggacttttctctgctttttgggagcactcccagatcactattagttctttgtatgggtccaatggtgttattcaaggtttatgatatcgtgctaaacatgatgaaaaacatatgagaactgcaagagatcactttttactgcaatgtgcaatttactggagaaactgcttacgtggagatgattagtgtcatgagaaatttaagcagatatttacaatacttgagcaacaggaggcggctacaaaattattacagtagtacacaataaactctagttaattttatgcagttatgatttaataccacatctttacatttgtttacatttctcttaactgtcaatggcaccatgtttggtctgtaagtgtgtgtctaagttttgaaaatgttaactttttatactttgtgtatatttatggtaataaataaaaaaggccaatatctaaatatattttatgcattcatgacatacttaaccttttagtaactttttattatttccagactacagagttggtctgttagtttttctcaaattgttgcaaatctccaacaaatttttcaatgtttattgaaaaaaaatccatgtatgagtggacctgtgcagttcaaacctgtgttgtttaaggaccaactgtatagatttattattgttactatcagggaccattatttattcagctttactatgtattaactacttcgtcattctcactttagaaaaggacacctatacttcagagagagttgagcaaatcctacaaagttttgtagcyagtaagaactgaggtctgcttcatgctaacgccctggtgtctgaccacctccttgttctctgttttggttctgccctggccctcagctgatttctcacatgtgttttggagtgtgacggagtcctgtccggactcagcatcctggcagagaaggccagtgccttgggaggcaggaggaacttccccacctacccggtcatcttcctcctgcgggactgtgggctcagcacattcagtttcggagcttgagtaatcgcctcctggcttccacccacactgggaaggcagcgttgtcgtggactgccactgggctgcttctttgtcagctttgtcctatttagggccataatgaaatcacttgccatctccaggctgagaaatggtcctttagtcttttcccttaatccccagccctcctagggcttctttttcttcaagttgcatttgcacagaactcccagagccacccgtagggcatagctggggaaggcagcccttgacctgtcatgctggtttgtcactctgacaaacagggcttcagggtgcctgagtgcattgagcaggctgggccttggaggagctgcctgaccaggcgaggctgagtgggtgcccctcctttcattccctatccccctccatctactagagattactttcttcaagcactttgtccacatcctttcaaaaatagctttctgccttcagccggaaggcctcagtgtgttctagagacttctctcttgttaaccttctttccctagcaaagcactgaaaagcatggcctgtggtgtcagacacacctggttagactccaaccctcacgcttcctagctctcgttcagccttgggcaagttacttgacttctttaccacaattccctgttctgttaaatggcagtagtgccaacttcaaaggattttcagtacagtacctacagcatacaagcgtgcaatcggcgctagctatcatttcaatcagctgttctcagcaaggtgaagtgaaatctgaaatagttcactggaagatgtgaacagcaataggttttaccttcccagagagaaacatcctttgccagtcaatccttaaatccttctttggtggtgggatgggaaagaaccacattgtaccttcctttcttccccctggtgggagcaggtgagagaagctggcaacagttggctgggcctgcttccagcgtccagtcttttccattcccttttgtattcacccaatgccagagggaaggggcaagaggtttggaagccatttttaaaggtttttcacccgaggattcgatactattttctttgctgaggatccgtcatgcctaatggaactgccatctctagaagttcagtaagttatatcctctgcatctccctcctcagaagagacttttttgttctgggatgaaaggaaactggcccagcctggaaagatgtgcaccccatgaagtccttcctattccctgtgtccccaggtcagacaaggcactggacttttcctagtggttccccagcctggctgcgcgtcagaatcaggcagggaggctttcatgtgcacactggtcccatctggccaaggcctgggtgcagtgtcagctctttattcatctggctcctatgttttctccagaaccctttgtggaaacatctgtctcttacttagaatccaggtcaaatgtttgtcccactggccaagtaactttctccttcttctgggacttcctgagtggtgttctagccttcttcttgctgggttagacagtcatcgtgtgtctgactccctcgaggatggagctccctgtgggagggagtgtgggttacccatctttgcattcctagcatctattagtttggggcaaaagtaattgtggtttttgccattgcttttttattttgtggggggtgggggtaaatggaatccctctctgtcacccaggctagagtccagtggtgcgatcttggctgaccacaacttctacctcttgggttcaaacaattctcctgcctcagcctcctgagtaactgggattacaggcacccaccacgagggtttcaccatgctggccaggctggcctcaaactcttgacctcaggtgatccacccgcctcggcctcccaaaatgctgggattacaggcgtgagccaccgtgcccggcctgccattgctttttaagggcaaaaaccacaatgacttttgcaacaacctaatagcagtggctggtactcagtaggcaccactaaaggtttgcacgaaacgtaatgtatgttttcaaatcacttcttgatattttaccttctagtgcactgcttaagatacagcagatttccattaaaaacttttcacctgaatgtggaggacacagctgagtggcctccattctctaaagccatgccatttgtcagacgtttacctttcttcatcagcccttttcctcatctgccagcatttcccatgagaaaacagtgtggtctgcagtaccctttgcagtgcttggcccagattctccagatttgaaaacatttagcttgtaaagaatagattcactgtttccttcccatctgctgcatcttttgtgcctgttgttcattgagcttttgtattcagcttgaagtaggggatggaagaaccctaacaaacaaaaaaggacaattagaaaaatagtgtctttgacttattctctggaagcctccttcaaaggataaagtaattccctgagaaaagcgttgtgcaggtgtgaattcggtctgggtggaacaagggtatttaccgatgttcttagaagctgcacagccaccttaggcatggtctcctgggtagcacatgctccagctgtccacaggccattcctttcttcacactcacctcccaggaaaactgcagcagctcctcattgcccttgggaatccaggagttatttattggggatgtttaaagactttcctgatgtatcttcaacttgtcagcttccacatttccccattcaaagctctagaggttacagagggaagtacagagactttagggaaattttaaacattctccatcgagagaaggtggggagctgagtcctggtcccatgtgctggccaacatctccccttccagcctctgtcctggcctggctgccacatatcaccctccttytcctctctcaattatccttgccccagggccctctttggtttcaaaccattcctgcctttctctggacactctcccctgaggagtagactaggcagtcccatgttttccgtgttaactacagaggcacagattggaacaagtgccaaggaattaggccacctaccgagccttcctcttgcctctstctgactctccatcctgagggaagacgattgcagtcgtttttgttggaaatgacctgacctgtgggagcagcccrttcctggcctttcaaagtcaagtcrccttactcatggcctagctcctgatcactcctggtgggtgaaaagtgcctcaacatacctaaagagctgtgacatgagcaggaaagcccctctttctagaaagtgttgggcaccatcagtacagcagagccactgcatcgtacagcgcccggtcaccattctcacgtacagttaccatgagatgatgatggtgcctgtagttacacatttttcaactataatttaatgataaattaattttggtaattataattgtcacttacactgcagtttataattttggatttttaatgatcaattttcatattttcccagctggattatcatcctcttcattgaagccaagaagcctgtgcataagacgctgtatctaccacaatgccttccacttacatttttcgtagtaaatttagtcttgttaatattgcattaaaatgaacctttgaaggcaaagatgagcacataaagcagccctaatcttgtccagtttgctttctattttctccccatgggtagaagttcacctgcatggccctggcatttctattttgtgattagaaaatcacaccagccatacatgatgtttcacttctgtaatccccgcactttgagaggccaaggcgagagaatcacttgaggccaggagtttgagaccagcctgggcaacatagtaagacctcatctctatgaaaagttttttaaaaaattggctggatgttgtggtacacacctgtaatcccagttcttcaggggcctgaggtgggaggatcacttgagtccaggagtttgaggctgcagtgagcagtcatgccactgyactccagtctaggtgatagaatgagaccttttctctcttaaaaaaaaaaaaagttatgggaatcattttatactcttggcctggggtcctgctattttaacaacacgarggtatagcacccccaggttgtacaactccagggagtaccaygtatattttcatgtatgtgagcagtgccttccggagtagtctacggaagctaccttgcagcagaactgtcatttaaaaacaatttgctagttatcaaatctatattaggacattagcagaaatgaacatttgtcaattcacttatagtcttatcatctggacaaatcattcttctcatttttccttggtattttacactcctctttggtgtacattaattttgcayagctgtaatttagagtagtctataattttgtattttgcttttttttcctttgcaaggtataagcttttctatgctgtcactgtccttgtcatggttgatggataattattataccaagtggatttcaatgaattatttgaccacttgacaattagcttatttccagtttttcactgttataaagaatgagcagagggcaaaggaagctctcatttgttcactgtgacccgtgtgtcagtcactatactggatacttacctcacttattcctcttaacaattatttttggaactgagacgcagactggttaagcaacttaatagtatgagttgatatatagtgaactcttactgtgtgtcagactctttgctacctacttttcatataatatctcatatctcactgtgtcctataaaatgtgtattatcatttctactcttcagggaattatattaattttaggagatgtttccccaaggtgtcatgttagaacttggagaggacagagttgagcctaggtttgtttgagctgtctaaaactcatgatcgggctgggcgtggtggctcacacctgtaaaccccgcactttgggaagccgaggtgggtggatcgcttgagtccaggagtttgagaccagcctgggaacatggtgaaacactgtctctacaaaaaacacaaaaattagctgggtgtgktggtgcacgcctgaaatcccaactactcaggaggttgagatggaaggatcacttgagcccagaaggtggaggttgctgtgagcagagatcacgccactgcactccatcctgggtcacagagcaacatcctatctcaatcaatcaatcaatcaaataagtggataaaactcatggtcagtataatgtcagctccatggaggtactttttttcctcttgtttttgttctctgctgtgttctcagtgctgagaagaaggcctggcacatagttggtactcaataaaggcttgtttcatgaataactgaatggtctcagcgttaggtaagcagcttgaggtcaggtttctttggctcccacatctttgttttttctgctatatcactgtctcgggtacaggtgagtagaaaataaattctcacaggcagacacagacacatatatttatgaatttgtgtgtgtgagcctttttatctatttaacttttaytcagctttaaaaatttttattaaattttattttttaaagcagttttaagttcatagcaaaattgagtggaaggtacagagatttcccatacaccctctgcccccacactcccctgttatgaacatccctcacagagtggaattgtaattgttacagctgatgaacctacattcacacaaagtcygtagtttacattagggttcccttttttttttttttttgagactgagtctccctctgtcccctaggctggagtgcagcagtgcaatctyggctcactgcaacctctgcctcccgggttcaagcaattctcctgcctcagcttcctgaatagctgggattacaggtgtggggcaccacacccagctaccttttttgtatttttagtagagacagggtttcgccatgttggccaggctagtctcgaactactgacctcaagtgatccacttgcctcagcctcccaaagtgctgggattgcaggcatgaaccaccacacccggccactacagttcactcttgatgttgtatattctatagttttggacaaatgtatgatggcatgtgtctacctctatagtatcatgcagagtagtcttactgccctgaaaaatcctctttgctctgtctatgaattccttcctccctcctaacccctggcaaccaggatcttttttactctctctatagttttgtcttttccagcatgtcatatagaatgcagcctttacagatcttggtaatatgtatttaaggttcctctacatctttttgtggcttgatagctcatttccttttagggctgagtaatactccattgtctggatgtagcacagtttagttacgcattcatttactggagcacatcttggttgcttctaaattttggcaattatgagtaaaactactatagacatctgtatgcaggtttttgtgtagatgtaagttttcaactcctttgggtaaaataccaaggaatgtgattgctggattatatggtaagagtatgtttagttttgtaagaaactgccaaacttttccagtgtggtgctaccagtttgcatttccaccagcaatgaatgagagttcctgttcctccacatcctcttcagcagttggtgttttcagcgtttttggatgttgctcattctgatacgtgtatagtgatgtctcattatgtgtgatctttttctttcctttkgtttattttgttaggaattattgtgagaaatgcaattacgaaagcaaattgtaaaaacattttataagaaaaaaattgtaaaaacattttataatttcttaaaaatatattgatttttgtttttgctgcttacataagtgtgtcttgttagtggacatgcaaaaaatggtccagtttcactgctaccttgccagtgctgttttaaaaaaattctttactaacattatatgtgagtacatcactatgtcaatctttcaatttatttctagttcattatttscttatggatcttttacgaatgttctatttagcaagatatcatatttgttttgaagcttggtgctactgcctcctaaacaatgaatgtttttcaggtcccaaaccagttgtcttcctgcaacatggcttgctggcagattctagtaacwgggtcacaaaccttgccaacagcagcctgggcttcattcttgctgatgctggttttgacgtgtrgatgggcaacagcagaggaaatacctggtctcggaaacvtaagacactctcagtttctcaggatgaattctgggctttcaggtatatatgaattgataatggcatggatgtatttccttagtactcttaaagcagacaacaggcttccagcagaagaggtagataggtggtaactctgaagttgtatgagaggggaagttagtgtcttttgaaaggttttaaatgttgctaggaatttaatgactagcagtaaggtaaattataagtaaatgattacattaagatttacatttagttaggaattcttaagttacttcggcatttctggtggtgtgggtgctgctgggtaaacgttattccataactttcctcctttctccataaatatgtaatccagatgttcacttttcttctttccagaaattatcctttcctccctcttccttctggctccaccagttaattgctgtatgmcattggacatcttacataagcctcctgtgtctcggtttccttatttgtaaaatggagcgtaataaacacctacctcataaggtcactgggggcttaaaggagaggrtgcagagaaggaacctccacagaacctggcaccttgtatgaactggctaggggttggctcttctcctgccagtggcaacatgcgcatgcatatacccatacgcacacttgggttttggtctatgttttggtaccaggtattagagaaagtcagcagcactatagcagcctccgggcttgcttcccatttttaaaaccagaggcacctctaaggacatgaaacacaagaatgagagcttttaacaaaaggcatatacaagaattggtttattgtcacgctatttgtaacaacggaaaacaggaaactacccaaatgcatgtcagcagtgaatggataaagtgttgtatatttatatagtagaataagaatgaacaacttacaattatatgcagcaaaaaatggattaagccagatacaggagaatacacattgtataattctacttacagaratatttaaaaacaggcgaaactaatttctggtgtgaaaaatgaggacaatagttacttttgggagacacaactggaagagagcccaagggggcttctgcagtcctgctggtgktgtttcctggactcactgctggttttcccagctgtgtttagtttgtgataactcatcaaactgcatactcagtatgtgtgtgctctattttatgtactatttcaatgaaagagttcctttcttggattacagttatgawgagatggcaaaatatgacctaccagcttccattaacttcattctgaataaaactggccaagaacaagtgtattatgtgggtcattctcaaggcaccactataggtatgtatgtaaataagatcagaagttgatataaattcttcattacagagtttgtacttttcttaaaagtgaaatataaaaagatgttagttcaaattccatttatttttaaatgccaaacagaaataatgaataagataaggaatgttggtaacatttagtcttctatgaaaattcatgtatatggttgaaattgaagaaattaatgtaagccacaatatattacatgttttcctagatgaagcaagatagggatgtgagagagtagaaaacaagtagtttctaagttcagagacttacataaagaaaacaagaaaatatactgccttctgaagttaagtggaatataactaactacaggtacatttggtttacaaaaaattttgaaaagttatatgcattttaatttatgctgattatataagtaatgcatgttcactgtagaaaaacagaagaacagaagatttagcaaaattaaagaaaataaaaattgcccataattctagtcagcaagagtttttgtaattagggactaggaacctgtcctataatttatttaattctcccttttaatgtttactatgactarcaccttagtgttcccatcacatgctttccttacaatatattcctagaaggagccttactatatgaaaggtatgaatgttttgaagggtctcaaaacatgtggttatattgccagraaaaaaatggagttaggcatttttctttatttatatttcttctttcatgacttgcctgcttgggacctttgccccactgcttcctaaagtgacattctggggccaggtggcaagacgtcagagagggttgtattaattcgttttcatgccactactaaagacatacccgagactgggcaatttataaagaaaaagaggtttaatggactcacagtttaatggattgtgagctagggaggccttacaataatgacggaagagcaaggaacatcttacatggtggcagacaagagagagtgagagccaagtgagggagtttccccttataaaaccatcaaatctcaagagacttactcactaccacaagaacagtatggggggaaccgcctccgtgattcaattatctcccaccaggtccctcccacaacacatgggaattatgggaactacaattaaagatgagatttgggtgggaacacacccaaaccatatcaagggttaaaatatattttaaagctaggggattctaaatgtgtgagttcctttgaaatcattggtggtttatttcaacgtggtgtctgtaaattgttctttgggggaggggcatgggggagataaaggtgatggggtgaggctcttggaaatagtctgttatttacattgtaaaaggaactgggaagattttctgattctcccagactggatttcttccagtgcttatctaggttgagatttggagcaagcattaacaaatgcttgatttactagtttaaccaaattcagtgttagggcacacggaagttcagagtgccccatgtcaagtgttttggctcctgctggtggtattgtttgcgtgggtctcaggcctccgcgagagggcgtcgcgagtgacggcctttgtgttttctgagaaggaaatcccagatgatggaattcctgttttctgtcctttgttctyacaggttttatagcattttcacagatccctgagctggctaaaaggattaaaatgttttttgcccygggtcytgtggcttccgtcgccttctgtactagccctatggccaaattaggacgattaccagatcatctcattaaggtacttggacccctcccatccctctcctctccccgcagatttcctcctgagatctgaagaamtggcaaggggagggataatctgtgccttcctcccctgcgttttgatatcagtggarcagtgggcttttctttttccgtttacccctccttccagacccaggggtggccggggacgcctgtcgtttcctgcrcactggtgccacgtgtactcatggttagcatgygtcagtacagctctgcccacctcacagggagagcaaggagagtctgggagaaaataatttaagcatttgtggagttgccctttatcccatgaggtgagcctgtgcacagaggatgtaggagatgggagataggaaatgttcccaaaagcccatccctagctacactgagggtgacctaacaacgctatcattattgtattttataatatggctcctaaacacagccagtagcttcatcagggctctgccctaaagctgtggcacccgaacctctgttcagggaggaaatagatttcatgaaaaagagttttaagctaggtaagaccagatgttctattatgcatgcattatatgtcttttatgaaatatatgttcacacacacacatatgaaatcctgtatagaaatatatacatgaaatgaggtataacgtctctcatgggccatttagaagacttaaataggaaagatggaatctcctaggcttaggcagtccttctgccttggcctctcaaagtgctgggattacaggcatgagctaccatgcctggccaataaaaaaaattttaaaaaacaaaataaaaaagcaagcgatgggctggatttggcctgctggccagtagcattgaattagatgggcacacctctggcagacattactgatcaatcacagccttgactgtttcttagaagtaaccaccgatccatcagagtcagatgaaaattacttggggatggccctgggaggggtgatcattaaggccctttcccactgtagaagtccgctgaaaacttatttgattttctgcctccttctcttcatttggagaatttaaatacacctctgtagtgtgtgatttttgctttggtaaacttgtgcaaaagcatcctgatttgatgtccactggttgccattctctcctgaggccattcgtggagacattgggtacttgtctctgcttctgaggtgagtcacggagacttatgcaccagartgaaatgctgagatgttcttgggtttctttttattttgtaggacttatttggagacaaagaatttcttccccagagtgcgtttttgaagtggctgggtacccacgtttgcactcatgtcatactgaaggagctctgtggaaatctctgttttcttctgtgtggatttaatgagagaaatttaaatatggtatgcatgtttatagtaagatttgatttttttttttatctgtgaatgtgcttatttgtgttgaatgatatgggagaggtgggaatgacctcatcagaactctaaagagtctttcatttgagaggcacaagcatgaactttggccaatgcctagaatacggtaccacctgctgccatcctcaggctgactgtggtcaccttcttatgttgtacctagatggagattattgaatgaggagatctgtcacaaattaagctgtaatatttataattactctagtgatttgtttcttttagaaatcattataagtataaacataaagatgggaacaatagacagtggggactccaaaaggaaggagggagagggacaagggctgaagaacttcctgttgagtactatagccaatattgagtactgtggttatgggatcaatagaagcccgcatctcagcatcatgcaatccacccttgtaacaaacctgcacatggaccccccgaatctaaaatacacaaattttcaaaaattactataagtatttaaatttggaacggccatttacatacacataagtgtatgcttgcagtgtgtgtgtatttataaaagtacattttataaaatgtaaacccattttattttataaaatataaacccttggccaatactatgcccgtgtttctaaatatgtttgttagtttgtcatgtggcattttgaaaaaaagggttaaaatcctggaataaaggccctaaggaatttcagtgccatttttcttttgtctgataattaaagcaaggtgtgattgttatatgaaatttgggaaattcaggaaagcatgaagaacaaaatgaaaatgccctgtaaacgaaacccacacagtcccgtgcttaccatgttgttgcacctccttcatatggactttgtatgtggttgtatgtatttttatagggcagatttttagtcaaataatttttttctacctctcatctcacatacttgagattatggctctagtttttagtgctttgaagggcaaaatacaatgtttattatcaatgccaccttaatgctgttttcattcttcatttcaatgtatttattttgcagtctagagtggatgtatatacaacacattctcctgctggaacttctgtgcaaaacatgttacactggagccaggtaggcattccaggagtgcatttggggttcatgtaaaatcaacatcagaaaggtctgggcatgcaaaccctttccaaatagaaagacaacctgcttacaaatctgatctggttttcttccccagagtcctgggtttttgtcatcgtgcttgtgttgcttttgatacctgtggtggggcacactgtgttatacgtgggttcacaaacagctactggggttgacatttttcttttccctcctctcccttcctcaagtctcaggttaatatattctctccctttccttctcccccagctttcttttcctcctcctgtttcctcccctccatctgcttctcattgagtcctagatttttttttatttctgtgttgcttcataaagagtgattttaaatccgttttggagatagaaaccgctgtttcaacactaacccctgatcacaatatgcttggaatagcagtgaataaactggagctaaaccaatgatagatgtgaatgggggcccctgacttttgaaatacagttttgattattttatcatgtaaataagtcatgttcattctagaaaatttagaaactacatctagaaaaaaattatcttaaaatgaaaataaaatcattctataaccctagacagagaggaaatgcatatccatagatattgaatgtctctgcattctattctatacctcttttcaaaaagatgctgttaaagacatggatagaaatagtagatgtagaaatagattgatttttctcctgcttactgttttacagcttgcttttcttttttcacctgacaatatgtcagggacttctttctacctcaggacataattttgtgccatttatttttcagctaacttcatttttaatatgaaacaactcaccatttaagccctaaaccaagacactgtaggtgtcttgaatagtaatttccaaacacctggcagtcactgcttgcatcagaatcaccaaattgctttaaaaagtacactrtttaataaatcattgcattaaaaaagtaatgagagttggaattatagtggaattcttggattggctaccatccaggcttataaaacaaatactcctgtgtcccaatcatttggactagagaatctgtacttttattttttcgttttattttatttttttgagatggactctcactctgttgccaggctggagtgtagtggtgcgatcttggctcactgcaacctccgcctcccagcttcatgtgattctcctgcctcagcctcccgagtcgttttattatttaaaaaaaaatttttttattgaggtataagtgacatagaatatttaaagtatacaatttgatatatttcagtgtttgtatacacctgtgaaaccatcaccataatcgacacagcaaatatatcatcatcctaaaaggtccctgctgcccctttgtgatacctccccccatccctcccctcaatcccactgatctgcttcctgtcattgtagcttagtttgcattttctagagcttgcatgagaacagtcatgcagtttatacttgtttttgtctggcttcttccactcagaatacttgttttgaaattttcctatgttgtgtatgtcagtagttcattcctttttatttctgaggatctgcatttttaaaaaatctgcctggtagattcttttgctccaccaggtttgggagcagacctgttcgggacatcctgatactttcatctccttcttcagttgccccaggaactctaacagtgctatagttctcctttccctggggctcgtctctaaggaactaggaagagcctggcctgaggctcctggtcctttatagtaactagaaggctgagagttaaatgtcagttcctcaggggcagagtttgttgtggcctaaaagaggggcatctggaatgcaaatagttcatgacgtgctgaacagcacatgcttaccacttaaggaatgcccccaaaccttcaaaaatcctcaaattcacaaagattgaggattttcgttcttggttcaggtctctgcttttctccttggtcacatttatgcttatagtcacttgttttcttcatataccctgtcactagaattcccctacatttttgaggatgcctaggacctcttacctaatggacattttcctaaaaggcccaatgtctgtcacctcatcagttattgcacccccagagatgayggagggtgactgagctggctggaggcagatcctgagctttcccaccagcttagtgactgccagcagcccacacacagtacacgccaggcctcagcaaagtacaaatggccaccagacctgggaygtcagaggcccttgggaatgttgaaaccaaggctgtcytaggccaactctattttatattacagacctgtgttgcttcacccttctgtgtcttgggcctccactggkcatggggtttgcagtagagacattggatcggctatcatctaggctactggtcttgttccagccctcttatccagcagcttgccagggtcaaaggctgcagggtgagggccagagcactgctctgtgccccatttgtgacctggtgactttagattctaactaccctggaatatacctccagaatatttgcaaagcccagatttgctgtacaaggcagcctgggcctttgctcttctacccgctgtaccatcttttgtcagtaaaatggttggttgctttgtgcagccattgtatcggatcttccctttggctttccctcctctgggctgttggccaggggctgccactggtgcaggctgcaggctccaagaggcagtgcaggaaaaggcttctgtggaagctgggcaggcctggatgccgggcaggctggggctagaattcaggtgtggcattagagggctcttatggtatgagtttggggttgaccttaaaggccattttgtttacagtccattcagaagtttactttttgtttaaataattaggattaacttgttaataaattccataccttgttctttagcgggattttaaatatagcatactcatctttccattctccttataaacctgatgaatttcggagctccccagagccaagacttgatattacttctcactttctcactggccctgcccagagcccaggtactctcacctgtttgaagaaggccatcccagtgtagttttccagtgttgttctgacctacctaaggtgctattaaaaatactggttcttgggcctgtctgagacctgtggagactctgaattcctagggctgtgaccctgggatctatgtttgagttaagtgccttagatgattacgatgtgctcttttttttttctttaaaggaaaaaacatacttttggtaggcttttaaagaacactgtaaaaaggatattcagtataatttttgttaaacatgtaatatgttttatgaaattttagaaaatacatgagtgaaagaaaaatgacttgtatgtctagcacccagcaatagccactattaatattttggtataatcttacagttttgtaatataatcatttccattacaaaagtcagatcatactacatctgcttttatgtaaattttcatttaaagaaatgccattatatttgttagatacaagttaagctgttgtattagagaccccaaaatacagctgctaaataaagagtttatttctttctcataataaagttcagagagaggtggcccagactgatgatagagggggttttggctgtgttccatgaggccatgcagggacccagttccctccatactatagctctgccatcctcggggtgttgtcctcttctgcctggttgcagcccggtcacctccatgtctcttccaactcacaggaaggcaggggagagggagctcagggcaagtgactttgtgcgaaggagatagcttagaagtgagcggtatggccatagcctggctgctcgcaggaggatgaggatgtggtttctatcttggcagccatgtrcttagggaaagctttagggattctgttactgaaaggaagaaggcaagaatgggaatgggtggcagtctctgccataattaaaaatgcctttccgggtcagtaactaaagttttaaaatatttgtcataaagggcagtttctgttgcttgaattttattatcattttgttttttgcagtgatagttgttttgcagtcataaatcatctgtccttatatgttagagtgttttcttaggatgatacatttatagcagtagacttagtaagggagagkgtaggcatagctttaagacttctaatacatattgtactttagaaaagttgaacccgtttacatttttattaccattcaagacctaaatataatttttaaatgtcattttaaaacggtttatcctaatactataggcatttcctcctgatcattatctacatatactctgtgatatgattatcacagaagtataaccttagtgtatatttggtttcatttttttccacttagtattatttatgagattatctgtaagccattttctgtttstattttatttatatttatgacagtggcatacyccttgtgtatatttatgtaacatatttacccaaatatctattatttgaaatggtaagttttggccacaaggtggcgcccggtaaaaagaaatgcccagacattctcttcaaaactgcttttggtttatgtgaagtctgttcttatcaactgcatacaattctactgtttgatgtaataaaacacagagcgagatgatatactacaagggattgttacttattaaaattgggctttagcttatttccaggtttttgttactggaaatcatcttaatacttttcttttgaaatatcctttcaagtggatagcttgaagtcctaagtgacttagcacaaagtcaaatttagaacttcagtctgagctataggcaagtttcacctttgtattctgtgctcacgctggtgcttcatatgaatgctgaaggacatgtgacaaagtgatgaactgctgtctgtgttcagtggcagaatagtttgcatcaatatattttcactgacaaagatggggaacagatgtaccaacaggtgctgtgaatccaaattttgttttgcttgttaaatatgccacaggtatttaatatcagtcatttgcaacggcaaaaacagatgccaaatatttctcctgtaacaatcccctatagtatatcatctcactctgtcttttattacatcaaacagtagaattgtatgcagttgattagaacagacttcacataaatcaaaagcagttttgacaaagaatgtctgagcatttctttttaccaggcgccaccttgtggccaaaacttaccatttcaaattcatttggcttgccaattttgtgtttaatttttgacatacatttaatttgagagtgtagaggaaatatggatttgcactattttgaattttaaaaataagtgacattttgctaatattttatattatactattttaaatatgaataaatgtaaatttcaatacaatttcaatttcatggctctagtatccctaactagttagaattgtgctggcatgcagtactacttggtgattatactgataccagtactcaagaaaaagtgtttaatcaataccatcattaaaatttgactaatataactagacaagtagaatgggtaaatagaaaatatacagtcatccctcaagtatctttggggactggctgcagacatcatccccaaaccaaaattcacagatactcaagtcccttatataaaatgatgtagtatttgcatatagcctatgcatatcctttcatatgctttaaatcatctctagattacttatgatgcttaatacaatgtaaacgctatgtaagtaggtgttacactgttttaaaatttgtattttttattgttttattatcttttattgtttttttccaaatattttccatctgcaaaatatcacttggctgaatccacagatacaaaactggatatggagggccaattgtatattataattattttatctatatatatccatctctctctctctctctctattwtatatatatatatgtatatatatatgtagctacctatctgtctacctttatttcccaagtaaaatgactaactctttgaaaaagcttaggatgcaaatttcagcagaaaatgtcagcataaagttccgctagcaggagcaactgttgatctagtataattgacagcatatgtgcatagctgctttcttgtgtcaggtggtagctgcttaacaatcatacaatgagaaattgagtcattcagtaaagcaggacaaaaccatgccatctcatttaaaataatgccttggaaatgaagagtaaatctggatattggtataaagttgatttccgaggttgtggctagctccagcaacctatgatgttatctctaactttggtgtcagataactcttttccaaattatcttctttttaggctgttaaattccaaaagtttcaagcctttgactggggaagcagtgccaagaattattttcattacaaccaggtaaagtttttagtcttttcattaaagggggccctgaaaactcatyaagaaagccagcctggcctatcaggattctggccaggctcaggtgctgtgggaaatgtttgcaggagttgactagtgtttgttttccatcagtccattcagaacaatccaagctttgtagctggtgttgtggactgggcctcctctctttgtcctttccccagctctaaataagaatcatcactgttatgcattactcagagtaatcacgaacatagcctgtagagtcagacagtcctatgtctgttatctggtagctatggggccttggccagattacattgcttaagcctcttccctgcactaataaaattagcatttttgagcrtgctaaatgcactgaagtgtgaggcactttgctctgttttttaaatttaattcccagagcatctctgtgatgtaaacgtgattatctctgacttaaacatgaggacagtgaggcttagagaatttctgtgacttgtcttacacccaaagggaagaagtaggagggcatgaccccaaactctttccagccactattgccttgagtctactacctatggagtacaacaccttccttgccggggattaaacattcattttggtgcccagcctacggcagcarctccacagctagtggcgattataattagcattctctcatttggggttagatttctttttttgtgccggtaatggcaacttgaaaagatactcaaagagattttaaaaatttagtctgttagtcaaacttactagacaatgtttaatggagattgcgcttattgtgattttgaaaattaaaacaacaacaacaacgaggctttctctggttccttttcattgtagagttawcctcccacatacaatgtgaaggacatgcttgtgccgactgcagtctggagcrggggtcacgactggcttgcagatgtctacgacgtcaatatcttacygactcagatcaccaacttggtgttccatgagagcattccggaatgggagcatcttgacttcatttggggcctggatgccccttggaggctttataataaaattattaatctaatgaggaaatatcagtgaaagctggacttgagctgtgtaccaccaagtcaatgattatgtcatgtgaaaatgtgtttgcttcatttctgtaaaacacttgtttttctttcccaggtcttttgtttttttatatccaagaaaatgataactttgaagatgcccagttcactctagtttcaattagaaacatactagctattttttctttaattagggctggaataggaagccagtgtctcaaccatagtattgtctctttaagtcttttaaatatcactgatgtgtaaaaaggtcattatatccattctgtttttaaaatttaaaatatattgactttttgcccttcataggacaaagtaatatatgtgttggaattttaaaattgtgttgtcattggtaaatctgtcactgacttaagcgaggtataaaagtacgcagttttcatgtccttgccttaaagagctctctagtctaacggtcttgtagttagagatctaaatgacattttatcatgttttcctgcagcaggtgcatagtcaaatccagaaatatcacagctgtgccagtaataaggatgctaacaattaattttatcaaacctaactgtgacagctgtgatttgacacgttttaattgctcaggttaaatgaaatagttttccggcgtcttcaaaaacaaattgcactgataaaacaaaaacaaaagtatgttttaaatgctttgaagactgatacactcaaccatctatattcatgagctctcaatttcatggcaggccatagttctacttatctgagaagcaaatccctgtggagactataccactattttttctgagattaatgtactcttggagcccgctactgtcgttattgatcacatctgtgtgaagccaaagccccgtggttgcccatgagaagtgtcctwgttcattttcacccaaatgaagtgtgaacgtgatgttttcggatgcaaactcagctcagggattcattttgtgtcttagttttatatgcatccttatttttaatacacctgcttcacgtccctatgttgggaagtccatatttgtctgcttttcttgcagcatcatttccttacaatactgtcyggtggacaaaatgacaattgatatgtttttctgatataattactttagctgcactaacagtacaatgcttgttaatggttaatataggcagggcgaatactactttgtaacttttaaagtcttaaacttttcaataaaattgagtgagacttataggcccaaagaattgtgtgtatgttttttctcttttatttaacagtcatccggttcttccctttctctcttggcagtacttggaactcttctcaaggttaatgtgtttactccgggaaatgaagggctaccaagtaacgagtgatttttaaaaatcatttttttgtatgccacaagagggcactcttggctttgcttgcaaatcttcccacgctctcttccctcactacttcttttcttttcttttcttttcttttcttttcttttcttttcttttattattattatactttaagttttagggtacatgtgcacaatgtgcaggttagttacatatgtatacatgtgccatgctggtgtgctgcacccattaactcgtcatttagcattatctcctaaagctatccctcctacctccccccaccccacaacagtccccagagtgtgatgttccccttcctgtgtccatgtgttctcattgttcaattcccacctatgagtgagaatatgcggtgtttggtttttttttcttgggatagtttactgagattgatgatttccaatttcatccacgtccctacaaaggacatgaactcatcattttttatggctgcatagcattccatggtgtatatgtgccacattttcttaatccagtctatcattgttggacatttgggttggttccaagtctttgctattgtgaatagtgccgcaataaacatacgtgtgcatgtgtctttatagcagcatgatttatagtcctttgggtatatacccagtaatgggatggctgggtcaaatggtatttctagttctagatccctgaggaatcgccacactgacttccacaatggttgaactagtttacagtcccaccaacagtgtaaaagtgttcctatttctccacatcctctccagcacccgttgtttcctgactttgtaatgatttccattctaactggtgtgagatggtatctcattgtggttttgattttcattcctctgatggccagtgatggtgagcattttttcatgtgttttttggctgcataaatgccttcttttgagaagtgtctgttcatgtcctcactactttttctaagattttctccagcatctaccagggaaggtagagaactttgttgctttctgagccagttggaatttgatggccagccatggtagtattatttctgttcaggagtataattaattcttgcctagtggataacatctggaaaacgttctcaaggaatacctgcccctcaaatgtaaactgaaaataaaaatttgcctaataggtaaatgagtgatcagaacttcagatgtggttgggggatgggtggcaggaggaaaaggttttaactcaggcctcacacatatataggactgaaatttagactagtgacatccccaaataatgattattttgtgtttgtgggtattaaaggtgttaattttttaaatataaacattaaaaatacactgtaatgtgatttcttgtcattaattttttaatgtattaagagattttcaaaagataagtcactctgatctgttgtgacactgaaaggcaactttgaatagtaattattctgatttttaaaaagttacccaatcagtatttcattatgttgcgctaggtgcagatttgaacttcaattccaaattaagcaagcaaaactctttgtcaaattgtcttagcattactgaaaataatacttcacattttgtrttgtgccttacggggtttcaaagccttttcataaagctttaatatttgcaataatccctttgacaggtgaggcgagcatttgtttctctacaggcaagggaatgcctttttaatggggatgattttatatgccttaaaagtttcagagaggttgatgagagtttcaacagtataagtgagtagaagcgcccacttaaatgcgacatgtaagtggatcagaatagaaagtgtttaaaaccaaatatgcaccagtatttggactaataggagcatcaggagagtgtctggaggaagctaacatccccatgttctttatcagcatctcctattgtttttggcacggctaattaatgttttctgagtcttttgtaaagtgtcacataaaagcagcttcaatgaccccttccaataccaaactcctcctgaagagatacttaccttggaaccaaccctggcccttttctgctcagtttggctgtaacttgctttttatccctagctagccttgtcttgacttttctgagactgaatttttaatcttcagtctttaaaatgaaggattagattttgatattcgagatcattccacctctatgagtcttccctgttacacaacactacacatctctaatagccaggaacagttttgattaaacagatgcccaaatggccttacctaatttgagaaagaaaaagaaattcataaaggtcatttaaaaaagggattatgtgattgatggcaggctttgctaactacatgttctatttgctgggggaaggggagcagcatccacagtcttttggtaagttggtgccacataactttgagattgtgatgagtgtgcacaaacttgactgttgtactctcagaaaagtgatttgacccctgtgataagcagaaaataaaagattcctgtcctccaactccgccagaaaaaccatactaagataaaaaccatatgcaggaagccatgatcaactggagaagagatggcgtggccaaagttctaatgctacctgtcagaaaacacccccttttgcggaaaaccatcaattggacaagaaatggtgtggccaaagttctaatcagaaaacaccccgttttagggaaaaccatctttacaggtgggtagatccaaactacatcaagcagtactccagaaaaaaaaaaaagatttgttttttagcctcaatttagagctaatgtcctttaaaatgaatcttgagtccacaaatatcttttgaacactcattacatacaagatgcaatgcttggcactgtgagaagaagtcctagaagatacaccctgtgctctaaaaagacctattcatctagcaagctattacatttttgtgcaaataaaaactgtttaaaggtgcgcatgtgccaaattcaagaaatgataccaccttagtcagcacttgatagtgttcaattttattttggtccattaagtgatgctgtttttggttacctgacatattgttcagcattccacatgatatagagtggagaactaacaggactgtaattcatcaatttccctgggatggttgcatttgtatgttagacaaaaacttctgtcctggtcagctgcaagtgcagagatggcagagaagctagttgctatccttcaaagtgccacaaagtcacgggggagagtatggacaaagcaggctgaagccagcgctctcaagttttgctgcccacggccttctgtaattggcacatggacattattctaacagcgatagacggtggatacaccaaagcagaaaatgaatgggttggttggggctggggactcaaaggagacagtcttgacagcaaatctagcagctaaatccaaattaagcaaacctgctaatgccactcacttaaaaaaaaaatctttcttgctctcgcaaccagagcacccaagcatgataactgagaccacaagaaaaggacaatgtgtgctgaaaggaaatttgagggctaacttctgttgagggtaaatttgagtgatattttacttatgagcagaaatccaattttaatgttgagaaagtgagctctaatggtccgtttggagcagtgagaaggacgctcttctctgaaacactgcatcaaggacaagaccacgtctagccggaatgagaagaaaagtttctggtttaccctaaaagtgaagtgaaaacaacactggggaagggaggagatgttgtggggggtgggggcgcatgggcggtagaggtggagagccttggaaggacaggttgtttaactggaagcaactaggggcctacattatacctattttctgctatcatctagaaatcaaagcagcagcattagaaaaattcacccttgttccctttttgtattggctgtcaagaaactcaacactgcttctgaacctttatctcatcaacagcaaatatgtcagcagaatataataatgttttcatagtaccctgggttaaataaaaaggctgctgtagggctagaggctactgctgagggctcctgggaatgagcatctaaggaatgtcagtattccatcagtggcagttagtggacacacaccagttaggagattctgaattacaaattggcctattatatgtatctatatcttatatattacatattatgaattggcatattatatatatcatatgtatgcatatataccatatatgatcttagttttaggcccatatattggtccatatttttgtagtacttgttctttcctcataatagatggcgttatatcttttatttctctttacataatcttacttgattttaatttcaaatttctcagttattctttaggtaacgtgtggagtacaaatttaaaataccatgcatattacttggtgtgtttgctgtgtgctaggacctatgattttactgctgtaaacccacagcaataataataatcctacttcttggcagggtgaggaagccagcttttttgaggattggataaaatcaattcagataaaacatttagccaatgcgtggcacctagtaggtgggctttacacggtagacttattatttttccatttaatactccaatttccctttgtggggaatcggggggataagaaaatgcaagcttcaaggagtaaagggctggacacaaccacatagatacaagacactaagcaagaattaggagtgctccctggcttcaaagctggtgtctaaaacgtctatcccctaaggggcccttgtatcgtgtcatgtgtcagaccccgggttgaacgcgaggatttttgtgctgttcccagggtctctcaagagctctcctagtaccgacctccttgtgctcggtggcccctggcccgaggaccccagatgggtggcggagaaacgcaggggatagagactagccccctagccgggctccgtgggcccggagtggattcaaggaccggtggcagagggcgactgcaagttggccccgcaaagccaacaaggggaagggtagggtagtgacgacatcacctggtccttcaatagcctcccgggaggcttcaggaactcacatctctttcccttgacgaacaacgcaggtggtttgctgaattaagtgttcccgccccaaattgagatacaacgggctttttagccagattggcgcagactgggagttaaatccagcattttcccggcaaagctgagcctggccgccgcggagccctctttccgctgtgcggtgcctccggctccgatcgcgggcccggcgccccgggacgcgccgccgagggtagctacgcggccgggctgcggcctctcccggagagcctgcgtgcgtggtctctctagcttgctgcccgccggccaggaaaactctggggacaagctggagctggcggaggttcccatccggccacccttcccgtctgatttcctgagctgacggtcaccgccggcgttcggggaccagcggttccctgtgcaaagggctcgtttctcgatcgccgctggatagaccgcaaccgggttctcagaaaacacccgagctacagaccgcatgtagctttaaacagtttttaaaatgcgattatgcttgcgtctttatgaaagcacatggatgcagttatacgtatgcattaaaaaacacaaacaattctgcattgattgcaaaggagcgctttctggtggcaatgtaaacggtctagtttgagacccgtgatgacacacgtgaactgagttgccaaactcatagaaactccacacggtagatctgtacattgtgtcccgtgttaattgtacgt

SEQ ID NO: 6838 - DNA, 92292 bp, Homo sapiens
ggccctgactgatggaaattacctggactcctgatttcctaaggccttgtgtatctgcttcttcacttctgggtggtggttctgactagcggctgggccatgtgactgatgaggagaaaagagtgtttgatgacccgtctggctaaagggatggtcacctgctgggaattagtgaggaataagatggaccatcaaggagactcagtcacagtgaggcatgaatgacattggtacttggttctagaagaaaggaaattcctctgaggtccttaagaaaggtcagtagctggaggcatggggatgagattgggggtggatctcactactgagaagtagcaagaggctgatcagtgaaccaagtgggggcctgggctatagtgacagcagggtaaatgtggaaatatttccaaggagaatcttggcagattggctctgaggacagaaggcaagggaggaggtaaagatgacacataggccaggagttgtccatcccaatattaggctattgtaatgttcttgccaatagaggctgggctggatgcaatgagtaaacgatgttttcatctgagtcattctcctgataaaacagatgcccactccatgccaatctgatgtatagaatgttgagtttactgaacagataaaatagggaaccaatttgtctcacagaaataaagccttgagcctaaaagggcctttgcccatttgctcaagtctcagatgtcttttcttcttccttctttcttccttgtctccacaaaaaagaacagaaaaaccactgccagcatctgccacgcttccttgtctgtctttgcctttccctagtctcttccgctgttttcctccactggtttacccaggctccttagcttcctcccagcctttttccctctggctcttcactggcactggctgagaaaaccaggcacgggcctgtccatccgcaagctcctgccactttggcccgcatgygtgggaaagctactgggtctgtgattgctgcaggatgcatccctgtcccaaccctgagaaagggggccagcacaagaaaggaaaggagggtgaatggtttgggggctaaaggccctagctctgatgtcaagaagatgggtggccttgagtaagttttgtcacccttctgaggatcagacttcacatcataaaatgggaatgaccatagtaccctttgcccccatggagttgttgtgaagctgagcctcttggaaacaggttatagttctgcatagaaccagactgcatagcaccaacatcacaccttgccaacttcctgtggcagtttgcctaaactggccctggcaagggaaaagccatcagtgtgtgggtagcagagaagagagtgaactgtgcctgactttccagtcccagtgaggacttggactccctccaaggcactgtaaactgccacagccactgagcacttctttgggaagcagtctagtaaagagaattcaagacttctcttctaaaagctctgagaatgtttccactggcactaaccggtttctgtgcacattggcaatgtccagattccaagtcagatggagccccagcccctttgaatcccttgctctagaggtaagaagttgaggtgagggagactaaaagacttgcccaaggtcatggttaagttggtgcctgatgccagagcaggcctgtctgctgaatcacagaaaatctctcttgcagtggcagagtctatgattagtagcttagactatggaaacagactggggtttgagtcccagcttttccattgatgagtggtgtaactttagaccggtttacttagcctctctcagaatcaattttttcacatgtaaaatgaatgtcatcatagtaaaggaaacacagaaagcattcagtaaacatggtgttgtagttgtcatccacagatgcaaggcaaagagcccaagagaaaccagggctggtggggtctcaaccccaagaagcagtacaatccgtcttcttgttctcaagtctcatcatctcacagagatggtggatcaccaccatctgacttaggtttaggcatgctatcttgactttgccccataattctagaccagatattttttctttctttttttttttttttttttttgttgttattacaacacaagttcaaagatagatcagatcttttaaaatttgtgttaaatatataatacctacaatatgtataagatataaagaataacaataaaatgaacacttatacccaccattcaacttaagaaatatactacaattgcttggaagccctgcatgtcccttcgctccaatcctgctccctggtgacttattcatttttcattcccttgcttggttttaccatagatgtacttatcctaaataacatattacttagttttacatgtctttaaccttaatataaaagggatcatacacttctttagcttgcctttattgctcaaattatttttgttatttatccatactgatgcaactggggttcactcattttcactgttgaatagtactccattatgaaaatatgtcacaattaatttagttgttctccagttgatggacaactgggttatttccagggccatttttttcccctattagaaatggtggctgggcttggtggctaggtcggacgtggtggctcatgcctataatcccagcactttgggaggctgaggtgggtggatcacctgaggtcaggagttcgagaccagcctgaccaatatggtgaaaccccgtttctactaaaaatacaaaacttagccagacatggtggcatgcaactctattcccagctacaggggggctgagacaggagaattgcttgaacctgggaggcggaggttgcagtgagccaagatcgcaccattgcactccagcctgagcaacagagtgcgactccatcttaaaaaaaaaaaagaagaagaagaaaagaaaagaaatggtgcttcagtgaaaattctagcacatgctttgatatacagagttaggagtgctccgcaatatctgtgatccatgctgggtcataggtatgcatgccatcaaatttattggaaaataccaaactgtttccaaaccattgcaccttatacttttagcaacagtgtataggcactccaaattttctttaaggttgggattgtcaatttctcatctgtgaatctagtgattcattaatttccatgtccactgtgctatgtagaccgaccttaaaggcttatcatggtatatcgttctgtgtgcgctgtggaaccacgttgtgtggtttcattccttttataagttaccaactaaggcttggtatcatcagtttccatctttgcattaacctttttggtaatccagttatggggcctgtcatttgtattttgactttcatttatggtgcatttgtcacataaaagtttaaatttatatgtatctagatttaccactgtttttcctttttgtgttttgcttaaaaaggttttccccggccaggtgtggtggctcacatctgtaatcccagcactttgggaggccgaggcgggcggatcacgaggtcaggagatcgagaccatcctggctaacacggtgaaaccttgtctctactaaaaaatacaaaaaattagccaggcatggtggcgggtgcctgtagtcccagctactcaggaagctgaggcaggagaatggtgtgaactcaggaggcggagcttgcagtgagtcaagatcgtgccactgcactccagcctgggtgacagcaagactccgtctcaaaaaaaaaaaaaaaaaaaaaaaaaaaaaacaggttttccccacttcaaaattagagtcaaataatttaaaattttcatttagtcatggagcaacttagaagccaaagcagttgtggcaggcctggaacattaggctgtcacactgtatttcacatggggtaaaatgtccagtctggaaacacagtctctcattttcatcatgttagactaaatacagtaaaaagaagaaagaccagtggctgtaaaaagaaaaagcagaagtgtaacctttgcctcyggtctttttctctggggaaatatgaagttgtcagccaggtgttgagcaaagttgttggtggagagaaaagtcaagtgacttatggggtgcattttacaataattcagaaagaacgagctgactattatcatttcattcagtgaagcctgaatttcctgatctttgatgacattgtatgtgcctttaccatcctagtctacttgtttctttcagttaggaactatgggagaggaggaggcagggtctagagctccttcaggatgcactgcaagaaaattgagcagccagattggggaaaatgaatgatggcaggagacaagcacttgcatttttctcatgcaacattgtctgctctcttgctggcctggccaagtcagtgtcctggccaagcagaagggccccacccttcaacagctctgaagattctgctcctaaacatctggtcaaaccagaaattcataggcagtgatgaatgtgaataatcaaggttacctggaaaaagacagaacatccatttgtgcaaagaagaggcacaggagggaagaaatccatccacggtttccacctctaccactgccgctgttccttctccccctcctcctctgtctcctcctcctccgcttcttcttcctcctcctcctccgcttcttcctcctcctcctcctcctcttcctccacctccttctcctcttctgtcttctcctctttccccactgtcttcagccagatcttgggtctgcaacaggagaggtaactgagagctctttactttgtcctgctgtgtattctgacccaggagaagactggttcccttgataaatgttggaaacgtgtactttattccacaagggtgagcagggcattctcgatggctgcagaaaagtgtgtccaggtacaaaaggtcacttccctcccattttcttcctccttgaccctggactgcgggctgctctttaaacaacaggtaaatcagcatttttcagattaggcagaaggaaatataaagtcttccaggagggaagtagagttctctgaataggttcagcccctacaggtatggctccctcctcccagcctcaccccacctgtctgaccttgagatggcctcgtgtctggcgtgtcactgggtgtgatgagcaagtggtggacaggacagaaagaggcaaatgcaaggaggggaatggcattctgcttttaggacttcagaatggcctgatgtaggaattgcattgttgtgaaactgttagatttgttctcatctgacttttgggtacatcctggtttgtttgaaagcatctggctatcggcgaggtaactcctgactctatcaggcaataaggaggctgcacatctgacgatagagttcatctcccctttcctgagtcatccatccctacccccagatgaacagagaattgcccatcccattttaaatagagctccagaaaaagagatactctaattctctgagtaaactgttaccaccatgccactgacaacctgatatttatttttaaacgtattgcccgcatcggggggtaggaaaaagcacaaaaatgccatttttatataatggttctataagtagaaaaagcttatccatwactttatgcaaataagcagaaagtctccaagagaggttcagatggacttgattactctgcttttccttgagcccaggaagttcccagttatagcatgcacctgctggaaacagactatatgtgtttgggacaaacaggaagtagtgaccagccagaaacttgtcctaacctggttacaaatctgattgtaaaagaaagcagctggaaagaaatttgcctgcccaataggtttcattattaaagtttacacaaagtggagtaatcaccaagctggctggctatccagatcacatgattatgtagaaacatgaaacttgactatgtgctcgggcaagttttacttctccctagagcaggggtgtttgccagcagcctgcactctcagaaatcagacttgagtggccggaacccttgagaccagaggcttaccatgctgctccctaggagggccaggaactgctgacgtgaccactggacagttattcgtgtctcttacaattaccaarcagaatggacaagcttaataaaataaccgtccccgccagtcagaagttgaggtaagattttccccacccaatacccttcttcatctcctttttttcmccccagtgctcttatggcatctcagaaatactgaaatcctggaatgctttgctagtttccagtgggtggcacttactatagggaagtggactgagcttttagggaaagcattgggtggcacttgctatagggaagtgaactgagttcttaaagaaatgtgtaggaacaagagagacttgctttagctgcctcttacaataaagtgtaaagctctggaaagataataaaacaaatgccaagggcttagattctactgaaggtcaacttttagaatctgaatgcaaccaacttttctaaggaagggtttctctaaactgagtcctcacccattttattgcaggttactatttaattttaaggatagctgtaatcatttgttattcattgttttattgtctcatttattttgtgggtgtatatgacaagtgtgtttggggggattagatctgtctttccaatgccctcatgtcaatgtaacaatatccataacaagcctctcaaaaagaataaaccagaagcggccccatgggcgtgagtcaaggagctatggaaaagacaacttccccaaattttgcttttgaaggtcttctttttgtctcattgtaatggcatcatggctttcagagactggaacttttaaagttctgggagtgcagtttttttttcacattttttaacagttttttttttttattatacttttaagttctggggtacatgtgcagaaggtgcaggtttgttacataggtatacacatcccatggtggtttgctgcacccatcgacctgtcatctacattaggtatttctcctaattctctccctcccctagtcccccaccttgacaggccccggtgtgtgatgttcccctctgttcagggagtgttttctattctgactacatattagaacttagccaaatgttcagggggtgatgtgacacatgtagcagacaagtaatcacagataacaatgagccagagaattgaagcttttgagacaatatttaagagaaagtctggattggcagagggacaacccttcacagtagaatacaggtcttatgcctaggaggtgcttggtaaaaggtaatgtgaaatgcatcaatgatctgggatcagtaggcaacatcagctgtgttcaaccatttcaagaacatgctgttgagtgctgctgtgtgatcagcactgacgggacaagaaggcacctcattcttgcccttggtctcaaatagctacaccctcatgaggggcgggggtgatacaatggaagctgtaagcgacagaaggaatgtaagaagagacttagagtagcaggaggaggtttcatagagaagatacttttaagaggtaggctttgagaggtgggtaaaattataaaatactggagaattggaggaaacatgttatgtgctgggagggaggaaatacagaggctgtcactcaaagcttaacacaagtacggtccatttgtgggatagtgaggagagttttctgtccagcggaaactaaagagtagggaatgtgggacctgaaggtcctggtatgattggacaaataaggtgggtccaggttgcaaaggatggtgagtgccctgaccatagggagttggagaacaggttatgctgttagctgttagcaatgtcatgacagtaggcttaaaggagcctggtaggatgcgttggagtgggagggacactggaggcagggatctggtgggagggaggagcgcttaagtaacccaagcatccagggttgtaggcctggacttgggacatggcagtgagaaggaagagggaaagagagggcagaaagacatggcaaagaaactaactaggcaccttcctctgaatgaacaggaggattccaaatgtttttttttttttgttttcagacatattccataatgtagaactatacagaaatgcattctctttcagggaatccaggtgggaatttaagtaaaggtgctagaacttaaatcattttatgattcctccctttgggacaaagtccagcttgatcacagagtagttgatgggcaatatacaaccatagattatgggatagaaaaccaaaattataccatggataatcatacactacactcatctgcttacataaaagtaactttttttccacttgattactcagttgtctttatagaatcatcctgttgtggtaaaatgtactgttgacgtggaacttttcaaagaaatgaaattgtaaactcaatgggctcgaagcaccatcttaactcttttccataattagatagataggatggtgaggagtcaatagatgaaatacttgcctcctgtgatttgtgtcctctgtcctgactggttgacatcaattctgaaggttgattaaccatgtaattatttggcaccagatgaccataaaagtggacagttatgtttatactcttaggcttaggtgagaatttgctcaaattcttagccacaaaaatagaaggacagtgagtgtccatccaaaggactgaaaggaatgaccttgatccagggagtatattcccaggactgaaaagagagtggagcagaaggaattactaggaggagaggggaagcagagtcatccaaggaaaggagggcatgcaggattggaaggagacaaggaattctcaaaatgaagaagaaagggaatgttctggatgaacccagtggggatgggtcatcaccttgagagtttctgctgtataagaatagagataggtgagatggctaagttgcttgtgaccacagagaggtgtgagcacagattctcatgtctttgctcccaccgaggcctgctaaagtaggcttctctgtcagtaggagtccatagacacttagggtcttttagttgattcctagccatgattttcccttaattgtataaggtaaagttatgatcagaaacctggctagagctgggtttcaatcgttccacagtaaacattcctatgatcataaaaatttcacctttctaggggaacatttcaaaatttacaatcctgaatcactttgcaaatatcccttttcaaattagtaaaactaacttgaaaatgaaatgtttagtttttaataacctcccaattgattcatcatctgtgcttgtgtatttttctttgtagcataaacaaacacatacctgctcatttttacaactagaaaaggtctttgacacaagtgtggtcaaatcgggtctccccagttatcttattgattaaagagtatggcatttttccattagaaaaatcaagatttgtgtgattttaggcaagattgcctaatctccttggtttcctcacctgtaagataaagataataataacagtaccaatgttgtagggctattgtaaggtttaaataaatttttctgtgaagcaactggcacatagtgattataggactttcaaaatagtagctattaatatcattactgttgttattctaattctatagttgtgtaattgattttctgaaaataaacagggactttccattgatccctgataagtttcatgttggttccttttcttctttctgactattttgactattttgtctattgattctgacatctgtgacacttggctttgcatggactgcagatgtgacaaacattccttctctgcgttcatctaagtgactaataatgttaagcatgacagaaccctgctgtgggtgtctgggtcttcctggtaggggtctcactgagaccttwtctaatggattctgagacatgccttctcttctcagggtttggagttttcaactggagtttttacttccttgatttttctggttcagttcttcagaaacaaattcaccttcttttcacctttccacaactagctgtctctcagatcctccctgttttggtcgatggtatcctcgtcagccctcacactgactcacctttccctcttcacctcagctgacacccactcacctaccacaccctgcaggttttctttatggctcttctcttccatatatggcttttctttccttttcttccacaacatcccggataggttattagctcccccatgtcccctatgtttgtttggttcaaactacaaaatgagaacatttcccaaagtccctctcagctctgatgctgtgatcctttaagcacagagaccacatttgacatatgttacattctcaaaggctaccattttatctcaggactctcaggaaatatttcttgatatatttagaaggaccatgccattggggcccaacagggctgattctaatggccagttactagctgaarccattcagtttctctacacctcagttttcccagctgccaaacraagctagagatgccttcctcacaggcttgtgtgaagaccaagtgagacaacatggactgaagttcccagaagagtatttgccacttagtcagtataccaagtcaataaaaagcaaacacaaccaccagtacctcaaaccacccaagctgagtggcatttgctgtctctcttgctcttcatatttgtggttccaactccttttaactggggtggcaaacttcaggggagctgcaggcaggaggcacagcatctagtggtggagattagatccacttcctggaccgtctggtttcccatcccctcacactgcctacctgcatcccattggatgagaagccacttaactggaccatcttgcggcacaccaatggatggactacccagagcagctgagaagggttctttctccctgtgggcaagccacatgggagccacgttatcagaaactggcttagtgcgagtggacttcagagtcatcagccaagaaaactcaaggcaacttcctcacccactctgggcatggctgtgctaggaaaaccctaaaccagaatccacatgtccgaggaacctctcttctggacccagtgattgtgtaccatggctgaacaacaccttcctcttcacacaacatgtttccaaatggactatgatacaatcgattaggtttccaaggaccaaatcacagttattttccagccctgcctcctagattactggattgaaaagaactgggctggtgccaaactcttcaggcatgtatttacagacgatctcttgttttctccctacaggtgatttaaccccatctgttcttgggagaatttatcagcttggttcattttcaaagaaggtcttacatgagcaagaaaaaaagggagagaaaaattaaaggatagcttgttctagggaaattaaaacacttcgctttctttggcttcttaatagattccacagaaacatccttccccagcctcccgcaagacatagctggatcatttcaatcaatggttctccatcaggggcaattttgtccccaagggaacatttggttgtcacaactggggagtgttacagacactagtagttagtccccaaggatgctgctaaacatcctacattgtacagggcagtctccacaacaaagaatcatctggcccaaaatgtccctattgccactgttgagaaaccctgattcagactaagtgacatgttctcttcagaacaataagcaaatattcatttctatttgcttatagtgacaacgtgtatttaaagttcagaataggcaatacatatctttgccattgttgtggtctttgctcagatcacactgggtttccggtctgggatggtttggatgagggattgcctagaggaggggcaataaatccttaggcctgcatttcaatttgatgttcctttttaaaagttgtgtcaaacaaaactagatcccatgaactatatgcaccattgagctataagttgctctctcctgggtagaaaagtgagagcaggaaaagatttccagacataaggtcatcttgtaataaatagtctgtttctacttcttcaagtagactgagcaaatcttgagtggaaattcttaatgttgaggtaaaaagcatattatgtcataacacagccattaagaagttcaagggcttgtgagtctgatccaatggccaaattctggctgggtgtagagagtcattcctgcaatcccagcactttgggaggctgaggcaggaggattgtttggagccagaagttcaagaccagccgggtcaacataatgagacacccatctctacaaaaatwaataaataaataaataaataaataaataaataaataaataagtctggtgtggtggcatgcgtctgcagtcccagctacttaggaggctgaaatgggaggatcgcccaggaggttgaggctgcaacgagccaagatcatgccactgcactccagcctggtgaaagaatgagaccatgtctcaaaaataataataataataaggccaaattctggacagaggtgcacacactgtgcttatcctagagcagaatatgttgcctaaggacattggataaaagacaaagcagctggtggaggagagatgaaatgcgtttgcttgtccatcctttaatcttcttggttatatatgaaaattctgtggcagtgtccaagaggcatgtatttggaataatccttccatgagctgggagagtttctggagcaggattcaccctgtcttgtctggtctccctgtggccagtgtgtatatatttttttgaaaccgatgggtaggctttmagggttcaatctttttcattaaagacttttttccagctctattaagcatttctatgtctccccgcccccctccaaaataactctttaaattggtttcgattgaatctggatctcaggaaaygctttgtgtgattgttctgcatattaggaatgatgagaggaggtctatgtgaaggacccagggtcctgtgctcagaagagcgctgtctcttgtaatgtcagatgctcaaggctcttgggtaatcctgcccccaggcttgcagggctgtggtgctcttgyccactgtagacagagcctcactaaggaggccttttaagtccacctaaccaagactccgtctctgcagattggaggtcagagaggtaccgctactgcctcccattggacaccctgtgtctctggattggtgattacattccatcaggtcccccttaaatctcacagacttggggccattctgcttcttgagggtgaccttgcttctctgtgtttgctctgtcagatgttgaggtttaagcgctcaaaggcagccttagttttttcattccacgtttatgctgggtttcctaggcccctaggaaccatgcacattattaggaatttagagtatgtttcacctgttgctccagaaatgggcctcacctgctgatggggtggaattccagcccctacccaagtccctgctccagatcaagggagcagagaaccctgaagtgtgatgctggctgccgtcctctaggtcccacatgacctcggggttccccagcacagctgtagggaagcagcttttgtgttgggctgacactggacactggggttggctgctgcggtggaaaccctctctcaggaggttgctcctcttcactgtgtgttaagcctcctcattactggcgtatttgtctccatccagcaatgagcaagaaagtctgacttcacctccttcctccctgtgctttgttccaaaaagaaaagagccctccccacaagcccctcctcctccttatttcaccaccttttcctacctgtcctgccttcacctcccttcygaaagggagtccaccagaagctacacctgaagccttattttttaacctaatgttttcacaacccttttgcagcactgtggtctaggcctccaaacagaccatttccctcagcccagcatggctatttcaatgcttatttcaaaagcaagacaaagaagccagcttgagggacatgtggtgactgtttgctgagccacacttctctgttggccagtttcctaaggaaggctctcattaccccaggagcatccctgcctcccatgctggctgggggccccagacctactccagattcccttccttcacacattgtagggaacacgcagcacaggtccctagcttcctgggcgtgtggccatacagtcgcacagggtcctgtgctcggagcttgtgcctggtttaatgctctgctgttgcagtcctgaaattcttaacaatttcgaccaaggggccctgcattttcattttacattgggccccagaaattatgcagccagtgctggtcgggggttccatgaggactcgggccttgcytgcttctacaatgtgcagagacacaggcttccatggagaagcacagagattcgccttgcgaggactgaaaggacacctctccagcccctttattccacaggtgagaaaggtgaggcccagagaggccaggtcacctgttcaagctctagacgacccctccatgtctgcctgtgtaatttactggccaatgtaacattcaggctttgttcttcacttttcatagacgtttgttttaaaattaaaaaagcagtcacttactagtcagaaagccttctgaggattcctgctgtcagtatttcagacaattgtgtgttccaggcccaaacttgaattccacactgactcaggtgtgtctggtatcctactgctatatattttgcaaagaatgctcccacaatcgttcatgtaatctgagagtgagttataattatgaagagcagagctggtcttatatacagaccaagcacacagcaccaacgtggtattttaagaggtgcccttggaaggtgtttttgtcttactgaaaagaaagaatcaggcagatgtggatttgaacatttgctctgcacttaccagcttgtggtctttgagaagatcacttaatcccttttagcctcaggtttttcatctgaaaaatgggaataataatatctcaataatatataacataaagcaggggtattagaacagtacctctgtataccggagagtaagagctcaatgaatgcccccttcctcctggtctgtgcttccctggtgccctggattgtgttgttagagaggcatctacttgggatatggcagtgtctcaatgttctggttcaaaattaaacatcattaagtgtaataggttcaggcactgagtcatctgtcactagcacccacgcaggactcatttatctgataaccaactcagaccaagggggcagagagctctcctacccactcacagaggtggttcaatcaacagcctagctggataaatggatcattgttcaggaacatggtgataaggagggaaaggccagaggtgggagaccacacctaagtaaacgggagttccccagagggaggctatgaccaagggtgcttggagtagaagacaagaaagtctgagctcgtacctagagtgaaatgacccccagccccattccattttttaccccttcattttacaatcttacttggttcaaagtataaaaacttcattatgaaaaataattttttaagcataaaaagtgtattaatgtccctactcaatattgaacatactaggaagagtatttcattgcactgcaaataactataagaatcacatacaaacatgagaactataatttcaaaaaagaaaatggcaaatgtaatataaaatcattgaaaaaaatgaactctgtacatatatatgattgttttggcttttagatgatctttacagcctgttcaaggtcagagttctcttttttaccatggcaggacttcagatttcacatcatcttcatactcgaagatcatcacagttgccaaaccgatcttagatgattgggcttaatatacccgatgctacctattagggtaaattctattaacaacctcttagcatgatgaaaacaaaagctattcatgaaaatgcctcaaaagtaaattattttgaaaatctgctttaaaattgccaatgactgcttcatgggtctggggttttatttaggggtgatgaaaatattctggaactaggcagtggtggtgattgcacaatattgtgaatttactaaatgccactgagttgtacaatttgaaatgggtgaaatggtgaattttacattatgtatgttttaccacaatttaaaaattgataattaaacaatttcctatatttaccataaatgagtgtattttggggacccacgattatatatttttttgacccactagatattgttggccaggcacagtagctcatacctgtaatcccagtactttgggaggccgacgtggacaaagcccttgagctcaggagtttgagaccagtctgggcaacatggcgaaaccctgtctctacaaaaaatacaaaaaattagctgggcatgatggcacatgcctgtagttccagctactcaggaggctgaggtgggaggatcacttgagccagggaggttgaggctttagtgagccgagataacgccactataycccagcctgggtgacagagtgagaccctgtctcaaaaaaaaaaaaagatattgcttcaaaatttttatttaaatgtattattgacaaacatttgtagatgyttttaatgaattacaatgcttcctttcacccctacccctacatacaagacattcccaatatctttgttttctcagagctaagaagaatttaactgggtcaaactttttcaatatatgagttcttgaatgccatccctcaaaatcactctttacttcctgaaaatatctttgcttttacctgcagaaatggatgccaggacaagtagatgacaatactatatatatatcatgccatgtagatatagccaaagttcctttttcccccattaagttaatttttaaaagaacatattcaaattcttaagacacttttattttctggaattatgtagaattgcattttcagaaacatgactagaactacttctcagtcgcttggttttacaaacctattggcagctggttcgatttaagagacgtcagttttgcatttttatgctggtagaggacagacagtgaacacatgcacggtgcagctgtcagcacctcatcagaacaatgagcacatcagagtcagacacagtgaagggactaaatgacatgacctcttagtgttcttccaaacccaagagtctgtgtcatctatgaacacaggagtctcccttaacttttttggtttttgcaatctgcttttatgtagttttrtgaggaagttttcctttattcaagacctctgccaggtgggtggtgagagcagagtccagcaagcattccaatgtgctaaaggaaagagaagtgttgtattcctggaggccccaaggaccactggcccctaaagtcagagaggggaagggccatgccaatttcagctgtcaaatcaagtgacaaaacttctaagaacttcttaaggcaggtatagcatcatttccttgccatctcatcagtctcagggtggtgtgcctgatgcataactgcctctgatagggtaagtcctaccagggtttttgaaggacacagggtattagtggaatcatccctactcctgcttgtgccaagtcagcccaatttctgactgcttataaccaagctcagccgttcagacatgccaaagactaccacaaaatatttgcagatctcagtaggaaaaaaaagaaacaagcaaaaaaaaaaaaaaaaaaaaaaaaarggtagggtgtgaactgtttggagaaacttataaattactttatacggttaataagtggagagtaagaaacagccctggcagcaagatgcttgtgtgtaagggaacacagcccctccactccaggaccctcagggggcctttctgcctcgggtgttgagaaaggatgcatggattatggtggcgtccttccagctgctctgttcagccaccctacttctgagcatattccagaccccagagggccgctaccgcattccctcctgcctcccaygtgccttaccccctctccttcccatttcccctgccatctrtccyttcctctttttactctccctcttcctcccaaagtctgaaacaggcccttaagagctgacgctcccctctagcaaaatgtctaaccttggggaccaatagcaaggcaggggtgggggcacatgtgtcacagtaaagattactgggttggtagagggaatgggtgctgtctccagggacagagaggaaggtatccaaagaggcaacgtaggtgctgaagccagtcgcctgccctggtgaggggccaagttgaaacaagttagcctgtatcatccagagtgggttgagagcataggctccggaatcagacctgattttgaattccagctctatcacttatttgctgtaggatctgggcaaattatttaacctctctgagtcaaattttctcatctataaaaacagggataactacaactatgtgaatatattaatgctattgaactggatacttaaaaatggttaagatggtaaattttttgttatgtgttttttatcataatataaacatggggataataggacctccctcacaggstagttgtgagggttaatgagataatgcacacaaagtacctagcacgtagtacatgctcaataaatgctggcttttaccgttattgattttccaagtctgatcactggcatgcatgatgcttctctcagcaatggcttactgggcttgtactataatcacagctctgaactatggcataagaaggtgggggttacctctggccatggaggtaccccccaccttctctagcagggggctcaagccttatgtggaaggggaaggaacaggtatgactaaaagagttggaggagtcctcaactaaattaatctcagggcaatcacaaaatttccctggaatttaatttcctcccttggcataagaggaggttgacccaggatattcccaaagtctctctcacttccaaatttctgtgactaccttaattgtaggcaaaattcggagtcagctgtatagtctgagacactcatgatctctgatctctttgggcttcagtatctgcatctgtgaaatggaggagaaggccactaactcgaccttgaggggcttgttcacattatcacaccatggaagggactgccaaagctgtcaaaactctgccagctccaccatgagctcactccccagaaggaagcagcctgcagtgctgaattcgcaaatctaaatataattcctgttatttcatagcaaggccaggctggaggaagtgagcattaggaagccggtgccagaaatgacaaggctttagaaagagtggagggggagaagttgtcataggagtcctgcagcatgcaagtaacaggatagtcactaaaaagtatcatgctgcttcaaaacgatgggttggtggctgaaaacttcagctttaagacaggagtgacctgagaggaggatgttttgtgtgaatcagagaattctccggtctgcctatatctgtcccctggcttcacataggccagaaggtttctgtcatgtgataaggtggtgaaaggagcccctttcctgcattacaagagggtcgggtttgtgttcaggttagctctgtggcctgcatgtgccatgcccagtgtgcacacactgaatatttgtggaataaaacaaaacgagtcatgtataaaacagcaaagcatgacattaaattttaaggggtaaccctcattaataaattgatacaaatagtatttaatataatattttaaaaatcaaaatgaatgcccagaaatccatgatgaagaaactactggaattttagatgaagacagaatcagtcctgctgatttactttgtctcaggccccagtatggccaacatggcactttgtctcagtaatgtcctctttgagagttgttggtcctttcgcacagctgaggcccacagggcactcctagtgttattccattgcctttggtaccacgctgtcacgagctcgaggcttgggcctggcacagttgcctccatactggtgtcccagccaccactgtcccaggccgagatcctcctccattcttccaccctcatcatgacacaccccgaggaaaggtctccaagggcttccagcaggaagcctgtaaccccccatctccttggcctaacaggtcccttgactatctgtctctgctcccagcggtctcatccttgtcttgtaaacatcctctcaacacctactttcctgmcactctcagctgctcactggacccgaaacatctcagacagtttcacctctgagcctttgcacttgctgttcctgatacctggctgctgttcctgatacctggctgctgttcctcacccttttgatgtgactagagatgtgagatgaagagtcaaagagagagagaaagggttaaagaacattcagaagtttcaagcctgaagatccaaggatgccagcttataaattccatttgcttcttcttctgctgcttttttttttttttttttttgagatggagtctcactctgtcgcccaggctggagtgcagtggtgcaatcttgtctcactgcaacctctgcctcccgggttcaagtgattctcaggcctcagcctcccaagtagctgggattacaggcacaggccaccactgccagccgatttttctatttttagtagagcaaaggtttcaccatgttggccaggctggtcttgaactcctgacctcaagtgatccaccctccttggcttcccaaagtgctgggattacaggcatgagccaccatacccggccctttttctttttcttattgtcagttttcaattttctatcatatagctgttttaaaatttagtaacaaaaataaaatatactatattagtagcatcttaaaaagaaacccagagtcaattacattaaacacctaaaaaaggaggaagtcaactagagaatcagcagacctaatgwtgaacattaatttttttatttttaaattaaatgcatttaaatgtatttaaattttaagtttaaaaaagtgtttttaaaaatccattcatagtaaaaagtattcatggatgcatttttgtttctatatatgccaaggaaaacattacagagatttctactccaaattgattttagaaacatataaattggagataccaggtcaattgcaccagcacagatgttctaaggatacccaagtatacgtggataaagcaaagggctgagccagcagcccccaggggttcttgcagtacttgaactcctgacctcaagtgatccaccctcctcagcctcccaaagtgctgggattacaggcatgaaccaccacgcctggcccttttcctttttcttattggcagtgttcaattttctatcatcgagctgttttaaaatttagtaacaaaaataaaatttctatatgggcatggagctcagggtgagactgagtgactgagccatgacaaaaagctcaggcttgattcagtagataccggggagctgctgcactcttgaggaaggagtgatcgttgaaatccaggttttagaaacatttgctgaaagaggccctaacaagccctcacagcatggatgggagggccctgctgccagctgctgcattttcctgttgtaaaggggaaagtgtaggcttagatcttggctcagagaggaggaccagcctatgaacactgaaaggatgaaactcaagaactggacctgaggttaagatgcgggggatgaagaaggaaggatttatttattctgtttgtttacaaagagtcactttcacctgagacactctttaatccattcctacatgcagattaaacagggattttctctgattagcaatactttgcattccaccctttctgaaagacaaatgaaaaaaaaaaaatcctgaaacctgcctatcattgtcctctgtgacagcactaaagagctacaaggaaaacaagatgttttatgatcttatttctactaaactttttaaaaaagtacttcttacagataatatcatctgttaaatcatctcctgtatttaataaaaattattggaaaagtgtttttgtcaaatatgtaatttcttggacacctctggtgatctggccgaaatatctgcatgcagctgccctccycgtgccctcttggccctggaagagctcgctgtccttaaactccatccttcctgaacttgtttatccttctatgtgcctggggctgttctcagtctgcagatacccttctgtggattctcactatggattcctctccttgtgctctcttggccagacraacttccctggggtatgtacaaagttctcctatcctgagaacactgtcagtggttcttaaccttggctgcacattggatcccctgagagtcaatgactctggtttaaatggtcgggggcaaggcctgggtgtcaagattattaaaagtcccctaagtgattctaatgtgcagccaaagtcaagacgatttctttaacctaccttttcatccaagaaggagatgtagaaagactgccaattgatgtaaggtctaaacttcaattcataaaagactcattgaagggccaggtgtggtggctcatgcctgtaatcccagcaatttgggaggccgaggtgggcggattacctgaggtcagaagttcgagaccagcctggccaacatggtgaaaccccgtctctactaaaaatacaaaagttagccaggcgtggtggcaggcgcctgtaatcccagctactcgggaggctgaggtaggagaatcacttgaacctgggaggcggaggttgcagtgagctgagatcgtgctattgcactccagcctgggggacaagagcgagacttcatctcaaaaaaacaaaacaaaacaaaaaaaaaactcattgaagaaggctgagctgtacacagtcagctcctcgggttagagtccctgctctgacaccaggctgcctgggaagagaaggcaggcaggctggaagcatcactgtgcccracttgtattaatctgagtccaggtaaaggtgaatgcctggccattggcaaccacagccgattccttctgctgtcttccccttgttgaaagcagacatcataccattgactaaaattccattgccagtgtctttcctttcctggggagaatgcctgggtaagcctttggccactcattatggagaaaatagtaagatttgctgttaaagctattccaggctatggtggatgggggaagatactctggaggttgggaagtcgtctcttttgctctttccatttaaacttagcctagaaggggataaacctggcctaatccttttttttttccttttttttatttttttaattttttttattttttttgagacagagtcttgctctgtcgcccaggctggagtgcagtggcacgatctcggctcactgcaagctccacctcctgggtccatgccattctcctgtctcagcctcccgagtagctgggactacaggcgcccgccaccatgcccggctaattttttttttttgtatttttagtagagatggggtttcaccgtgttagccaagatggtctcgatctcctgacctcatgatcggcccgccttggcctcccaaagtgctgggattacaggcgtgagccatcgcacccagcctggcctaatcctttaaaaatggctgtcaaccttctgtgtgcataagagtcaccaggcctagaaaatttgttaaaaagcagattgctgggctctatctggaatttttattctattgatatggtttagggtccagtgatctgaatttctaataaataaatacaggcaatctttagaccttactctagaaaacactgtttcagagggtgatctggaagagaggctgggtttgaagaaacaagagggaacctgagattgtcccctccctctctgcccctgaggtccaagcctcttgatcccaggctcccagaagcaaggcattcggcacttattctcacacagcctttgcttctcctggtctcagattgccatgtggtctggtcatctctctgctccctcaagctgaggggtcctgattcactgcttcttgtcacgcctacttggatcagagtttcagctatttaaaagcccctcagatagcagaggaaagaaagatgcagataaagcctaaggatggtgctcacttatgaaaatattcacaatatagtaagtggaacacacagatttcaaaatgtcaagagtgatcttagttgtgtaaaatctgtacatcttatgcatgggtagtaaaaattggaaggctattcaatgggaatccttctagargattcctctattcaacctgcagcacagggaccaacaaccaggaggccccgggaagacaggaaacatcacagtaccaagcctgaggcctgcctgccacatcctcattttcttacatcctttttctaggttggagtctttgcaggatgagtgacagcaaagacagcctatcccccaccaacagggatgaggtcgagtcttagtgccaccgccactgcattctgttagtcacttagagcaccatattataatagcaatggcaaaatggtcccgaccatggcactctgctccaagaagggccagtcccttttccattgtcacgcaaggagaggggcatgttctgcctgcagtcacttcatctccattctacagttttgcaaactgtggctcaagaagaaagyacatgactataaaataaattaaaatatataagcagaggttagtctgaattcatacagagaaaagtcaacagtcctgcaaagaagctacagactgaaaagcgcacacccaaattatgcttccaattgaccacccaatttatttgtctgaaactttgcacttgagttaatgagaacttagtttttcccccaaacaggtatttgctttacttgggcacaactaaaaggcccacaatagaaaaaggcatgatctatcatagacatgcacaaaggatggtctcccaactggtagcatcagcaccacctgggaatttgttagaaatgcaggagctgggcatggtggctcatgcctgtaatcccagcactttgggagcccggggcaggcagatcacgaggtcaggagttcaagaccagcctggccaacataatgaaaccctgtctctactaaaaatacaaaaaattagcccggcatggtggcaggtgcctgtattctcagctactcgggaggctgaggcaggagaatcgcttgaatctgggaggcagaggttgcagtgagcygagatcacgccattgcaccccagcctgggcaacaagagtgagactccgtctcaaaataataataataataaaaataaaaacataaatgcagattttctgacgcaccacagacaacccaatgagaatctccaggggtgaggcccagccagttgtggtccaatagccctcttgagatctatcggattctaaagtaaggcactttaaagggaagaaactgctgtaactttcaaatggtgacttttctactctcagtgcttcctggaatttaaatctctcgagattcagacttacccagggtcacactactacagtgtgactaagttacgtgtcttaattcaaaagcttgaaaattaaaaacaaaagagagaatataaaatttgatttggtttacacaagtattataattatttatatgacctgctcaccatttttaaataccaaaatgccatactgcttaaaattacaatacttatatattttaaaacatgtattagataagctttgttcttcattytattttgttacatgagcatggctctctctctatgactttagaagattaggacattgtgaccttattatccatctccccaccatggaaggatatctctgaatgagataatcaaagtgaagctgttttatgccttacctatctttacctacacacaactcatctcagtaaaaggattgctgtttgaatccagaacaacccctcctggaacagaccagttgtgcattcttttgctatggcatgtgctataagttgtaataaggagcaaaaagcactycaaaatgaaatggccaatactagagagcagcagagctgtgcatcaccagatgcgtggacagttgacataatgagctaacagcatcacagcaaatcttggttttgggtcactatgtcttcccagatcacagaagttyggcagttgtaacaaagcagtctatagacatcagaatttgtgtgaaygagatacagagagagaagaaaactttaaaatataaaaagtgtaatttatctagggtgactatagttaactataatttattgtatatttcaaaatagctagacgaaaagatttggaatgtgttcagcacaaagaaatgataaatgtttgaggtgaggtgatgggtttcccaattacccttatttgatcattacacattgtttgcatgtatcaaaatatcacatgcatccataaatatctactgctattatgcatcaactttaaaaagtatagtttatgcaacacttcagtaacttactgtaattatatagttacatagtataattgttattgttataataatacacaataaaaagtaattaggaaatgccaagaagcaccaaatgccaaattgagcaaatgacaaaattgcatccaattcttttgcaacattttgcatctgtttatttacatccacagcaaaatcacttatgcaaattggcccctggttccctattactctgcctgtgtcccatttttgacacatttctgataggattcttcactgctgcctcattttgctcctcaacctggttaagcattaacttagcctaaagatactccattcagttacagtcagcttacaacgagctrccctctgccctccatatgaaattattgaatttccttgcaatcaatccacttcaacctctctctctctctctctttctctcttcctctctctctctctctctctccccctctctctctgtctgtctctcaatctctctccccactgccagaccccttattttcattttcttctttcctctatctcgaagattctctatagttcctcaggaaaaggagaaaagggtttggcatagagtatatgtgaacaaattctagaaaactgtagagttctgaggcaactcaagggcccatctgagggaccctctgtgtgtctctcaaccatccttttctctttgctactgagcccataatatgtgcctggctctttcctgagctcttacacttgtatcatcagtgtgcccggcctccctagctagggagtataaaatatggtctcatttcctttgttacccaaattacaatgacttggcaccagacccctgacacatacatttgaacgtgggtccctcagtgggtacctcacttacgtagataattctccaaaatgcagccatacggctgtcccaaaagaagtttctcctatccttctacttcacactccagcctgtcctccctccacccttccatgccagtggaacactctcttccccaaggcccagctgaggccgggctgcagctactacaagatcttactgaagattcagggacagcagagagggattatgtggttgaaaatagctagcgatggctctggctatggcttttctcagagcagaggcccagacccagcctcagattcagggctaccacgccctgccatcgcccaaacccccaccactgaaaatccctcaggtttgtctgcgctcttcagcactctagcgcctaacagccattagccctagaaggagagagatctccccaaaatctgcagcctaagttcccawtttacgtttgagcaatctcccttttcccaattccctatcctgtaaatttcactccactccctaagggctagagggcctgccctcaatagagcagacccagcagagcaccagcatggctgcattgtttagctttaaattaacacttggtagaggacacccacaggcctgcccaggcagagttcttctgagaagctgtcctcttaccctctaaactgctccactgctgcaccaaaaagtaacccttccaccgcacgggcattctaaattcacaaagggccaaggagtatttctcccagatgtcctcaaccaacagtttcctagacctatgctaaactatttctattacctaacccaaggcctagctcccagagtcagagaaatctgctttcaggattgtggggaaatcaccatttcctacaagaacaatagctgtgtacagttcattatctaaagggtccagtcaaatagttttctcagaacaaaggaagcatttacctgaaaggtgaattaaaacgtcctactctttcagggaagaaccacgtgaaattttattatacattttttaagtcagaaaattattatgaggaaaacataacatggccctatcctcccattataatatttttctccatatttgtgtataacacagataatacaaatgatatctacacatgctataaaaattcaaatattttaaaacatcataaagtaataatcccctttttagaaagtagaagtttcaggcaacaatatagatgtatattcctcttttttttaggggtctgtggcattccattgcatggatctatcataatttatttaactagttcccttttaatgattaatgagcattgggttgttttcagagttatggttgtggggagggcagaagaagcagggagaagattagagagttcttacacatcacgctgcaataaacatgcttatatgtatatactgatatcattttgtgaccattttcataagacaaattcttagcagtccaattgctgggtcaaaagtcatggacgttttaaatcttgacagatttgattgtaacaatttactttctcaacactggatattatcacacttgttatgttttgccagtctgataggcgaaaagacatctcactgttgtttagatttagatttgtttaaatataagtgatgttcaatatcttttcattggtctattgaccacttgtatttgttttctgttagctgtgtgttcatatcttttgctcatttttctattgaactatttctctttttcttactgagttgtaagatttctttgtaaatcgagaaaggctggtgcaaaaataatcgtagtttttgccattacttccagtggcaaaaaccgtgattacttttgcagcaaactattatgtagtttttattattattactatatgttgcaaatatttctttcagcatgtcatttatcttttgattttgtacatattcttaccagtggagggtcttgatacatattgttaccagtggagggtcttgactatgagtcttccaggttcttggccttttgaacacagaattggacaaaatgcacaaagtaacagaagaatgaaacaatgaaagcayagatttactgaaatgaaagtacactccacagagtaggaatgggcttgaccaagtggctcaagagcactggttacagaattttccttctaggggtttcccattggttacttggttacatcctatgtaaatgaaggagtggcccacgaccagtctgattggttgcagaaggtgatcaatcagaygctgaagttaaggtacaaagttacacaggaagacttggcctgggaccagtctgattggttacaggaggggatcaatcagaggcactttccatttctcatctataacgcagtgcaaaggtagtagcctctgatccttttgttacttgtgcatggagaggtggggttttccatttgattcagttctaggaagtcagtgcaaattggccttaggttccctgcctccagaccctattctcctgcctcaatattactttttgttctacagaagtttcaaatatcagccagatttaatagtcattttctttatgactcctaggtaggagtaacttttaaatggaagttttaatagatgctacctactaccatttaataaaaaagaaccttgggcctgattgaagcctctgctatgtccacagagtagcatctatcttcgtaacgtagatgctctaagacaatgagcaaggaatcagaatatctttcttcacagcctgagactggtccagacatcccaacggaaggggacacagcccagtgaccatattccttatagaatcagtcatgcttctccttcgctaaagtagcagatggtcaatttaattaaatacaatataattcatcctatttggaggttgttttggtagagttttttccccttttttgtattcgagaagagtaggagactttttwwaaaaagtcagactggttattaatatcttatgtttaattttgttttttacagrcagcttcaaaagatggtccatgatattaaaaacaatgaaggtggaataatgaataaaatcaaaaagtaagttcgcctctatttaaatacttaattatataaaataagtcaacatgtgctacatggaagaaaacaaatttctctgttacctggatgagaagtttctacctctttagcacgtaacccttctttactattggctggaatccatggtggccaggtctacattctggaacaggacaagtgagtgcagttgtactcagtggactttgattttccttctcactgcagggaaggtgagctatgcccattcaaggtgcctaacaaatgtcaaagcaggaaaatcatttctataaccatttagctaagggctatgaaaacatgtatggagaaatccaaatgaaaagttacaaaacacagccctagcttcttcaagatgccatgtgagttttcctttttttggggttttgtttttgattttgtttttttgtttttttgaggtggagtttcgctcttgttgcccaggctggagtgcaatggcacaatatcagctcaccgcaacctctgcctcctgggttcaagcgattctcctgcctcggcccagcgaatagctgggattacaggcacgtgccagcatacctggctaattttgtatttttagtagagacagggtttcttcatgttggtcaggctggtcttgaactcctgacctcaggtgatccgcccgcctcagcctcccaaagtgctgggattacagacaagagccactgcgctcagccagttttccatattttgatttctgcttttcgaattattacctgaaaatgaacttttcaattggcacttggagagggaaagctagcatctcaaaactccttgtacatcaaaaactcttaagcttttttttttaaagagaataaaaattgtacatatctgcatttgccactcaaaatctaaggtagacgtaccttagtaggtcttatataccttagtaggtaagtctctttcaagagaaaatgggaaatggtattctgttaagtctttaaattttttaaataaaactaatacagattcaccagggaaaaaaaatcaaagaggccagaattgtatgatgtcaaaatctcccatttccttatatctccatcttaacccactccccagaaagggacattgtcatggtaagttcaatgtgtgtatatatatgtatgtatgtgtgtataagtatgtatatatgtatgtatgtgtgtgcttaaacacatacatacatacactgacattgtacatactatacacatacattttcgtcataaatggtatcatagtgcatgcgccattctaccaacttgctttgttggttttacttaagctatttcatggacatctttatttgttagtaagtaaaaattaaccatattcttttctgaacagatgatttaatagtctaccttaaatatattataattcaattaactagctatatattggtggccatctttaaggggggatttgaatttaaaccggtacaacatttttggatagcaatttgataatagcaatcaaaattctctggttgtttcttccaatttaaatgtcatgaataatactttaataaatgttcattgcagaccttgaatataccagtaggctaaattcctaaaatgaaatttccaaatggaagaagttgtgcccttaaagttttaattgctattaccaaatttttctccccaaattttggaccaaaaaatagtttatagaagttcatttctctatgcattcaaaagagcatccttattcgttttaatctatgctaaaattaaaaataagaaatcacttttggtggtatttccagactatgaaatgtaaatgagtctctatgcataagtgatcatcatcaaacataaatggccttctgcttgtgaggtggtggtcatcttacagaggaggagaatttggcttcatgttctgtctgatgagtgggagaggtgtgtgatgatttttgcttattatttctgctacagatagaatctcattctttatgagacagtccttgttacaatcactagcaattctaattgccagttttacagttcaccagttctcaataacaygaagcctctgcataaaatgtttctctattccatggcccccagttgccagttttacaatacaccagttctcaataacatgaagcctctgcataaaatgtctctctattccatagccagtcatatttacagcagctgtggagctcaagttttttataacagcctctrtttcatacattctgcccattggatgaccaaagcacttttacatgacaaaccatgtttcttctcagcctggaaattatggccaccatagtcattaccccgggtgacgtcaggggccctttagctcaaagtgacttgcagttacacttttacttgaagccaggccacaggtgctaccctgaacggaggaagcacgcttgaacacgctggttccctaacacaagactgtgacagagttttcactggtctatggccgcatgagaaaataaggascatgaagtgttgggggttgtgcacagcagccagctacagagcaaagttcaactacgccttttattcctagtgttgagtggccaacagtcctttagtgagtttttcctttattctgagattatttgggggtagtaaaatacccttccttttcttttatgaaatgatagtaataatggataacaggtggtttgtgcttttggaaattttactattccttgaaccaacctgggcaccagacccagttttgtttttgtttttcttccttgcaacaccttggatgatctctgtctctatacctcatcatgggactaatgatagtatcttcccagcccaccctgctggcttgtgaggagaattgaatgaaataatagatattgagagcctatgagaaaaagaaaaccagaatttctatgtaaatatacatattgttatttttgcaaattacaattttggtttgtaaaytgtttttgtgtgcattttttaatcaaacacaaatttctatgctttttttttcaaaacatgaaagtttgtatataatagcagttatactgcttctatagaaggatatgatattttagtaaataaaggctactggatataagttttatttatgtatattttaaatttcattaagcaaataattcttagttaaaatgggtaataattattaaaaataattgactataaaccttactcatttcaagtagtggaaagggaggtatcagaacttacaaaacttggaatagttttctaaaatgtaatttcaattttcttcttttattgaatgaagaaggattgtgactagcacatttcatatgtgcataaaggtactaaagcacctttactttagtaaagttttgagagtgcttaaaacaagttgaatactaaatatgctaagtctcataatctccaatcctgagacactcactgttcacttgttcggctttttttcctttttaaagacagtgtctcgctctgtcgcccaagctggagtacaggggcgtgatcatggctcactgcagctttgacctctggggcccaagtgatcctcccaccttagcccctcaagtagctgggaccacaggtgcatgccaccatggctggctcattttgtttatttttttgtagagatggagtctcactatgttacccaggctggttttgaactcctaggcacaagtgatcctcctgccttggcctcccaaagtgctgggattacagaaatgagccagtgtgtctggcttatttgcgtttttaaaatggtgcaaacataattttagcccaacctacaaccaaaacgcttattgtagctgattttttcctgttaaacatttgtaagtcattaaaatatagtccatcttatcttaccttcttatsaacacttaccttaccaacmaatcaacatttatcttccttgaacctctgaactcagtgcttattactatcatattctgacctctctgagcccttctccacctgacttcacctttgccaagtcatagccacattgtgcatgcactggggagatggggagaggtggaaaacccctgactaatggcttcactacatttacaatacatcaaatctgtccattgattggtccaagagaagccattatgctattagttgtctatctattctgtctatatcagcttctagcatcggctttgaccatcattgttctgctcactgaccttttgtctcatggttgttatttccaggytaaaagtcaaagcacctccaagtgttcctcgaagggactacgcttcaggtaaggtatttctcagatactttaackgactcttgactaatttaatgttcatatttacatttaggcttatggaaagggaaatacgctatcctcatttgaaaacaaaaggtatcttttctaatttcaagaatgactaaatctattaggcattttgactacagtggagatgtagtttttttatccatccatccacccacctatttattggtcacttattaaacatcttccatgtgccaggcacacacagatctgaggcagraatacagtgctaaaagttaaagatagactatacatttgaggaatttatagtccagaagggaaratagattattgtattagtctgttttcacactgctgataaagatatacctgagactgggtaatttataaagaaaaagaggtttaatggactcacagttccacatggctggggggacctcacaatcatagtggaaggcaaaaggcatgtcttacatggcggcaggcaaggtagaatgcgagccaagagaaaggggaaaccctggataaaatcatcagattttgtgagacttattcactgccaccagaacggtacgggggaaactgcactcatgattcaattatctcctacaaggtccctcccacagcatgtgggaattatgggagctacaatgcaagatgagatwtgggggggtacacagaaaaaccatatcaattatgttaaaagtaattataggcccaggtgcagtggctcacacctgcaatcctagcattttgggaggctgaggaaggcagattgcttgagcccaggagtttgagatcagcctgggcaacatggcaaaaccctgtctctacaaaaaatgcaaattatccaggtgtggtggcatgcacctgtagtcccagctactcaggaggctgaggtgggaggatcactgaggtcaaggctgcagtgagatgtgatcatgctactgcaatccagccagggcaacagagtgagaccctgtctcaaaaaaaaaaaaagaaagaaaagaaaagtaattacaattcagtgataggggaagcacaaagttctgtggaattccacagcagcactaatgaatctaatctgtggctgggagtgtggggtaagtggggaagagactacttcctccatcaaaagctgtttaaattgatatttgaggattgttgaaggggtgggggtaataaattattgctggcacattgctgactctcagtcctctccaagtttagcctgcaacctcattccaactaggatcaactttggcaggaaagaagggttagttttgagatttgtagtgtttctggcagtggtgagccaagtgaaatattcaatacacatttctttattagaacaaatacgttggaagatagttttaaaatctctttctatagcattaattataaagatttcctgaatatccctcagtgaaaaccacagagctacagacatcattgatgattctcaacagggcaacagcctaaaaccaaaccataaccttaaatgatgcttactattttattttattttttcggccactgatcaagatagcaataagtcagatagtgcagttcctcctaagggaatcttatcacactgagaaatgctgaccaacctgcccaagtctggttrcaggcctgttggaccactcactaattcacagagtagttattggcatcaycctgccaatcagtcagcaagtttagacagttggtcaggggatgccagtacagtctggcactaaaagagggaccctgttctgggctttaatatctacctaatcaataagtcaaggaagcttcctagttatatgagaacaaacacattcttccttccaagttctaaataaagaaaagaaaccaaagcagactcaacctgttaaagaactaaataagtttgatggacaaattataaaatcatggagtcttgggtttaaaaggaaccccagaggtcgtgtagaccaatatctgatccagggcttaacccctatcccaccaccattcacctccacacacaaggcccagcttctgcttggacactttctgtgatggtttcccatggtctagcaagggayrggcagccctggctggatatagatacaatcaatttccttgtgacttcctatgtctatcctgatggccacacagttcaagcctttaaatatgaagaaaagtagagccaggcacaggggctcacacctgttatcccagcactttgggaggccaagatgggaggattgcttgaggccaggagtttaagaccagcttggtcaatatagcgagatcccatctcttaaaayataagaaaaaaatattaagaaaaataaaaatagagttgtcctgtgcaacttcaaaggagagaattaagaagttaggccatctgagtggtttcttctctgggataaacatctccaggtgcttcagctgtttcgcacattttctgattcattcaacacgtgtttcatgagtgtgtcctgtgtgactgtcactgtgctagatctggagtggggaacaacatacaacccctgaccttacagtgctgaatgactagtggggagtcagataagaaacaagaaagcaaacaggtaaatataaattagcaaacatggtacytgctgtgagggaagatggaagagtgcaatggtggggaatcagtgtggggtaggagaagagcttaggtggtgtgggaagatctgtctgagaaggtgacatttaatttgaggattcggggacaaatgtgcaggaatatttgccacttttagatgaaccaacagcatcagagatgctggacacagattccaggagttcagagtcaattgttggaaacctaagtggactgacatatctgatttcagggtggacctccctcctgattgtcccctcacactcacctgtctgcctgctgatccacccacccaggccctctcctttccctytatttctgcgtggggaaaagggaggtagcatccatctattattcatccttttgcctaacccacacacttgggatcaaccttgatgcctccttttccctcaccttctacaaaaattaatctccaaatctcattgatttgctcttaaatgcctcttaaatattttttccctctctattcccattgctacagctaaggccttcatcatctcttgcttgtcctagggtagaaggctctaagtaatctgcttaattcctgattgcatgtggtcctctcaacttccaccagaaaattgttctgaaataaaattctctttaaatcttttcatggctctacattgctaacaagaggaactgcaaaccactgagcccacatacaaggtctttcagcttagccactaactggctgtgtaatcttgggcatctcatgctcctttcctcatctatattatgcaggcctgaactagaagatctgtcaggtcccctctaatactaattattctgcactcctgcagaaacacagatctctggggctcagggcccagtgataaagtgagcctctcctaacattccctggctttaggcattcacatcttccaatatccctgatgctctgaagtgttctcttttttgtcctcagacacctgctccctttcctggaacccttccaaatagtcttgatgtcagaacatttaatctctcctggaatgcagaagtgtggcccaacaggatcttctaagcctttgcaacacaaagtttgattcccagcaagatagcatcaacctcatctggagcttgttagaaatgcagaatcttggccccaccctagaactactggatcagaatttacattttagcaagatctccaggggatctgaatgtaaatcatatttaagaaaccctgctataaaccaccatctctgtccctattgcctttcctgaactgaaagacamgtagattttattccctcaatccctgacccctgcaaatccattgatgttccagggtctcggaaatgcatcttattgctttgccagatgactggggccttgcccagtttcccctgctcttacactcaatccccggaaatggtccaaaaccaccatcaccacctgcagttagcatcctcccttgccgttctctcccccaccccagttcacatcccaggagcatttccagctgcttcccctgagccttgaggtttctgcacagctgcacgtccagggcctcagaaatcagccctgagagctcctcctgaacctggggagtctttaggatcttggaaactgtagtgtgtggaggccagagcccaccagacctcctgagcctgggaggccaatcacgtgccctrtggagcacttgatccaccaaaggctcctgaaatgctccagccattttccccccacacattggatttatgtcctctttccagttctggaaacaaatggcttcccaaaaccctctaagccaagagtgtgttgaccttggtgatgctgaccttcagagagcagaggatagaaaggaccagcaactgccccacaggaggtcagtaaaagagtcaccataccctcttccctagttagagtacagaaggacaaagcttgaattacacaaagaatggagagctgggtctcctccagggatgcaggtcaggccagtgtggagcctgctgccttcagttcagacccagcaatcccagttcagtctttccctgaggaggaaacatcgcccctaaggaactgctggcccactgggcagaatgcattgccccaagcagctggcattgctgtgggaagggaagatatccaaaatctgttgagtattgactctgttctgggcattaagctaagctcttcacagacatatctcatttaatcttctcattagcaccgttatatagaaattacgatctcggttttgcagatgaggaaaatgtgtctcaaggacattaagtatcctgtccaaggtgactgcagccactaagaggaaaacccatcccagactcccattttgcagctccttgctttgacccaagctcaagtgttcatgcttttgggggaacttttttcttattctgaaggcactagagctcctgacattaatgcaagaactcgcttcccagttcctgagctttcacagttgaacagccttcggtatctttgaagtctgaggtctggctggggatggaggtcagggagagaccagtcatggtgcccgagagtctgctgggatcactgcagatgccccattggttaccccacaagtccttgaggagtcagaactgaacagagcccctctcttgcactcttgggctctgatgtccagsgctctgatggggtggcatccctgggaggtccacgtgtgactcctctggctctgctatcaygcagggaggagatcagagcaaatatagggtggaggggtggcaaactcacttacatggaaaaaataaaaatccagagcaaagaaggcacttggacagggattcttgggtaaatgcccacacagaagtatggggtatgcataacaatcctttgtccactaaagaagtgagatttaacattgcttttgtcatgggcctggtgctcctagtggagccagcatttacctggttttctgtctccctgtccatattcccctggaggtactggtcttacgctgacatgggagagctatatccaacatcagtcctgccatagggaactaagaatagaggaatgacacttgggctcaaaggtattttaaagcttagaaattcctgaaggattgcccaacccaagcttctcattttaggaataactggagaccagagaggcaaagtgactcctgaggtcatgcagtgaggtgatggctgagccaggactatgtcccccattgctgtacccccacccctctgttaatgatcctgtgaagggatgaatagacatacagacaaagggagtttctacgatgataagtatttcttttttctttttttgagacggggtctcgccctgtcacccaggctggggtccaggggtacaatcatggctcactgcagcctcaacctcctgggctcaagtgatcctcctgcttcagcctcctgagtagctgggaccacaggcatgtgccaccatgcctggctaattttctaaaatcttttttgtagagacwatgtctcactatgttgtccagggtgttctcaaattcccggcctccagtgatcctcctgccctggcctcccaaagtgctgggattacaggtgtgagcccaccatgcctggcytaagatgttaagtatttagactcagaacacctctctcagccagcctgaatctgggtcttgtcctcagttccccacattaaatcatgtccctttctcctcttagggcggcactggtgggactggccacccaccgcctcccctgcagcctctgtagttctgctttctgttccttttcggtgtctgtccccaccaccacaactggcccaccctccctctttccttccttctgtgtcctgctgcggtcttcccactggctcccygcatgccaccacctgctctgttgggggagagatgggcagggtctggcggccgggtagcctccagagcaggatcagggctgcagctgaggcagaatgtcagacatgctgtgatgccaccagcatctgccccaggggctctggtgctcctattgactcagaactgagaggctggattcatactccctttgccccagccaccaccacagagtcctgtactgtccttccagccatcccttcccattcccagaccccctggtctggatcagctttcgtctttccatgcctgagttcctaaacaccaacctcatcagctccccatctcagcttgtcactggagcctgcggtatccactatggctggagcccccactggccggaagcacatcagatttgtgtgagcgctcagcagaatctcctgtccctctccagcccagcgcattcattctgcacacatctgcctctaagccctgcttctggggctgacacataagcccctctctcagatgatggaggaagacacactccttcatccttattctctcacccaaatcctgctcatccttcaaggccccattcggccccacctcgggcacatggcctcatgcaagtttttggctgtcactgggcacacctttctctgaactttccccgctcctggcaatgattccaggtgtggggacatttctcagaaaactacatggccctgagttktcctcagtctcatgtggtcattcttctggcccttagtctttatttgtattatgaagtrtggcttggtgagaagaccttggactctgaggtcctttaggcctgggwtggaatcctggctttgctccctaagcactgtgtgaacttggaacagttttgtaatttgagtgagcctccaatttctgacctggggataagaatacctatcctttagattgttctgagaattgcagagactgtaaattcattgtaatagctaacattcattgagccctttactctatgtcagatactcttctaagcacgattaataatgtccattttagcaaaggggaagctgaggcccagaggtgaagcaattcagctaagatctcactcctagaaaatggcagaataaggattctaagttaggcagtctgaccccagagcttaagcccaaatgtgggccgctgtggccattctcacatctccttgtgtctggtgctgtgcccacaggctggggagggctacatgaatcttaaaacctgggtcaggcaaagggaggagtccctctattgtgtggcatgggattatgacatggtaaatggagcataagccccaaaccaggtaaaccacaccataggaaaggctttaactgacaagagggcccgcccaggatctcagcttcctggcagagaccatggaatcacacaaacaaaatcaawccacctggcccacatgaagcttgaacttctcccccaaattttactcactacaatagaggctttcttggatccatgcctttgtggtagccatagtgtgtgattgacgtgggagtamattagaatcagtggtgttttgagtgttaattgaggcattctttgcaatgctcaagatgacggtaacattactaaagcattactgtgtgccaggctttgctaagagcttcagatgtattttattatytgattctcacaaaaatatgatacaggcactgttcttatccttgctttacrggtgaggaaatgaagctttaaacaatattaaattattggtccaagaccaagcagcttgtaaaggtcagagccaggatttgaacctagaaagcctggctctaaactaccacctgtgcactttgggaagctccctgagatactggaaaactgactactgttttggacctaatacctyggactcccatgctttttagtcttggcaattgcctgcaagactgtaactttatgaatatgatgctgtgagttgcacttgggacctgaagtagatagtctagctaggaatcgatggggcaccaacaaacaacctctatcccatacygtatgatgcttttctctcttttctgtctccatgtgccaagatgtctggattgggtcattctcgtttcaccaargttttatctaagtgctcagcagagggctaagtggctcagatgagatttcagctgcaggagccaacacagcctggcttccaacccagctcccaaactcactagccaagtagcctcaggcaggttttacaacctctttcaaaaccaagtttctccactgtaaaatagagataaaaataacacctaccacatagtgctgttataagaatacacttttataacacttagcctggcacccagcacataggaagtgttcagtaaatggaatctattgttgctatcctaatgttcctttgtttgagtcatttattagttcacacatttattaatacattaattacaaatgcaaaattctgtccagatgcaaagataaattagataggccttattttcagtacagagagacatgaacaacttaatcacagcacaggacagaacgaagtacatgtgacatcacggtgccaccagcttccaagagggcccagaaaaagaagtgattgattatgacaagagactgtggtagactttgtggaggaggagtgatagggatttccatggaagaaagaagatgggctgcaggaacggcacgagcagagcagagaatcagcaaagtgcacaacgggaggaggaagctgtctggtgttactgttagtgagcgtgggagcctgccgcaagaartcggtggtgggacagaaggcrgaggcattggaatgtgttgccacagaacctctacttgattccrtagggagycactgatgactcttaaggaaaggaacagcataatccaaactttattttaataaaataactacaaacggtaggatggatggattggagaagaaagataatggagacagggacactagttagatggctaatrcactactttcaccagtgactgatcataaaataggcccccactcactgagaaagggtggagcaaatgcagttatccaggcagggaagtgggtttcataaakgcattttataagggtttctatttaaatggttgttacaaaaactcttgccatcttaagtgttgatcttcagtgatccccagacttaaggtattagaaacacattgaccagatgcagtggcttatgcctgtaatcccagcacttttgaaggcagaggcaggtgagtyatttgaacccaggagttcaagaccagcctgggcaacatggcaaaaccccatctctacaaaaaatacaaaagttagctgggcatggtggcacgtgccagttactcaggaggctgaggtagcaggatcrcttgcaccaaggaggttgaggctgcagtaagccatgattgtgccactgcactcccacctgggcaacasagtgagactctgtctcaaaaaaaaaaaaaagactagaaaagaaaaagaaacatactcccccattgtgccaggtaatcatattgggaagaggatttattcacccaatcttctagagtttcttggccaaccccagtgattgcagtacactctaattcagcattagtcaacccaaagaataatgtaagaattcttttctgttcacgtcaaagtgtgacccatgtttggcttgtagagtgaggctctttcttagcacctatcatgtttttcccaaaagagggtgctgctgccgccattgcttaaaatgtggccactccgatcccacagtatccttcctgaccccatttcacctctgcaattccttgctggtgcctctggagaccccaaatgtttgactctctggagtccggtggtctgctgtggcaggggtagaaatagcaaaaacataaaaataaaactagaaaatgttctgttgaggttctgggaaatttaggaacatccactgggtcctctgtggcagtggctgctcagctgggaatagcaaaaacataaaaataaaactagaaaaggttctgttgaggttctgggraatttaggaacatccactggatcctctgtggcagtggctgctcagcggggcaggagggagctgggaccctctgtggtgctgtcatggagccactctgccacatgggcctgtgtctgcttgattcctacacagcagagtgaatcccrtttaacctctaaggtcagtttatgtgataggctagatgctaagtttctcatactctaaatgtgttttggagggaaaggggtcaaatattcgcctgggctgtcataattcagacttattttattctacaagctcataaactacttaagggccacaacctgtcatatccatttttctatgcccatgcagagcccaggacggcacctcctgcccctggagcgaggcagcaccatgtgggggctcagcgcatgcccgtggaaggcaacctgtagggttcaactcctggctctgccatttattacactatctgacmttgggcatgtgacttatctgctctaggcctcagtttcctcacaaggtttaggtgattttttttttttttttttttgagacagggtcttactctgtcatcccagctagagtgcaatggcacaatcacagctcactgcagcctcgaccccctgggctcaagcaatcctcccatctcagcctgctaagtagctggaactacagatatggaccaccacacccagctaattattttattttttgtagagatggggccttgccatgttgtccagactggtcttgaactcctgggctcaagcaaccctcctgccttggcctctcaaagtgctgggactacagtgctgggattacaggcataagccccaacgcccagcccctcacagcrtctttgagagggctaaaagacggcaaagctctgataatattgcctggcacatactaagacattggataatttttttttaacaagaaaagtcaaagttagagccagagatgatcacagaaatgatcccctcattgtatagatctggaaaccgaggctcagagatgttagaggtcttgcccacactccaacgcattcggaacagagcctggataagaacttaggtctgtctgattccctgtcctgtgctgttcctactacgccatcctctgaagtccttagaagccacatagtatgaattgtaggtctctactgggggacccagaaatgtcccttaacaaagcccacacatggatcagacgcacattgctctgcccagtgggacttctctctatgctttgagaattaatattttttaaaaagtcaaaagcaagtgaacatatgattgtagtaactaacccaaggtcaagtatatggcaccagaaagcccaaagggaagggaaggcaggtgcgaaatgtgtgtggatgggctggggctggccagctgaggctcacacttgtgccttctgcttctcccctgctgttgcagagagcccygctgacgaagaggagcagtggtcygatgactttgtaagtatttgctcctgggaccaggagggcatcagggtcccatgggaggccttttgaaratcttatttctgaattacatgctggtggtcagccgcacgtcccaagagggaagacttggaaaggtcacctacaggcaaggcatactgcataccagctgacttgactggcactcagtgtgcgcctggctaagagctttccacacataacctcatttaaacctttgaggtaggtgttcttatgcccarcttcagtgctggtgttcagagtactcaccagcacatccaaaacaggtgtaaaaatgtttaaatgtttccatatcagttagcaaatgcctctgccctaaactccccagtgcccatcactgcctgacccctgcccaggagccctaaacgaaccaacaactaaagaataagtgtctggcacatcagggggcctccaggaccaaggtmtagaaagtttcagtcacttgcagttccacaattcagacccaggccctcagatctcaggaccaggctctttgccaccaaggtgcttgctgtgatcaagagaacattagcagagctccggagccacagagagagggacctggccatgatgacactggggatgttgtatcagaattatctctttgaggtagctctgaaatgtgcaaggcctgacatcctaaaaacttttcttcacaataattattcctcacttatatcaaattcatccagaatgttagcctgctccaacctgtgagttttagatctggaagggatccaagaagccttccatacaaccacatacccatttcacagataagaaaactgaggccaagagaatgaaaatcacccagttcagtggaatgagaacccaggactcagacctccagtcctgtgcccagccctgggctgtgcacactacctggagtttatacagagtctcagaagacaggagttcctccttcttcaactgcagaaaaagaaaagaaaaatgaggggaaggggtgacttttctgcccatctcttggtcatggagctcctcctggggcccagcagccgcagctccctgagatgcactgcagctgcgccccctgctggctgygcacgcgcgtgcacacacgaacacacacacacacacacacacacacacacacacagccacatgtaaagcaaagaaattgcttggtccacatgcagaggtaagagaagaaaactgagcaagctggctggatgaaaaagagcacacaagggaacttagaaagcacaaaataaaatcagcctggagaggaaggaattacttgccccaaaatcagacaaccaaaatgaagataccagctgtactaaagactgagtaagcattcactcacagctcttttgacttcagtagatggatccccactgcacgcagaatgaaatccaggcttgttaataaagcctccagaatttcttgattttaaacaaaaatcctgctatatgttctcattcatttgtaggagctaaaaattaaaacacttgaactcataaagacagacagtagaatgatgtttaccagaggctgggaagggtggtcgagggggcagcrggtggggggagggaaacagggacagttaatgggtgcaaaaatatagttaggatgaataagacctagtgtttgacaacagggtaactacagtcaacaataatttattgtgcatttaaaaayaactaaaagaatataattggaatgtttataacacacacaaaaaatgaatgcttgagtgatggataccccatttacccagatgttattactacacrttgtatgyctgtttcaaaatatctcatataccccwtatatatatatacctactatgtacccctacaattctttttttttaaagaccaacaggaaaaaaaatcctgctatataaaattgcttatgaaaggcgacaggccaaagagcaagtggaaagtcatgtacagatcatgcaatgtgataggcagagtgtgagggcggtggacacagaggccagaggacctcttatgtcctgagtcaaatatttcctccacatgaatatatgtacaaacggtatatacataaactacctctgaaaaacatgcacaagaaacctagtgactctttctgcctctgcggtgagaagcagagaggctgagaaggagactgcactttatatccttctaagccatttggacttcagaccgtgacaatgtattttcagtgtggacttaaatgaaatgtggattttaaaaaaacaggccaggcgcagtggctcatgcctgtaatctcagcgctttgggaggccgaggctggcagatcacctgaggtcaggagtttgagaccagcctggccaacatggtgaaaccccagctttactaaaaatacaaaaaytagctgggcgtggtggtgcaatttgtaatcccagctactcsagagactgagacaggagaataacttgaacccaggaagtagaggttgcagtgagctgagatcctgccactgcactctagcctgggcgacaaagcaagactcggtttcaaaaaaaaattagccaggcacggtggtgcatgcctgtaatcccagctacttgggagacyagggcaggagaatcgctggaacccaggaggcagaggctgcagtgagctgagattgcgccactgcactccagtctgggcaacagagtgagactccatctcaaaaamaggaaaaaaaaaaaagaaaaaaaagagagcaaaccctgagtccatttgaagccttgaccctgcagcttaccaattctgcttgaaatttttaaaaaatctcatctgaaagatatctagctggccctgtgtgtctcctcaccctcttcgtattaaacctattttctcttcagtgatcagcattcataatagataaaacccattggttattctattttattgggccattttcctatcttttaaaaatatgttttattatctcctcttgttatttgttgtggatctacagagtgtcagctcccattagcgttaagtagttcctgtgtcccccaagkacagtgcagtggtggagacgataaactttggaggcagaaaggcctgcttcaaaccccagctttgcctcttatcggctgcctagccttttgaagtcaacctctccaagccttgtctcctgtcactgctctggcctcccaaggcaggaatggtcctgayggccaggcagcacagacggggatgctgagcacagtgtctgcatctgcacttgcaggacagcgactatgaaaatccagatgagcactcggactcagagatgtacgtgatgcccgccgaggagaacgctgatgacagctacgagccgcctccagtagagcaggaaaccaggccggttcacccagccctgcccttcgccagaggcgagtatataggtgaggtcccccgcagacctgsgcactcggccttccaggcccatggggaggtgggggtgtccaagattgcrgggtggggacaaacctggctgctgcttgagggcctctgccagccgcccgctcccgccacctccaagcaggggatctgggctccgaggtaaaggatcccaagctgtagggctttcccattccaggggaagaggcgtctttcctagattgggaacattgaaagcaggcataaacaaacaaacaaacaaacaaacaaacaacaaacccagcataccctgatggttgtgctccctcccaacactccaagggaaagcaaccctgagattagtcccacttttagggcttcgtgtgctcaaggttctgggatttctcttaagaagtctgtacaaaacaatgaccttcgaggatcccagtgtctgcctcaccttcctcccatgcctagtccagactatgcggttttaccaggggatacaggtgctcaggagccccaagcctggaataagcctcatgggttaaatggacacagcttgggtctgtttttttttttgttttgttttgtttttttgcgacagagtctcactctgtcacccaggctggagtgcagtggcatgaactcgcttcactgcaacctctgcctcctgggtccagcctcctgcctcagcctcccgagtagctgggtccacaggcacccaccaccacgcctggctaacttttgtatttttagtagagacaggatttcctcatgttggccaggctggtctcaaactcctgacctcaagtgatacaaccgcctcggcctcccaaagtgctgggattacaggcataagccactgcgcctggccccaagtatgcattttaatgcccatctttgttccagtcttggcaggtgactaagttccccaaaggttcagagagcaagtatgtctgtgatggtcatggcgatgccagcatttgtatggaccggctctacatgtaatatctcactgccattaaccccctccttacagtgtaccaggcactgctccttgcttcactgaatgaaagtaaagtgaaggccagctgggcttactgggttgccacagttgatcttttgagcacctgccatgcaccagaactatgctaagcactgagcattcagctgcactcaagatgcacatactcccagagatcttctaatttacagtttagtgctttcccctgggggtctacttaacctcctcgataatcctgaaagaggtcagaggagtgaactgactgggccaagatcctctaagtgatggagctgggatacaagccagggctctcagcttccgaagcccagctcatcacaactcggctctgtgcaccacccaccatacttggtgaatgatctttttcaatcatcacagcaaccctggggaggaaagggctactgcaattcagggtggttaagtggctcactcaagaacacactcttggccaagcgcrgtggctcacacctgtaatcccagcactttgggaggccacagtggatggatcacctgacgtcaggagttcaagaccagcctggccaacatggcagaaccccgtctctattaaaaatacaaaaaaattagccgggcatggtggtgcatgccagtaatcccagctactagggaggctgaggcagtagaatcacttgaacccgggaggcggaggttgcagtgagccaagatcgcaccactgcactccagcctgggcaacaagagtgaaactctgtctcaaaaaaaaaaaaaaaaatcacactcttcaaagcctgtctcctgtgttttgctacttctgatgggcttaaatattacattaaatatttgtttactcagaaatctgagtaaactccaggagctgcaaataaaactgacaagagttataggcacagaaggaaggatgccctcatgcctgagtacagccacaccaccagaaagaggcttctgaggaggcagcggaggtgaagttaaccacataccttcaacaaggagtgagggctgagggcaggggcaggcaccaggagcatagaggcgagggcctaacaggcaaggacagctgcaccgggcgaggtggggctgtcacaggaagcagcagcaagaggccagtgatgcaatccagaggccagtgctagcacctgtgctgttcccagtatgaagaacatgccaggttattcctatgccaagattttcctaaaacacatcagtctgaatctatgctcagctcactgaatcactgggtagacttgaggccgcctaacgcctctctcacatggcacaggtgatataagttctacttattaggcagacacactgtacctactgccttcactgcaatcttcctaatcccctcaagatctctaaggtcgatattacgatcctcattttaaaaatgaagaatgttggccaggcgtggtggctcatgcctgtaatcctaacacttcaggaggctgaggtgggtgaatcacttggggtcaggagttcaaaaccagcctggccaacatggtaaaaccccatctctactaaaaatacaaaaattagccaggcatggtggtgggtgcctgtaatcccagctacttcagaggctgaggcaggagaatcacttgaacctgggaggcggaggttgcagtaaccagagatcatgccactgcactccagcctgggcaacagagcaagactttgtctcaaaaaaataaaaaattaaaaaattaaaaataacaatgaagaatgtgagtcccagagaggttgaataaccagccccaaagagcacagctagtgagtggcagagcaagggacagaactcagatccagttggccttagagcctgactccttttctgatacctgmtgagaaggacagtcctggaccaaagggatcccacagattccctgtgaatggagcgaaatcactgagggaaggagcatggaagttgatccacrtgagtaatcaccacctggatacactttagcataacctggggaacttttccaacctgtaatgccaggctcctcccgaggagttcaaacrttgccaggctggggtggagcctaggccttggcatttttaaaagccaggagcacctcacccccaccctgtgccctccagtgctgcttccatcccctctgtgtggccaagtgttgggttgttggttctcctgaacctctgggtgtccatcactgccccggaaggatgtttttaatgaggacrttcttccagtttttgtcgtttaagtcaataagcagttgaaattttgggcctaacatttcactttactctttcaaggaatgccccgtggatcatttgtggctacatagacacccgtggttttatactttctggatctcaatggcttccacccaggaaatgatccagagcctcttttatgttatgttttttgtttgttcctttcaagacaatcgatcaagccagaggcattccccacccttcagcaagacacttcccagtaagcccagctggccttcagagaaagcaaggctcacctccaccctgccggccctgactgctttgcagaaacctcaagtcccacccaaacccaaaggcctccttgaggatgaggtaaagtaaatctgtgccaaaggcttcccaggacacagaggggggtggggcaagcraccaggacagcctgcccgctggctgtcctccttctttacaacctgctattgactgccccctctaactctccactattataccaaagggacttggttttctccaaaatggcttattgtaaatatgtcagtttactagaggtgtatggtaaaatatcaatactgagtctgtgcccctcatattatcccctccttcttccctggggtttcctgtgaatctcttctttccttcctaagatgttcttcctctctctttattctcctttgcttctctgtcctgttgttactgacagcaaatccatatgggtctgcagcaacctcaattcttgcctcctgggcgtaaggcagaaggagagaccaaggcaagtttcagagcaggaatgaaaagaagtcaagtacacttagaagagggccaagcggacgacttgagagatccagtgcgctgtttgacctttgagttggggttttatacactagcacacttccggggtcttttgtccyttctcccctgattcttcctttgtgtgggctgtccgcttgtgcagtgccctgctagcatttgggaggtgagcatgcgcagtgtgcttaccggagttgtacgcacgatcccttgaagcattcttgccttaccagctgaatgtttctagaaggtcaagtaccagttaaacgctgccattttgcctcttaatgcgcatgcttgagcccacttgcccaactcctgagatcttatcggaaactgctcrtcaccagtttcaggttttttctatctattgggagmctgcttttccctggcgctggctgtaaccaattattattttagagagacaattaacagccacctgacaatcacctgatggtctcctgacattcctggggcaggggagccstctcctgccctgctcatgcctgactagctattatacccactgtaacactgtcgccaccttgctttckttcctccaccttcttttctctctgctcctccacttccctcttctcagatgcagagggtgacatgggccaggatgtacaatggagatagctagtctgtaaggtaccccgcacaacctgtggaggagctaatccctcacttccctttgacagctcttgcttctcacttcctccctccccacagctgccctgccccagcaggtgtccagagacccaccttttcagatggcccagcatccaactctgggtttacctcctcaatcttccctgtctcagcacctagccctttgtgttgttttccctatgaaatagctcctatttgaaaatgaataggtaaactcatccaagctgtygtagtaactgataaagcctaatgtgttatggctcccagaggtccctgcattttaaataaggacagagaccagcctgcagcttctctaagaaataacttgcctgtagaggataaaacttatggcttacacacatgttgtgaaatgaccttcattccgcctttataaaatttgcagcccagcaggagatggaaaagatggacttttaaataaaaatagatgcagcatctaggcccaaattcctgctttggcccttctaggtgtatgatttggggcaagctagacaacttctatgagtctgtttttcatctctgttattttgagaatttaataaaagaacatatgtacagcactaaatacagtgcctcacacacagaggggtttaatatatgtcggattcctttctaccatattctagagccttgacaaaatccagttttctagtttcttctgaaaactgaagatctagcaacaccaggccagccatggcctcaaagcaactgggccccagggcatccccctctctctcagctgtgaatcctggtctcttttttgatttgtcatagctcccacaatgcatacagtgcatgtacacaccctcaccctgcacacactccttcttactattacctacccatctgagaggcgatgttgtcctttcaagggtgggaatagggtggcaaagagaagctgagcaggggaggggacaggatggggagaccagctgttaggatctcactgtaaattatttcagcatttggcaattccacatgaagacacaaattcagatatagaatgcagatgaatactgtgggttatgtaaggctcttcatttctgtaaataactgagaatggaccccagggagtcagggcagaggtttgctaatagcagccttgtggaggtggctcaggcaagtctgcaccagtgggaaaaagagaagtatgaaggcgggggcgttctggaatgggcagatagagagccaatataagaaagaggtgtaaaaacaaataaacaaacaaacagaagccaacattaagatatggctgaaccattagttgggaaaagargaagtcaagtacaagcataaataaaagtgtttaaccctgctctgcaggttataggcaaaatacagagatacaggctaaacagagagctggaggtggggcaaagacatttaggaggaaggagcatctgtgctataatgagagaggctaacacttggagaatgttgtgtatccactggtgttctgagcactttgtatgcattatctcattaaatcctcacactaaccctatgaagtctatcatcagccccactttacagatgaggaaacaaaggtgtaaaggggctaagaaacttacccaaggtcacagagggaatatatttagagggtatttttataagaattcaataaaataatgtatggaaagcttttaaatgcttatatgagtggtaatgaggatgcagcccatgtgggcatttaatagctaatcaaaatgactcckgctaagtaatagggtatgagccgatgggaaagtgaaaataagataaattcacgctactcctatttttcaaatctgtagtcctagggggaggcaaacatgtaaacaattatgacaagtgtcttattaatactgaaacatctaaacattggagttgatctaagatgatttttaatctatttttaattttgaatcatgtcattgtaataattgaagaaggatttctaatacctgtaggtcatggtagtataataatctacctggcttcaaaagaccaatcactgattcactgaagtcaagtttttgtgttttgttcatgaaagaagggggttggtattaaaacactgcagcaatgtcaaagtggtcaataagaccacattatgtcctaataaaggacataaaatgtgatggttcttggtcatttacttatttcagcaataacaacgttaaagcattgaattgcaatgctgggaatatacattttacattccttctcctaaaaccctataaagatgagaaagttgggcagacactacaaacagaatttgttgagactggatcgagtcttttttcctatcagtcttctttgggaatacaaatgtctccattccagaaatatcattgaagtggcatcgttgtctggggtaaatacctggggttcgtcgtctcgcactgacaagattaatgacatggacacgtgtgggtgggttaaggagcagaaagtttaatagacagaagaaaggagagaggagagcatctctctctctcttgcaagacagtggaatctgaagggaaaaccaagcctgakgtggaccacagcagattttagaggcaggcttcaggaggtgatatctgatttatacagggtccacagattggtttgatcaggagtgacatttacatggtgcagaagaggctggtcgccccaccctaatcttattatacaaatgggttttctacttggccagtgccatcttgtctgctccttactgtacaggtggctggcaaagagaggggaagacagagccaccattttgatcatgcctagtcacaggtagcrttttcctattggcacaactgccagcattcacccatgcaagcttccagcttgcttgtctatatcagcagcttgattttacaggctactctttgttagaaaagaaaatgattttggggctgctttttattaaaaggaaaaccttaccaaggacatcttaccctcactatctgcctaagtaattttttcttaactcctatatcatcatgactctaaacagctcagattctaaacactgcagataaaaacattttctgtaatcaagcactgcagaacaaaacaagtacaaaattaagaatacagaggaaagaatacattttgaagtggtcaagtaggactgggttagggcctggagcttccaacttccctatatccattcaggcatcattgccaagtgtcaataccaatattctgtgttcagacataagatattgaaggattttgttgactacagggtttaagagggtggcatgcctcctgggggctcagcctctccttttataggaactaacgcctagaagagaagttgggttcttataaagcatgtcactctggctactaatgaatccgaaaaggtgaacccatagaaccaaaaaggtcctgcagggatccgcagccactcaacatcccattattcaaagctgctaagtcagcccatcccagccttggctattgggttaggcaatttcaattcaattcagtgaggcattcgactggccaggtactggaaacacaaacacagagaaggagaaggccctgcccttcrggagttcatagtttgacactgtggggccagagacgaagcagagatgaggaccaggttccctgtgccacagaggagcaagtgcccacctctgaatggcagaatccaggagaacttccgatgattcagcaattaactcccccacaggtcatacatctagaaaagacccaagcacagatttcctcccaggtctgtatgattccaaagcctcatctccctcagccagatcatctctaaatataactgcagattgagatgtgtgagtagaactctctggtgcctctcggccagcttcagaggtgaagaaagagataagaaatagcaattaaataaagagaggatagataagacagaaagaggagggggaggatggaaggtactagaatgtggtggataaaagtatgggtgctaaattattgaactgcttgagttcaaatcctggatctaccactttttttttttttttttggaracaaggtctcattctgttgccaagcgcaatcacaactcactgcagcctcagcttcctgggctcaagcaaccttcccacctcagcctctggagtagctgggactacaggtgcataccaatatgtttggctaatttttctatattttttgtagagacagggtttcaccatgttgcccaggctggttttgaactcctggactcttatctatccacctgcctcagcctcccaaagttctgggattacaggcacgagccactgtgcccttctgggtctaccacttttaaacttgacaacttgagcaaactacttaatttttctgtgcctcagtttcttcatctggaaatggagccaatggtgatatctctcttattgtgttgttagaggattaaatgagaaaaaaaacatgtaaagtacttagaagaacacctggcaataaatttttgtttttgtttctcctagtacccttcttggctgcccaccagggcaggtggtaaaaaccagttttgagatctggttacctcatttgtgtcttgtcaatataaaatctctccctccctgcatttatcgtcatttaattattgacaaaagtgctaagacgattcaatagagaaatacttttttaaaacaaatagtgctaggtaaatggtgctagatgtatccacaggcaaaagaatgaaactggacttctaatctcgcaccatacacaaaaattaactgaaaatgtagcatagacctaactgtaagagctaaaactgtaaaactcttagaggaaaacacagatatgagtctttatggctttgggttaggcaatggtttcttggatatgacatcaaaagtacaagcaataaaagaataaataaaacagacttcaaaatttaaacgttttgtgccaccaatgataccaataagaaagtaaaaaagtaacctacagaatggaagaaaagttttgtaaattgtatatctgatgaagaacttataactagaatatatagataactcttataactcaataaaaagataaacaacccaattaaaaatgggcaaagatttgaatagacatgtctccaaagaatatacaaaaattgacaataagtatataaaaagatactcaacatcattagtcttcagggaaatgcaaatcaaaactataatgagatatcattttgcacacacaaggatggctgtaataaaaaggatgataacaagtgttggtgaggatatgaaaaaactggagccctcatacattgctggcaggaatgaaaaatggtgcagcctctttggaaaacagtttggcagtttctccgactgttaaacttagagctaccrtatgactcaacaatttcacttctaggatattcccaagagaaatgcatgtctacacaaaaacttgtacatgaatagtcatgacaccattattcattacagccaaaaagtggaaaaaaactcaaatgtccatcagctgatgaatggataaacaaatgtggcatactcataaaatagactattatttggccataaaaagacgggagttgtgatacatactataccacaggaaaaccttgaaaacattatactaagtgaaagaagtctcaaaagactacagattgtgtgattccgtgcatattcaatgtccagaatgggcaaaatctatagagaaagaaagtagatttgtggtcgactaggtcaaggaagcggtggatggggagtgactaatgggtgcaaggtttctttttgcataaaaatgtcctaaaattagattgtggtgatggttgtatatgtctgtgaatatactaaaagtcaccaaattgtacaatttacatagtagaattttatgatatgtgaattgcgtctcaataatgctttttaaaaaaatcactccctcccatacagtcaactatgaatgtacagcattcttctcattcagttttgtatttctsttaggctgattatgtggtccccgtggaagataatgatgaaaactatattcatcccacagaaagcagttcacctccacctgaaaaaggtaagagtttgtcgccttaagcacctgaaaatttttagcagttratcaggatgtataagagtatttggtagtaagcactaagaggctcagaaatgacagtgcccaggactttctcccctgggccacagtgtgtgcttctttggctggttgggcagacagcatcagtgacaacccatctctgtgtatcatagcccttccctgccttccccttcctcttccatgctttaatcttcccatctcacattatgaaagcacctgggtagttctcttcagctgccctcgcttcaaatggatttctcataaaacctaatacaatgtcacaagccaccatgttggccttgtaaacattgcaccaagaacagtttctgcagaggagtgaaaaaatgaaagagtgaaatatgccctgagtcctggttctttaaatttagtagtatgataagcctatgaaacatttcatccgtaaacccttcacagaacaacaaatgctatgaccaatgaattaccttaaaaagccagtgctacataagattaggcatggaaacagggtatgtttactctgaatatagtcactatggagaatatgatccagtacaagtgatacctcttcaggtaacattactcatctactactctcaactccatggtagccatattcaggtttcagtccgccatcatgtagcaaccctctcccgtactccgtacctatcaccaacagcttcaagacccacctgaattcccaagccacccattaccacaaaagaacaaatacacattccctccttaccaacccctctttaaaaaaacaaaaaagaamagaaaaaaacccatgaaatcccagagcaatggtgtgtattgcatctggtaggggaggtggagctattaattgggcccctccagtaaggggttcaatacactcttgatgaaaaacaaaaacaataaaactcctttatctcttagacctcccacttggcaaatgaaattcaaagccattattcactttaacaagatctctatcatcaaataatcaaataataatatatcaaattatgaatctgtcattgatattcccattctaaagatgtttcttctaagaagacttcttttattggtttgtgtgtctaataagggtgtctcccrttctttgcaaattctctggtctggtcatcatttttccctgagtgtgaattttcctcaatggcatgtatctgtaatggttttatgtatrtatatatatatatatacacacacatttctgtgtttaagctcccatggtgaatagatcaaccaagccaaattcctcaacgcccgcctctcctccaggaacagcttcaggtaaagtgtatgtgtgatttggtttggttttacgtctatttcaaataagaaaaacagatcaactatgaagagtaatcacttgtatttccaaatgtcttaatattgggaacagaaggccagtcctcatcctcatgcactgtctggtggcacgtgtgtggaagtggccatttccccaggccttttggcatctgctagacaagttctggttttcaccctaccttcctgggcaccttgctggcttctctgtgtccccttccttgactgagggggtcccggaatttagccctcagccctcaacccacagttctttcagaacatcatgatggttacaagcttggttttgagccagacagacctcggttggaaccccagtgtgccccgttaccagctatgccaccttgggcttgtacttcacctctccaagcatcagattttcttttctgtaaatggtgctcatagcccctactctgtgacaggagaattctgcaaatgtgaatgcgaaactcttaatgagtgcctggtacacactaagtgctgaggagagagaatgatttttcacttctgtagcgttcatcgattaatctggattcatgtctcaagtctacactggtaactccctggcatccaaccccaacctgacttcccttctgaacaccttgatgctcccacacaggactctaaactcactcctccctcccctgcgggcacccctgtttctcaatgcgtagagcctccaggccacatgctccaaatcctgcttttttttctcctgaatttgctgttccattttagctgtgaccaccctagtctgggctttctttactcagccaccttgcaccttcttgtccagcagccatacccctgcctcttggctctctcctcagcgacaaggactgagccgctgaactcctccagatgttaccagtttcatctcaccacaaagctagtctttgccatgtcacccctacccccaaaccatgaatgttcctggttgctcctataggttttggcaacccccaaggctgagcccaagacactgaggggtgcccatgacccccattaacagcacagagaggtgtaggagcctgctctccagcattctcacaggcatttcctctccctctctccccttgtccctctcccctaggcacacatatgcgcgtgtgcacacacacacacacattcatacacacacactctcttctctcacagagctgaacacaagtcattgagaggctgagctctgcttccagagacaggctccttcayagaaaatgaaagaacagtcgagtattttaaaaatcttttcctggactcatttcttgtgaaattattcactttcttcacaagttctggttttacttaacctctcctcagaacccacaagcgctttataagtggggagtggagctcagagccatcttagccagctcatcttaccctctggagagacaaaggtcaaacatgccaatctaaaacatcgtgaccaggttgcttaggccccagcagaaatggagactcctaactcccgataactcaggatgagggctgttgttactggaatagaaaacctttaacaaataaataaatgaagacctcaaccctcctttagagaaatagattactaatatctggtgtttacctcttacaaagctctacttgccttacaaggacctcctcttcctaaaacacactgccttacaagcacctcctcttcctaaaacacacccagtactccaatcagcctgtatgtcacgggtcttgcttcttggtctttgtgttctcacttttaggacacctaatcctactcatccttcaaggcccagcttgaggcctccacctccaggaagactcctctggtttctgtagccctcagagagctctcctttgcaggaagtctcttcccccttacacttagcccgtacttattccctaattactttgtgtctcagtctaatcgcttcctaagtacattgcaagctccttggagaccttgccttcaatgtcattgctcaggaggctttacctggccccaagctgggacagatccctctagtgccctgcacatgccctgagatttctgtctttatttgctcacagctgtttccagggcctaccccaggatctggctcaggggaggtgccgagactgtggaggggtcagttggttgagagggtgaatgagtcctcaaacactggttgtattaaatatttaaagaatcaccaacagggctttagccagctggatttattactcataagtttgctattaacctggtatagctgtattttaatactagggtcatcagatgaagaaagcaaatctaaacaagaaaataatgtcctggttatgtgattatcacatacaggtgggagtacctacaggaagggggaagaagtgaaataattttgaagggacaagcctaaacagtccgagtgggtttccgagtgtgcaaacagtggaaccttcagagattatttttacaaaagaaatgatcagactactagcctgtgtctttgaataaccatccattcccctttaaaggcttcagatagtcccccagtgggcatcacaaaagtgtccatcaggtgcctagttggtgtttctgtcaaagcaccacaccacatcagtttcctctggtcaatattgctcttggtcctttgatagccaataaggtgcctgccgagggtgatatagtaaatctggtgcagtgacagcccctgccgtccccgctgtgcttgagaagccagtagaatggatttagccgactccaaagccagagrtttaggtcctggctctgacatttgctaggtgccggactttgaacaagtgaagtcatctctgtttcttagtttcttcctctgaaaaaatggcacctatgcctaggggtatcatgagtagataccatgagaattaagtgactcaatatagatgacttgcactcataaaatgctagtgctttgttattattattgttattattcagaatcccttgttcaacctgccttgatccatgaccattctggcagatattatcagggaacaatattgtttcatgggccagtgacccatgaagagtcatgctccatccttccctagaactctgtcttcctgaggcaagaccataggctttccaccagtgtcctccgtgacagtgttccaccatgacaatcatgctgtcctctgattgtcagaagttatttatagggaaggaaaggaaaaggaaggttttggcagactattctgagatatgcaagaaaaggaagcatagtagaaaagccaggaggaaggtctgacaaagataatatagtggccaaaggagcccttaacatttcagaaragggaaaacccctgggatgaaattcagacttagaccttctttctacttccttatttttcatacaagattttgttccacttccctgagatcttccatcaaattctattgcagtcaagggtactttaacagtgtcagtcttaagtattcaatttgatacaccagttacttaaacacagggagactcctactacacattcaggtgacatttcagtttattgttttcatgttgtcacatgaaatgtaaacattccaaacgcaatctcttttccaaaatgtttcaaaaaatcagacccagttcaggtaccgtggaagacagctgtcatggagggggcattgcttcccagggtgctggggaaggcttccaggtacaatccacaccacccactctttgctgttgctcccatccttgagggtttaggaaaagagtcagtgggctctgagtagaagcctgggagcctctctccagtgacatacatgggaaggaacttcctgaactctatttcaatactttttgaggccttttctttttcttgtctgtgtttggatgagatgatatggagggtgcatgtatcttccctgttataaattctgagagggcagaggcctatgtctgcttcttcacctcttcctcggcccctaacacagtgccttcatgtgctttacatgtaccaagtcctcrataatccttggtaatggattattatttcaatgtgtgcttatctgtgctctatctcataaactaagaaagtacagactgagggcagcaggtccagcctgtacttacagagtatgccctataaatccattaggaattataggccaggcaccgtggctcattcctgtaatcccagcactttgggagaccaaggcaggtggatggattgagtccaggagttcaaggccagcctgggcaacatggcaaaatctcatctggacaaaaaattagccaggtgtggtggtgcatgcctgtagtcccagctactcaggagctacttagtggggaggatcacttgagtccaggagtttgaagcctccagtaagctgtgatctccccactgcactccagcctgggtgacagaacaagaccctgtctcaaaaaaaaaaaaaaaaamaaaaacggaattgtggacttgtatgtgtagtaagttcttaagaaaacatttattcagttcagttaagttaatgaagagcctcatgaagagaccccttggtctcactgagcaatggtgtccaagcaggtgagcatcatgtctgaggcagctaggggatgctgagggggctggctcagctctggcctctcccctcctggcctgccctctgtcccacagtgaagatccatcctgcttctctttcacttcctccctcataacgattgtctggcatctatcttcaggtacaggaagggaggttgggtgcaggggacaagacccttcgggtcccttctatgacttgagaagatgagatttgggcagcagcctgcacttgtctcaatttgtccattaaggaaaacctgtcggcgaaagcccttgaaaactcagagatgagtgagtaaatatcctctgaatgtgaagttagaggcatttaccgtatttaagtgtgcttataaaggagcactgtctgaggtctgtgtcaggagtggtgggttggagcctctgtctctgggcacctctgccgtgcacatttgtgcagtgtgcacagatgtaggtgtgagctgttggctcccttcctgaaggacctctgtgggggtcctcactgagtcctcagaatcagtgggctcaggacttgccccatggggcagggggcgggtaaggagaaggtcctttagaaatgttaaggtggagtccctaacccccatcccagctctgagcttatacactgacacttttaaaatgtgtcatcacctttgcccacaagttttccttaatagcttcaatataactacctatatgtgcttaactgaaagcaacacagtatgtgcaaatatttctgagcctgccagagaggccagcctcagtgtgagcatcagcccccggctcaggactyggggactgagtagtgtatatgtttgtgcaggtcgaaacagtggggcctgggaaaccaagtcacctccaccagctgcaccatccccgttgccacgggccgggtaagtacctgttgcaggaagcagcttttgagatctggggagtgaggatggtgataccccactgccctgttgacttcattagaagttctccccatggcaggctgcaacttggaccaagagtaaggagccctgctaacatcaaatgagccaggcatggtggctcaggcctgtcatcccagcactttgggaggccaaggcgggcagctcacttgaagccaggagttsaagaccagcctggccaacatggcgaaaccccgtctctactaaaaatacaaaaattagccaggcgtggtggcacacacctgtaatcccagctacttgggaggctgaggcaggaggatcacttgaacctctgcaggttgcagtgagctgagatcacagcactgcactccagcctgggcaacagagcaagactccatctcaaataaataaataaatgwataaataaataaataaataaataaatctagaagtatttcctcctgtgaagttttagttaagtcttgagttcactaacttacagtgttccacaagacaccctgactttcagaagctccagcacctgaatcattttcagagcctctagcaggttttgtctttacttactgctgctcagttttatggtctgtaaataagtgtgtagatatatactatgtgctggtcataccagggcactccctcaaagccatacgactgaagttcctctcgaaagtgacagtcattctttcttattgaatttagaagggctttgtaaacagtcaggtgasgattgtaatgtgttaatattacaaacgtcacccygtaaaattatgttggctcaacaggttatttggaaagcaaatttaaatatgtctaaagctggcctgaatggctctaatcttatttctgtctctgtgtaaaccaaagaaagcctccatgttgaaggtttattaaccaaaactctgcatacgtctctcttagttcagctgtatcactttgggcaaactacttcgtctctctgagcctcagtttcctcaccttaaaatgtcactgtaaggtttaaatagcacctgaggagcctaacccagtgccaggcatcttacaggtgctcaggaattcttagtgttcttcccccacacttcagctctcagccgaaaacaaagcgagagagagatatggtgagggtttttaaattaagaaatttaacacacagaaaaggagcatacaaccttaccaatattagactccagtctctattggaatcttgagttcattgacttacagtgttccacaagacaccccgactttcagaagctccagcacctgaatcattttgcaaactagaatgttagtgcaggcaagtaccttcaggaccacacatcagtggttttcaaacttgttttggtttcggatctctctgaaagaaagcctgcacagaagacagtggagaatagtccctagagacarggaggaagctggagtgggcaagtgcagctgcaacctcacctgctggaccaccctcttacctctaccctctgtcctggacagtaacccccacagggagctgttggggaagagggggctccacagaaacactgaaaatactgatcctggtcctcaattgacaggtgaggaatctaacctcacactcaagacaaagaggcccaaggtcacccgccaagtaattagtgcaactggtgcaagagtccagttctgccggactggtgccctactttatccccagttgaccccttccccatctgtcagcagactccatctgagcctaggaggatcataactaaatcccacttccatccctctccaccctgcaaggatagtcttctacacacttgtatcgctttcataattctagcttaaatttgagactaaaataatggtaaatagctccattttgtcttcgttgtgttttaacaaagctcatctctttttattccccaggaaaaaaccaacgacaccactgaagacagtaagttaattttgcatttaaaagtgcttcatatttcctgcagtgtttattcttatccatttatttaaagttgaaaatgcttccagctatggtgaacacagcaatcttagcaactgaagttgctgcccaagcagtccaagagaagcttcaaatcctcaggtagccagggaggatgctcctccctggagcatagaaggagctcatcctcacttgatcccagcagcttcactgagtgtgcgcagcagatcagaggggcagccaggttccctgccctctccacaggaagcgtctgtgtccactccccaccacagctaatggtagaccattgtgtatcaggcacacataggcctcactaaacycagattctggccagaacatggtgaacctgggccacaacactacataagggagcccacctggacctagtccctactgtgaagcctgacatttacaatcatttagcaaacacacagaaggggggggtcatgagaccaaagcagatgccagatgcctgctgtacatgggttactatgtggcagctgctgggggggtcatgatttccatcaaccctgttgacaaggcagggaggtttctccaccacagtgacattgctccttcataggacacttctggctgtttgttgcttaatgcaaaggttgggctagggactgtgggtttgtaattgttgttgtgattgaaagaatagcaatgcatcaaagaaaagtgctgccaaaatatttattttaataatattgctctgacatttatttccacattctgctatattgaataaccttgcctttttttcttttacatagactccagttgcctctcaacagaatgcttcaagtgtttgtgaaggtaaaatctattattttgaaggatgagcatgtcctctaaaagttattttattaaggatttgtatgtacacatttattacattatttttggggcaattgtaaacatgaaactcaattttctaaacaaaatagtttttgcaatgagcaatgaacagcaaaactagctcagaacctcagcatgtttagagtaggctacagaatgcatgcaaaaacctgccttttggcagacagatatgacttgccaggcaatagtgctaggaccttacataaatgtgaaaactaacgtagagccattcacatgttttagaactaatagcttacttaaagtaatgaaaactttaaaaatctgtttatttgaacaagttcttttgctaagttttcaagataatgttttcaaagttcaattgtctgtcttcttagtacatcttcaattgcttttcttcctttttttttttttttttgagttagggtctcactttgtagcccagactggagtgcagtggtgcataattatagctcactgcagcttcaaattcctgggctcaagttgtctttctgcctcagcctcctgagtaatttagaatttcttcctttatcatcactcaaaaatcttatatatatttttagaaactgctcatgttaaaaaaaattgtgtttggaaattaccggaaaaaaatagaagaatcatctataatatcagcacttaaaacattatatagaagttcatgccctgtacccatttaattccatacttgaagatacccagggttaaaaatgtagtgagtattctccctcttccctgagttgatgtgcgtatatctacataaagcactctcctttctctgatgatggacagtggatcttttctgagcatgcactacaactcacctctctgctttaatgacgccattaggttttttcatcctgtctcccatatcttgcttccctaggctatttctgaggcatcaccccttttctgctgtattgctttcttctgccttccctttgaggcttttgtcttttctgtacttccattccttgcagcctctcagacctgctgagtccaggttgtggagtgatagtgacttcaggagctctgagcatctgtaggaagtaagtacaacctgtgcagacttcatggctacaagagcctccaaaatccaggaaagaagcagggcccaaggcatgtccactgctgcttaggtgtcctcattctcaaagggttcccagtacaggagcctgccaggcatgccccctcctttgttatttatttcaagagcataggcaattaccatccaaatgcaaagtgagtgagtggcctctactagcctaggaaggaatcaggatggcggaggcagagcaggtgtagtcaaagcttataggctggcaagacctaaggtgttcattgtttctccttctgaaattaccaagttttaatgtcatgagcaaaacatctaacatagaggtttgaagtagcttgccacaaattcaaaatacaatcttcagaggttcaaggtttccaagctttagtgcaccactgaatggtaagaaaccctgacgtctatcttaccatttatttgaatctttgagttcttactacttttatttctttggggtttctgtagttctcagcctttcttccatgcagactcacacatgaacataccaagattttaacacaccccaccccccaacgacaaatttgagggagagtaaagtattaaaataatgtgtgatcacatttattaatggttcagcagtagagttcactatgggcttcaacataaakttcttacacttcaggtttatgctcatttcccaccctttcctcttctgctcaggaaaacactgaaatgcaagtgagatttacattattatagggataaccttgaatttgatccaattaattttgcaaaaagagatcatttatgaactcagtagtgtgcctcttatcagtaacacactgcttataccacgtcttatgactaatcaagacccaccagggtgttgtctccacctgtgtggaggccacmtggyaagtagagggtgagttgtttagagggtggctaaaatgttctcatcttctggcttccacctatactcacacacttaaagtttcagggcccgtgggttcagtctctatgtacattgccagtggatgaatgcagaggtggtaggatgtacctgtaacactgctgggagggagtcctggtcctcatagcacaaccacatcaacagactggcaagtgcacagatccatgacatctcagtaactaagacatgttcccgggaagacttctgatcaaatttggttcttctcagctgatgttgctgggttttgggatgaggacagacatttcactctaatcctaatatgataattttcctgatccagaaaaacctatacctgctgaacgccaccgagggtcaagtcacagacaagaagctgtgcagtcaccagtgtttcctcctgcccagaagtaagaatcctttcctttaaagatcastttcctcttgttgctgcaggaattaacatgtgcattgtttcactgcacagtgacactgacttgcagtgctaggtaaaaatccaacatttcattgttttgcagtyacrtgttaaaaggtgttgagcaactttaaaataactgtgtagagttgcagagacctactaattgggttaattattgaacttgactaaaatacaatactttagtcaagatttcctcctttttcaaaactaaaaggaagagtcttacttatctttaaggttttggtggctcttttatctttagatacattttattggccatttgtattgatttatttgtgatgtgcctgttcacagcatcatcagtgtaaacaaaaagtcaaacttactcatattgtgctttgtcctttaattatctgaaattctttcttgcagacaaatccaccaaaaacccatacctctgccaagtaagtacaacgaagccatgtagtgtatcagggagtggtcgaggctggatcctagagtctgataggcctgggttctaacacagcactgtcgcttccagctgcgttatcctggcatcttctcccacttgtttccttacctgtaaaatggggccaagaatgtttatttcacagagttgttttgaaaagtaaatatatttgaggcaatttttactttttttagtagcgatttaatattttactgatcatgcatccttttttaacttttttttttttacaaaaacaatacagctgttttcaaaataataagatcaagtaaaacaacatatgggaagcaccagctatagtgtttggttctaaacaaataataccgatttaaattaagtcaaaatayattttaaagatcacaaaatatgtctacaaaaggtaccttaaaaagaagatacggcaaatatctggataatttttccaaggcaaacatcaccctaaaaatatatgaatcggataagtcaggctcacagaacgtaactgcccaaaccttaatttgcctgcaactcaatgtgggaaaaaaaggaagaaaaaaactctgctttacatagataatttgggatatattccaaaataataaagcttaartccatttaaataaacagtaattgtccacatgcaaaatttttatgcattttttttactaaacataaattggctttttaaatttttaataatattcatcttaaataaatgaaacttttactagtttttaaaaaaaattctgacaacacaaagtgaaaatgatttggctacagaaatttatttttcattatttaaaaaggtttattataccttttaccgtttttcaaaccaagtcattcattcagttgttagtgaccatatgccgtgtgccaggcattgttctaggcacaggagatacaaggatgaacgaaacaaataaagaccctgtcctcatgaaacttatattctactgaaggagacagagagtaaaaataaacgcacaaataatatcatatcaggtaaatgctgaagtgctataaagaaaaatacagcgcagcagcaggggtgggtggcagagagtaacggaggcagggagggctgctgctgtagacagggtggtctgagaaggcctgttctataaaatgggcataatagctcattccacaaagagctggtgaaaggacgagatgcacgcatgttgaaaacagaataggcctagcacattcgggtgtcagaaaatattagccatgggtactcttccaactgccagaactgcagaaaccacaaactgccctgcactgtgcacctagggaaagtctgttcactcactcacctttgctgctctcacctgggagtgctgttcccctcctattagaatacatccttccttttggcccatctttgttgggcctgccaagccctcactgccccctcctcttacaatggtggctgccttctctaaacatccagggcactattatctgaagcacttagtttatccagaattctttctcctgcagatttccccatcttaataaaggacaactctggttgctgttgtcaaaaaccttagagtcacccttgacttctcacttgctttcttcacacaccttccagctattccttcaaaatagatccagaatccaaccactctcactgcttccactgctgtgatctgtccaagtcactgtcatctcctgcaagaacaccgaactggcctcccccactctgctgttgccaccctctgtttccagcccagcagctggaatgaccctgttaaaacataggcagatcatgttacccccctgttcaaaaccctccaaaagcttcccttatcatgttcattacagctcttgagtcatgttaagggtccaccaagtcctataaatctggtcccttcattgcctcctgtctgactgtatctcttactcttctccccttttcttactgtactccaggcacagtggcacccttgctattccttagatatgccaggccttgccttcacagctccctctacccgggacattctttcctgggatgtccagtgcctcctccctctccacctgcagatctcacccacatattcttcctttcctgatttatttttcttcatagcatttatgaccctctaacattatatatatattttttacttatgtctttattgcccatctcaatccattaaaatttaagttccaggagagcagggcattttgctgttttgttaactgctgtatatccccaatgcctttgatccatggcagagaaacaagaatgaatgaatgaatgaatgaatgaatgaatgcagataagtctttttcgtatttcacatgtttccacatttagactgtaaactctttgagggagttgatgcctgaagtcagcaattctcagacattttggtctcagaaccactttaacactcttaaaataattgtagacccaaagagctttggtttacatgtttctattgatacctagtattttaagaattaaaactgagacatttaaaacatttattaatccatttaaaaataatattaaactcattacatgttaacataaataatatttttatgaaaaataactatattttccaaacaaaaacaatttagggaaaagagtggcattagtttacattttgtaaatctctttaatgtatgttactgcaacataacagagactgctggattctcayctctgtttctacatttcatctgttgcaatgtttttctggtggaactacatgaagaaaattgggtttcatagtgataggtaattcaaaaagaaaagacctcttgaaccacctgaaaggattttcgagatttccaggggtccttggacmacacttttggaaccattgccttaaggattttttttggtggatgtgtccctggcagcacctagtacagtgttaggggataggcatagaaagagttcaagaaatatgaagrttaattgaaggacttttctgatccctttcaggatttacagaagggggaaacccaactgtggatgggcccctacccagcttttcatctaattccactatttcagaacaggtatgaaatgaactcttgatgtcactaaattgttaccaggaaactgcaggaaagagcatgtcttctgagaagaagacatttggagtgaaccttgagaacagagactgtattttacatcattatgtgaactgtcatttggtaatagggacagaatacccagttgttgttttttttcaatgactaagacattgctccagttaatgtttcctcaaaactagcaaggaaatgtgttttcattattcttcctctcacatagattttatttaaactttgtaatttcctccaaatagatctgtagaggctgatgatattaaatcacatataagacagcacagtttataaagggacagagaaaggactctgtgtgcccttgggcaagtctttctaagtttccatacaaatatatgtaaaaatgtaaaatacggataatagcatgtgtccttcttgccttcaaagaaggcatatatcctttcttgcaagaatcaaataaaataatatttgtaaaaatgctttggaaattgtaaagcactccacaaagtaagagcaataagagcacaatggaaagggggattattacttatttaggagaaagaaagaaataattcaggaacctagctaaggccaaatgaaaaaaaaatacaaaaaacaagttaacggtataatccttgtgtttgatcaaaggaaaaataaaactcatcttaaaattattggtgtaaatgtagaggcctgtcttgataatgcaaatgggtctttgtttctagtacacagaaattagagttaagtagggaccatcccatgctgaccagtgccctccatttcacaggaagctggcgttctctgcaagccatggtatgctggagcctgtgatcgaaagtctgctgaagaggcattgcacagatcaaacaaggtctgatcatttttattatttattatttttattttattttattttatttatttgttttgagatgatgcagtttcactggagtgcagtggctcgatctcagctcactgcaacctctgcctgcctcccaagttcaagtgattctcatgcctcagcctcccaagcagctgggattacatgtgtgtgcccccaagcccrgctaatttttgtatttttagtagagacggggttttaccatgttggccaggctgctctcgaactcctgacctcagttgatctgcctggcggccttggcctcccaaagtgctgggattacagacgtgagccaccgcgcccggccaaggtctgatcatttttaaatcacacgttttgccctcagcctgtaatagacacagttgtcgtccttatgatatgctaattaaataattgcaacaagtgtagatacaaggatctttttcctttacttactcaagagaaactgctatcccctcctctctttcaagttcctccatctcatttctacttgtcctttcatctcctcaaggacccacagcctccactgccctccaaacagtgggagacgagaaagctccaggggaggtctatggaaggcttggtgctgcatgagctccactgaggagtgaacagtgacaggctattttggatcaatgtgcaggattaaaaatttgagtcaagatggcaaacaaacaaacaaacaaaaaatacctggaagtaaatgtttggagagcccaacttcaatcatgtaggaacaccagggacagcttggacaattcaagattaaagtgacactttttctttctctcttctcctcccattttctttttctttgttttcttgcactccactttgtcagaatatatagcatttacatactgttcttcctcacccttgttttagtcctagctctacaagtaaatatattagtgtgttccstcagtcctttggtggacttccaccattgtctctttcctttgatgaagtgtacctgtagtagattctgaggaaaaatcgtgtttacattattccctgagttcctttatattcaaaactattttctcagccaggcgcagtggcttatgcctgtaatcctagcactttggggggccgaggtgagtggatcacttgaggtcaggagtttgagaccagcctggccaagatggcaaaacctcatctctactgaaaataaaaaaattagccaggcgtgatggcgggcgcctataatcccagctcctccggaggctgaagcaggagaatcggttgggcctaggaggcggaagttgcagtgagccgagatcatgccactgctctccagcctgggcaacaagagtgagactgctgtgggggaataaaaagagaaagagagttaaaaaactgttttttcatatcctagtagttggaagaaatcttggctggctataaaatccttaatttgagtttgaaaagtgttgctccactagattgtgttgttctgtatgaagctcttgagaagtctgataccaatgtgactttcttgcccttctatgtaatttgatactttagtctggtggctctgcagactttttgtttttaaagtctaatcattttaccagaatatatctctgagttgataattccaaatcaattttctcaagtagacagaagccctttcaatacgtagatttaagttttctcttatatccaataagttttcttagatcatagtcttaaagggttgttctgttcccttatttgtttttcttctgcaagcactcaatttacatgcgttttggatcttttttgtcattttttctcccatcactgtctttgattctatggtacttattttattaaatcccattttctctcctggttgtttccacaccttccttcaagtgtcatttcttaaatcttcatttgaagctctcgtcccttggacatcttataatttkttctttgttgagataggcttgtctttttcttcagtttgtttcctgagtttgatcaactcttgttgcatttcattctgctttttgtccatcttttgttcgtaattttttattttatgattctaaatatttttattaaaaaatttaataaaatttgaattactgtcttacagtttggggatttttttttctttttctttttctttctttttttttttgatgttgtctcgctctgtcacccaggctggagtgcagtggcacgatcttggctcactgcaaactccgtctcctgggttcacgccattcttctgcctcagcctcccgagtagctgggactacaggtgcccgccaccatgcccggctagggattttttttcttataaaagttctttgaggagagaattttcataatgaggtcagtctgacccaagattttagtccaggggcaaatataaaatgaaagttttgattcccaacctctgttttcttcttatagtacttatgaatggaatttgtttgatacattttttttcatagacaactggtggctatggttcccagttyaagagagtcctctagatttgatcttaatgtgtcccttcacatatttctaaattttataaacrtaaaaccttatttagcacattaaaaagctagcatttagctgggcatggtggtgcatgccagtagtcccaggtactcaggaggctgaggtgggaggatcgcttgaactcaggagttccaggctgtagtggactgtgattgcaccactgcacaccagcctgggcaacaaagtgagactgtttctaaaaataattaattaattattacctttttttcaaaaaaggcaagcattgatctcactcaggattttctatgagtatatattttcctggactattttcttagaaaataagaagacaagcgctaatcaataataaaaataatgtagctaaataatttacctttggaatgtaatataggtsttcttcacaaaatgattttttgaacctgtagaaatataagtaatactaaccataattatgttttttaaaaawaattaaacaggatggatcatttcttattcggaaaagctctggccatgattccaaacaaccatatacactagttgtattctttaataagcgagtatataatattcctgtgcgatttattgaagcaacaaaacaatatgccttgggcagaaagaaaaatggtgaagaggtcagtgatttctttttaaattcaattctataactatgcattgagtataatgacatcaaatactgtattagatgctagagatgaggagaaaggatacaaaagtacttgttctaatgcttgcataaatgtcatagagaacaagataaaatactatatttaggcagtatatcctataagaacacagaaaaggaaaaagtcatgtgatgtacatgctagtcctttcattcagttatttaatgaggtcagtctgacccaagattttagtccaggggcaaatataaatcaaggttgaaatgtcaagttgaattaaggttgtaagaattagggtcaagttccagacctccaaagtcaagacctaaaatctcaactcaagtaccaaggtaggttaccagggaaggatccagaagagatgcagaaacttgagttaaaacattagactatagcccttgtaccagaatgagcttatgggcctggagcaagaaaaaaaaatcacatgggtcttaaatattaatcaaacattaactttaatgcctctttaatctggaccaaactcagtgcttaccatatctcagtttagccagcctgctcctataaatgaaccctgaaatatgagctggagtaacccatgaatggtctagaaatgcagtgatacttattctggttttgaattacgggttgaatttaaatgggtagaatgtaagttggagggatggagaaggagaaaaatgggaagaacaatctatgcagagaaaatagcataaacaaaattcamggtaagaaatatttactttcaagattccttcagaaaaaggtacaccattccaaacccagcacctgctagaaaatatttgaattgttggaaaatgtcatgattgctgaagtgtctgtcttccccactacatgaagccaaggacaatgtcttttcatctctgtatttccagaatcagagcacagtaactggcttcagtgtacacttgataaataattattaagcaactgaattgatttggttgagtgattacaggcaggagaatagcatttgcaaaacaaactgaaaaagtcatgtgtattctttattttgccttttagacaactgtggttaaaaaaccacatataaaatttaccatcttaatcattttaagtgtacagctcagtaataagtatatttacattgttgtgaaacagatctccagaacttgttcatcttatagaactaaaaccctatacccactgaacaacagtttcccttttccccctcccttcagcccctagcaaccacgttctatttttatgaatttgaatattttagatacctcatacaagtggaatcacacagtatttgtcctttaggaccagcttatttaacttagcatgatgtccttgagactcatccatgttgtagcatgtgttaggatttccttcctttttaaggctgcatagtatctcattgtatctatataccacattttgtgtgtctaacatccatcagtggacatttgtgttgcttctacctcttggctattgtgaatagtgctgctataaacacgggtgtgcaaatctctccaggacactgctttcaattatttgggggtatatacccagaagtgggattgctggatgatatgggtattctatttttaattttttgagaacctcccatacttttttccatagcagttgcaccattttacagttccaccaacagcacacgagggtttaacttcttcacatccccaccagcacttgttatattctgaattgtgttgttgttttatagtagccgtccaaatgggtgtaaggtgatagacagctcattgtggttttaatttgcatttctctggccgggcgcggtggctcacgcctgtaatcccagcactttgggaggccgagacgggcggatcacgaggtcaggagatcgagaccatcctggctaacacggtgaaaccccgtctctactaaaaatacaaaaattagccgggcatggtggcgcgtgcctgtagtcccagctacacaggaggctgaggcaggagaatggcgtgaacccgggaggcggagcttgcagtgagtcgagatcgcgccactgcactccagcctgggcgacagagcgagactccgtctcaaaaaaaaaaaaaaaaaaatttgcatttctctgatgattagtgatgttgaacatttttcatatgcttttttggctacttgtaagtcattttcagagaaatgtctattccattttataatcaggttatttgatttttgttgttgctgagttttaggagttctttatgtttctggatattaaccccttatcagataaatgatttgcaaatatttttcccactccataggttacctttccactctgttgattgtgttatttgctgagcaaaagcttttaagcttgatattgtcttctctatttttgctttttttgcctatgcttttaatgtcatatccaaaaaatcattgccaaatccagtgtcatggtgtttcccccctacattttcttctagaatttttatattggggaattttattttgcttttaacaaagtctcagataattttaaaatgcaaaactcttgaatctaagggcactaatcaagaccaatctttggttttaaaatgtagaccgcattatcatttaacatcctaaagcttctccagcagtctagcttttctataagaggcttaagggtgggtgaagaagctgtcctatttcgaggtcctgaaattctctcacaaattttgaactccctgaggggctctggatttcgttgtcctgctaggaaactctggtaaacaggaattcctcttggcctgatgaatcttcatctccactttagaatgaatagactagagcttcacctcacttccaacatattcagcctatggattccaaaataagtaatatattactataatagcatctggaggtactgacagtcaattaaaactcttacttaaagtatctataataaaaagattatgtcccctatacactgaacatctgaatggaaaattaaagtgttggttacatgatgtcaatcatgtggagtttttctgaaagtctgtgtgtatttgtgtgtacatggctagaaaaagtaaccaattcattaactatttaactgtttatgcagctattttggcactgtgtgatacaacattgagtaattttacagttttgacaactgtctgctttatcttagtggccaatacgttgtttttctgtccacaaatacactgaatgtatctgtctcaaatacactgaattaataaaaacagaaaaaaaggagagtgaggggaagctgtaactatgttatgcccaattcttttttaaattaaatcacaaatattcttcaacttcattccctacttcaratgtttcaactcagctcaactccctactgcacacacttcaatccccgaacaccacaacaaggcaatactcacaaatattcagggactagagggacggaatgagatatttgtttgtataagtacagcaatcctctcctatgcttcctaggttcaggacacactttttcccttgtaatccacttcaaagagattgtgctatttcgttttctggcccttgagtccataactttaactttcaactgcatttggtttagcaacatattatgccaaacaagcagaatgaatgtttaatgggatttataatgaaagaatttctttggcaattgcaagatggctgaatgattgaataggaagtaaagaataaagactaaaggtatttgaaagtccctgtctcttacctctctccctgactgaatattcagctagccaattatctaaaagacaactggtatttcatttggaaatgttggccaatattctgaatattttactttattcaatatgtagctacttggaagtcatccaaacaattaataaacacttaaaaattttactgtggatgtttgtctttatctaaaaaatcgagaaaataaaatcaattgatagtaactgctaaactcatggcactgttgtaaaacaatcaccacttttaaaaagtgattctaaatacatttaatgagtgtgaacttgtagcacttttgtatactcaatgaatttaatttcatgatctgtgttacatttgtttttatctttccttcaaaactttaattatttttcagaacaaaatttgtgataattttaaattaaaacccatagacaacaaggatcaaaatttggaaaaataagtatgtatggagagagcctagcatgaaatttcattattaattaggcactaagttaactctaagcttaccaggaaccaagtaaaaatggaaatatgaaggtttataaagctttctttatttgtttaaaaaagaaaacaaaacataattttgtttaggagatgactatttccttgtactaaatttctaaggttaatttattacatcaattcttgtatctgagacttgtgcaaagtaagagatgatctatgttttgtaaagaatgtagaaaaatgcgttgtatgatagttttacatttamcggtaaataaaaagcaatatactataatattttatcataactcagtgaagtaatctctctaagtagctatgctaattgaggctgtcrgtgtgtttttcttcrtacttaatacagcaaagtccaaggtctgccaccttgaaggttacagcctttgttaaactagatttttttgtgcagaatgtcagctggggtgtaataacttttactaacttgagaatgagagaagatgggaggagtggagctcaaatttaacacaaatgccaaagtataattcatctatgttttcttcctctagtactttggaagtgttgctgaaatcatcaggaatcatcaacatagtcctttggttcttattgacagtcagaataacacaaaagattccmccagactgaagtatgcagttaaagtttcataaagggggaaaaaaaagatcaataccattgcttcagacactttcccaaagtttctccttttgagaaaaagtcccaaaacttcatattttggattatgaatcatccagtaataaaatggaagatggagtcagctattgaagtggtcatccatttctttttaagaagctcatgtggacttgttctattgcctgacctgatgaactgttaatatctggtgaggttgagttatcatgctactaatattttccaaataaatatttttatttttaaaaataagtgtaaagtatattatcaaaataagaaaataatgctcttgcataaaacaaagtggctggaaatttaaacctccacaatgatcattggtacactaatgtagctgggctctccactgccaatgcttgacaattaagtcttggttaaaattttaatttgtagaaaataaggtattaaaggtaatgtatgatatctgtaagtataggcaagaaggatgtaatggttcctttttgtgagcactctcaaccatgggatatatatatatatggatatgaactttctataagttcttgtctaggattatgctgttagttttgcttactaaagataattataccctctttgatctacatgtctatcaaatagaacctaaacttgatatgaggtttgtattagtccattatcacgctgctaataaagacatactcaagactgggtgatttacataaaaaaaaaaaaaaaaaaagaggtttaatggactcacagttccacatggttggggaggcctcacaatcatggcagaaggcaaagaagaagcaaaggcatgttttacatggtggcaggcaagagagcatgtgcaggggaactgccctttataaaaccatcagatctcatgagacttactcactatcacaacaacatgggaaaacctgcccgcgtgattcagttacctcccaccaggtccctcccatggcacgtggggattatgggagctacaattcaagatgagatttgggtgaggacacagccaaaccatatcaagtttcaaagtggaatgacagcaaagctagactaaaagccagttcctagagaaatatcccacaaaacaagagcagaaaagcagacattggtgaacaccaaggaataaaagagataccatcgtggagaatcaggtccaaggtcttagatcatcccagaaatgtatcatactttgtcatatatttctactgtgtacttcagacagcagtgaagtgataaagcagctaattaagtctaataattaaatggggaacacacttggccactgcataagatagcaatctatgaaagtatgttgaaaggccagaaggtaataatttcagggtaactcatgactcacttctaaagataattgtatatttaaatgtcataaactttcataattgccacctatgttacagattgaactgtggtcccctcaaaaagatatgttgaagtcctaatccataaggccacatatctcagaatgtgaccttatttgggaatgaggtctttacagatatagtcaaggtaagatgaggtcagtagggtgggccttaatacaatggctggtgtccttataaaattaggaaatttggatgcaggcacagagagaagactatatgaagagacacacaggaacaatactactggcgtgattccatcctgtatggctgttctcttgagcagtggtcgtttatctccgtctgctttctctcccacctaagtgtgtgccgccacctgatggaagattcgatggacatggacgtgagccccctgaggcccagaactatcttttcagttgtgaactaaaggccgacaaagatgatcactttaaggtggataatgatgaaaatgagcaccagttatccttaagaacggtcagtttaggggctggtgcaaaggatgaactgcacattgttgaagcagaggcaatgaattatgaaggcagtccaattaaataacactggcacctttgaaaatgtctgtacagccaacagtttcccttggggtctttgaaataacaccaccagtgcttttatggttgaagtgtggttcagggccagtgcatattagtggacagcatttagtagctgtggaggaagatgcagagtcagaagatgaagaggaggaggatgtgaaactcttaaggatatctggaaagtgatctgtccctggaggtggtagcaagattccagagaataaaagtaaaacttgctgctgatgaagatgatgatgatgatgatgatgatgatgatgatgattttgatgatgaggaaactgaagaaaaagcaccattgaagaaatctacatactccagccaaaaatgcacaaaagtcaaatcagaatagaaaacactcaaacccatcatcaacaccaagattaaaaggacaagaatccttcaaaaaacaggaaaaaactcgtaaaacaccaaaagggcctagttctgtagaagacattaaatcaaaaatgcaagcaagtatagaaaaaggtggttctcttcccaaagtggaagccaagttcatcaattatgtgaagaattgcttccggacaactgaccaggagactattcaagatcctggcagtggaggaagtctctttagaaaatagtttaaacaatttgttaacatttttccatcttatttcatttctctaacagtcaatatctggctgtcctttctataatgcagagtgagaactttccctactgtgtttaataaatgttgtccaggttccattgccaagaatgtgttgtccaaaatgcctgtttcattattaaagatggaacttcaccctttgcttggttttaaatatgtatggaatgttatgataggacatagtagtagcagtggtcagaacatggaaatggtggggagacaaaaatatacatgtgaactaaaacttggcattttaataaagtagcatggtttctattgaaaaaaaagattacgacatgaagatgagggactggagtgatgcatctgtaggcctgggagcaccaaagattgcctgcaaaccatcagaagctaggaagaggcaagaacagacttccctccgggttttagagggagcatggccctggtggcaccttgattttggactttgagtgtccagtacttgaagacaataaatttctggctttttaagccacccagtttattatggcggccatagaaacctaataaaatttatatgcattttttacattcaggtatataggggtttgggaaattttgtatggaaaggttttttttctccttttaggaaaaccattgaatcattttgaatgtactagaaaggatgactcacaatttaaactgggaaactggggtaattttttggtaaagcaaagcatctgtttgtagtatgtggcatcagctctctagcttcagttttcctcagtgttacacggaattattttctatttaagtaaatcctcattaattcccactgctaccacagcaaccctggctctataacaacctcttatgcctcattcttcctctcctcctccaagtgtcctactccagctaggtaatagcatagctgttaagattatactaatcctcagttggttgacatacagtactgcgtggtggatttcttggagcagaggctgggagaatttctgagagataggccattctctgctaagggctctactcctccccaaagctgggagaactacccaatccaacatgccagtcttttccctcatcttgcagaagagtccactgagggtgatcccacctgcttctctaaagcccacctctgcaagtggtattcttgatgagattagaaaagtctttaagaggctgggcatggtggcttacacctataatcacagtagtttggcaggccgaagcaggtggatcacttgaggccaggagttcaagaccaacctggtcaacacagggaaaccccatctctactaaaactagaaaaaattaactgggcatggtggcactcgcctgtaatttcagctactactcaggaggctgaggcatgagaatcacttgaacctgggaggcggaggttgtagtgagccaagatcatgccactgcactctggcctgggccacagagtgagactctgtctcaaaataaacaaataagaaatttcaaacacctgtctgtgatctcaatgtctcaatggctgacaaacaaatggttttgcataaagaaattttcaggcaagctaggtggtggaataggagacactagtcaagaagtacatgtgtagcagctgaagaaggaaaaaaaccacaccccagttcttgtcttctgttgaaaagtagattgcagctatggtagtaggaaagattttcaagtttgttcaaaaggacaatagacatgaaaaagctacgcctgtgtccagcacaagcctgattgtgtgttatcataagttagccagggcaatggtttggagaccttgcactctgggagctaaactactcttactgtagtagctgggatagtcttgcctaaaagaaagtcccagagaacagaattcagcgatgtgaggcaaaaccagcactacctgagacatgttcttaaaaaaggactgaattcctctccttcaaaatggtcttaagacaccatataactcagcctctatttctaggtaagggtaaacaatatttttccagtaatgattcaagagctaaagtaagctagtggtgcctgataaacattacctcctagtcccctaaccaaaatcttctttgcagacataaaaagtgatctgtggataactctttaaatgaacccatctataaatattttagaacacttagtaattataattgtgtattaggaaaatctcaaatattttctctacatctgtggttcttaatcttttagtagttacaaaattctttgagaatctgatgagaactgtgggtctttggcctgaggaaaaattcatttatgtatatacacagaaactcacatcaaatatcatgagattcctgggcctctgtggcctatccatggacaaaatagccaaacatccaagactaaggactcaacatttttcttaacctttgatgcatcaagatggacatattattctactaaatatgtgaatgaccctaaaagtaactcctccattagacgagaaggatattgctatggtttagcgcaagttatttggtgtaagttgcaataattctaatcccagctttaccaataacagattgtgtgaacttgggaaagttatttgttttggtttctctatttgtaaaatgaagataataatgcaacctaggccaggcgcagtggctcacacctgtaatcccagcactttgggaggccaaggcaggcgaatcatgaggtcaagagatcaagaccatcttggccaacatggtgaaaccccgtctctactacaaatacaaaaattagctgggcatggtggtacatacctgtagtcccagctactcaggaggctgaggcagaagaatcagttgaacccaggaggcgaaggttgcagtgagccaagatcgtgccactgcactccagtctgatgacagagagagactccgtcaaaaaaaaaagcaacctactttatgttattgttccatgagcatattaaaaattgtaaaagctggttcattccaagatggctgaatagtaacagctccggtctgcagctcccagtgtgatcgatgcagaagacaggtgatttctgcatttccaattgaggtacctggttcatctcactgcgactggttggagtgcagcccatggagggcgagccaaagcagggtggggcattgcctcacccaggaagtacaaggggtcaggggatttccctttcctagccaagggaagctgtgacagactgtaccaggaaaatcgggacactgccatccaaatagtgcacttttccaatggtcttagcaaatggaacaccaggagattatatccggcgcctggctcagcaggtcccacgcccacgaagccttgctcactgctagtgcagcagtctgagattgaactgcaaggcagcagcctggctgggggagaggcgtctgccattgctgaggcttgaataggtaaatgaagcagcctggaagctcgaactgggtggagcccactgcagctcaaggaggcctgcctgcctctgtagactccacccctgggggcagggcatagctgaacaaaaggcagcagaaacttctgcagacttaaatgtcctcccctgtgtagcctaactgggagacacctcccagtaggggccgactgacacctcatacagccgggtgcccatctgagacgaagcttccagaggaaggatcaggcagcaatatttgctgttctgcagcctctgctggtgatacccaggcaaagagggtctggagtggacctccagcaaactccagcagaccagcagctgaggggactgactgttcaaggaaaataacaaacagaaaggaatagcatcagcatcaacaaaaagaacatccacaccaaaaccccatctgtaggtcaccatcatcaaagagcaaaggtaggtaaaaccacaaagatggggagaaaccagagcagaaaagctgaaaattttgaaagccagagtgcctcttctcctccaaaggattgcagctcctctcctcgccagcaacggaacaaagctggacggagaatgactttgatgaactgacagaagtaggcttcagaaggtcagtaataaaaacttc

SEQ ID NO: 6839 - DNA, 19265 bp, Homo sapiens
tgaggaggtgtcccagtcagttttccactcccagcacagtccagccctggctcagcaggagcctgcagcttccaatgtgcaaacagtcctaagcaccccctgaaataactagacctgcctstgtcaaggtgaccctagcacgtaggagggactgcatgacccccacctccacctcttcagccacagttcaggattgggtcccctgggaggctgggtttcctgtgcttgggcatctccacccacccttactctgaggccaaatctgcacgcccagcagaggcgaggaattgagatgagaaatctgggtagagctggccactgcagggccgtcacccacccagctggaaagcttgcctcattcctctgttttactgtgcacaggcaaagtgagggatctgcacacctgtagaggtcctttctgcagaccgcaaagggagctggccaaccccaggaaggaataggawggttcttagaaagcagcggggccctcagaggcctggtcccacagcaggctggtgctctcttggcttcttctccgtcccctacaccttagtgcagggcttggcttctggacccagcacagacccacctggccagcagagtggagccaagggagacacgaaggatgagagaggttggggctggtccacagccctgggtcctaggctcagctgccctactgatgggacccactgatgggactctgaactccgtgcccagggagccctttgagagctgtctgggggagcagggccctgggggtctgtccttccctgagccttctcttagcctactccctacctgcccctttccaggtttctggcatccttggaggtgactcaggatgggagattccctaatcaaggccaccatggtcaatacagtgctggatggatggtggaatctgaggatctctgggcctctcttgggagggaattagtcagagagaggcctgaagccttagctcaatgcccaggggtaatgaggccaacagcttcctttagggtcagaagccgagcagggaggggagacagtgaagggaagggatccctacagaagcaccctatttctgaagcatccacctgctgggctctgattgagaggaatgggcaggggaggagaagaaaactccgtacccctacacaaggtgacagctaagtgtggcctacagcagggacatgtctgtctcctgtctgtctgtcctttatccattcagggtctctccactgatgggaaaatgtgtgcctgtccattggtgttggagaggtcctccatatcttatgtaagaattgggtagggggacagggggctggccttggaacaacccccccaaccccgaggactcattgagctgagtcacttggcctactcactccccccacctcctcagtctaggctcctagagaccctcctccccaacccagggctcctggagttacagtgccctttactgggtctctaagtccctaagtcaccaggtgatcctgcctctcccacagcagggaaagttttctgccccttttctgagacaaatgggaaggtagagggaacacttttggtactaggaatgcagaccccattggccccgccatggatcgcatcatgtcacacatccccttacatatttctcagccccctttccctactatatatccattgggtataccctgtgtccccctccccacgaccacaggcccatacacagccacttctctgacaattccatcggaataaaagacactcctcccatggtacacgccatctgcagcacgcagtcgtagcagagggatgccctcatcccatcacaggcactcactacagaggaacagttgtaaacacatactcatcttgttgcagaaaacacattcacttgcattctcactgacacatacatcctcacatgacaaaatccagttgtataaaatacccagactcccttcttttcctccaacactcttcccaacatgcattttgcttgcagttgtatcccaacagcctaacacagtgcctgatacatactagatgctctataattattcattgaatacattgttaaaattatttcttaaagacatgcccaggacatctgcacagccctctcaatcctgactgtcacacaggctttcccatccagctttcccctcgtggatgcacggccccacaaacacaaagtaattaagtttccacacatatccgtaagctaaaggacaacccctggcccgggggtctctttcagagcggggaagaggaggagattgtgtgggatccaaaggggcctccccctgggctgagcccgtcctttcctcctcccccagcccgggccctggccccagctgctcttcttttaattggaggcacttttttattctgcaggccagggggagccggtgcttggggggaggggtgttaccaggtggcctcagaaccagagagaaggatctgcaactcacctaggttcctgcaagatagtcctgtgaggcaagagccaagtttaggcttaaggaagcagcttgtagtgagtggagtcaagaaagcagtgtttgcgtctggtctgcccctttccagctttcagtgccttggttttctcatctgtaaaatggggataacaaaaaccacatcacaggattaaagatgagtggagagatcattctggtggctcacacatggcagttgctctgtgagtcctgctttcttcccctccctcctcgttcctatcagggctgttttgcaaggcatgcaaaagcacagtggaaacacagaagctgcagcgaatataaacttgtgtgagtctcctctcctgtttcagaaaacttcccaaccttgcaacaccgtgctcaggtaacactgctctcaggagaaggggtgggcgccagagcccagcaaatcctgaccctccggtctcatctttctaggtaaggaagggacagagagggtagtcttggccctcagtaaataccctattggaagacaaaggctgggattaagctgactcacagaatcccagcacctcattgagggtaaaagttgggagtatccccaattgggataaaagttgactctgataaacaaaaaaggtaggaggggaaaaaggaagaaatccgtcaaggaagcggctgtgatcgcaggggaaagtcagtatatccctgggctgctggattttaatgagaagagcttgacagtcttagtgggccatgtacaagggagtggtgactctgccaaccttaagctgggccaggaatggtaaagtctcctcccaggtaccctggacaactgataccagatctgaggagttcaagaggtagatcaggcaaatgccaaaagggttggaaggccatctgagctggagatgtgcacctggaaagataggtggtttattttattttattttattttattttattttatttagttttgtaaattttatcttcaaccaacccacaccaaaagatggggttttaactgcagcaggtaaaactgtggtgagactaaaaggagtgaggccactaggacccagcctcaaaaaaagctgcagtacccttccccatagttttcagcctcaaacaaggaaaatagctcagattttgagattccagatcaatcttctctgtctatggaacttggagcaagtttgttctctttactgagtctcagttttcattttctttttagagatggggcattgctatgttgcccaggctagaggtgcaattatagcacatctcaggctcaaattcctggccccaagtgatcctctagcctcaccctgcagagctgctagaactacaggcacgggccactgcacccagccatttttttctttttaaaaatgagatataattcatgtgctataatattcagcccctttaaaatgtataattcggtgggttttaatatttttaaaagttatgtaaccatcaccactatctcattccagaatgttttcatcactccaaaaggaattctgtatccattagcagtcaatttccattccctgctgcccccagttcctgaaaaccactaatctattctctgcctctgtggatttgcctattttggacatttcataaaagtggaatcatacaatatgtggcctttgtgcttggcttctttcacttagcagaatagtctcctaggttcatccatgttatagcatgaaccagcatttcccttcttttcctttttatggctaaataatattccatgtgtggatataccaaattttgtttatctattcatcagttggtggacatctgagttgtttccccttttgggctatcatgaataatactgccatgaacattcattcaattctctcaattataaaaaattgggacatttctattaacttgcctgggttgttataagtcttaaatgagataagcatgatgtggtacctggcacaaaactgtctttcaataaataatttatttctgctttagttccctcaagataagaggcaggaagagattcattcgggttcagacaacttccaaagtaagttatggaactccttgggaaggggtagagtacctggattgggtaagtgggaagaagagaactggcgagggagcggagccctctcatgtttctgcttagtgttttttttttgtttgtttgttttttgagatggagtcttgcactgttgcccaggctggagtgcagtggcgcgatctcagctcactgcaagctctgcctcctgggttcacgccattctcctgcctcagcttcctgagtagctgggactacaggtgcccaccaccacgcctggctaattttttgtacttttggtagagacggggtttcaccgtgttagccaggatggtctcaatctcctgacctcgtgatctgcccgcctcggcctcccaaagtgctgggattacaggtgtgagccaccatgcccagccttctgcttagtgtttacaaacaactaccaatttcacatttggctttgtcttgagtgggcctttgtccacctggctagagctcagacaaggttttccccacagatacaaacttccaaccagcacgtaggtttccaggctaacccacaaaagcaagttgagtctagctcctccatattgatccacaccaatcatagctattctgaaatgtactttcctcacatctgtaaaatagggagaatactcatctcgaaggattggtgtagagtttatattgttctccataatactaacatctgtcttgttgtatttgcttctttgcttattgtctgaccccctctatagaatgtaagcttcatgaggtcaggacctttgttttgttcactgctatgtcccccatgcctagaacagtgcctgacacatagtgagtacagtactcaataaatattattgaataaagagatacattctttgttattcacccaagatgaccatattttgttgtttggggctgtattcttcaggagagaacagaaatgaataagccactctctgcctccaagaagatctcttcaagtggaggtgacagacatgcccaaagcaaatagattgcaataagacttgatgggagagaatgtgagtcttcacatcctagcatctttccagatagagacagggcctacccaaaagtctaatctgaaactgaactgaaatagaacagaaatagatcccaagtgatggaacctstgcctttcccaaagcttggcttctaaaaggtagcaaacattttctactggagaggggaaagacaggaagaagaaaaagggagtttcctccttttctcttgggctctcagccagacagccactggcaaaacgttggaaaggcctaaatttgtcctggatgcacttccctgatcytagtcccaccaakcccagcccccasggccttaagcccytatggctccytcccaagattccaaacgtaagaaaagaacacacaccacagtccaaaggcttcttgtctggaatagccaaccctggggtaattgttaggtggaatgcaatctggttgaattcattcaaacactgtaggaattgcctctttcgaaccctgtaggattttacttcttgacgcatctgtttatttaaaaccaaaggggtatgttgaggcatgggcaccctggcagcagaccccaaaccaaccctcttgacttgtgcctgcctttcaggatatgttcccttcctgaatttgtctaaraaggctgagttggggggtggttgctgatttttataacatatagccagttgttcataggcctgtgytttaaagaagggcaagcctgaactcaccgtcctgcctcagggcctgggctccatacctggggagtagacagtcttctactttctaaaaagctggacttgaaatttggagtaaatctcctggttgagtgacaggtgtttcgcagctgagcccttgaggagattctccagttgggcagagacatcccttcctcagacgccttgtgggctggactcctttggcccagttcaaagtgaggggagggctcccaacaggccgggaagacagttgacttcaccctccttgggtttgtctgtctgtccgtctctgggaatggtcgcttcctgttttcccttttccttttaagcctcgccttgttcccctcttctctctcttcatgaactactccgagtcttggtctccgtccctctatctctggctcctgcatctgtctcggcttctggccttcctctccccctcccctcccctccctcgcgctgtcattcaccccgctcctctccgcgcacagccaatggagagacccagtcgaaaccgcgaagctctcttgcaccgggctttttcgcctggtgattgatgtcccagagtcaacagcgagcgagcagccggagcggggaagcagaagccagagaggggaagaatacggcgccccctctctccctcccctcccccttctactttagcctttctgcgcacttcgcttccaagtctccgcgcagccaggagccgctgttgcctcccagcccctrctagctgccccccgagccgagcgcagcgagcgccgccgcccgggccccccggtggggccagggccagcatggagcacctgggtccgcaccacctccacccgggtcacgcagagcccattagcttcggcatcgaccagatcctcaacagcccggaccagggtggctgcatgggacccgcctcgcgcctccaggacggagaatacggccttggctgcttggtcggaggcgcctacacttacggcggcgggggctccgcggccgcgacgggggctggaggarcgggggcctatggtactggaggtcccggcggccccggaggcccggcaggcggcggcggcgcctgcagcatgggtcctctgaccggctcctacaacgtgaacatggccttggcaggcggccccggtcctggcggcggcggcggcagcagcggcggtgccggggcactcagcgctgcgggggtaatccgggtgccggcacacaggccgctcgccggagccgtggcccacccccagcccctggccaccggcttgcccaccgtgccctctgtgcctgccatgccgggcgtcaacaacctcactggcctcaccttcccytggatggagagtaaccgcagatacacaaaggacaggttcacaggtgagtccggcccgcgcgctccccgcctggccgcggcccgggctccgtgctacccctgccccgccgggtggctccccaaagccggttctgcgctccaggtcgcccagctcttcttggtgcttcccccaagttgagccgcccgcccgattctataacgcagactcgccatgcttgaagagttctctcagcctggacccctctctgtctcccgaaggacccctgctcggaggagctctccctggtcccctctccggatccactagccgggtcaggcagagagaaggaggccatagattcaggaccaccttctgcagctactcttggcctgggaatcttagagaaaggggtgcaacgtgaacagtttcttccgtcctggctgctgttctaggacccaggaagcgagccccaggatcagacacaagaaaagaacaggttcccccacctccagtcccctacacacatgcacttcgcgcccctagctccggtgcccgtggtgctgcggggccagtgggggctctgagccccggtaaatcagcagaaccagtggcctttttttttttttccggagagcaggcttcatctgggargatggcagcggggcttagccgcccaggacagctagcttttcattttcgttctctcccggctgggtgtcmtaccccgggcccagccctgttatcttgggcacgaacaatgcaccggtaggctggtgatcggtggcgggaagactactcccgggacattgggtactaagtggtggccgctgccgccttctctgctgcccgctcccgccttcctctgctggccctggctccctctgctcccgtttccactctgggcactcaactctccctctggcgtggatcccttcccccgttctcactttctgctccccttagggttccctggatcctagaccacgatccttccgtccgggctgggaagcagccacaaattgagcccaggttagccagccgatcttagagagaggaggcaggaggcactggctgctgctggcagaratggggcctcctgggggtcccccggttcaagggcccaacagtggaaggggggtttacataactacttgggagaagctgctgagagctagatactgggccaggagattccaaagcacccctggcttcctgcttctgttccaggcagcagcacagccagggaaactgcttctgcagcttcttaccagactctggggccacggcagaagtggtgtggargctggtgtccarargaagaacagttgcttgggtctaggcctcaggaagggccctccctaraggggtcccagtgcccccaacctaagttttctctggcctggggcagcagggcctggtgcccatcccattccccacccaggccaggccagtcttgaagggccctgctggaaacccarccgggagtccactaatcctgggcctctggtgaaaggtactcggtttagggcctaccgcggggccytaatactgtgtcaggcatgaaggcggtttcagcgagtgtatggctgtggccttgttttgctctgtgtcctgtgtgcttgtcccgtgcctgtgcttgtctggtcctgtttgggtgtatagatctgtgagtttgcccccgttgtacgttgtgttggtgtgtgctgctgtggatggaggctcaggtcgggttccagagtcaggctcggcctcttactctgagcctgaaggcctggggctgactgaggggaggggagcgtgaccattagctcgccttagactgcccctggaggagaggcggcagggaggtggttgggctcgcgggagcccggggccagggaggcctccgtggtagcggcgacggcggcgtcggactggcgggcaggaggaggccgtttcccgccgtgggcttgtcgctgagggctaacgggaggatctcggccctgctcgtgggggttcagctgctgcgctcgctgactckcggggtgttgggcctggracgcttcctgacgctctgctgcttgcctctgccgtctgtctgtctcccgctccagtggccctctcacccttcactgtaacacgccgtatargtcacccctatcagaaccggacgccccccaagaagaagaagccgcgcacgtccttcacacgcctgcagatctgcgagctggagaagcgcttccaccgccagaagtacctggcctcggccgagcgcgccgccctggccaaggcgctcaaaatgaccgatgcgcaggtcaaaacctggttccagaaccggcggacaaagtggaggtgagcaagcggggcgggccggccgcccgcgagcggcgcggtctcaggcagctctcggttcattggcctctcgtggggcgcacatactttttccgctcgcggtttctgatcctttcggaggagcgagctcccgctaggcttgcggggagctggaakcaaccgakgccgatagctgggatggggctgaararccctggctctgttttaccggaggcttcagggctttctggttggcacactctctgccggtgtagacgcggcaggtctattccgccgcttgggcaaacaggcgggttagtgcactccacgcagtccaggctccagggatctgtgagtcctggggagctttttgtttgcgcaaactcttgcttatggaatcctgctctgtcctggagactggatgcagaacagcccgcaccttgttgcagcgctccagccgggctcccggcagarggtctgtggccccagaccgcggccctgctgacggtctcctcccccagacacccggcctttgcgcagccggtccctaccctggaargagaaaatcaatccgcgccggctgcggcggggtttcgcgggtcccactggaaggggaatcaattaggagcagatgggtgtgtgtgagaaagagaattttccttctcccatagccacaactctagttactacgcaatgggctttttgttttgttttgttttttcacatttacgctcacggacgtgaagcgtccccaacactctcgagcagcctccctctccgcgcgcactgacgctttctccggctgcaccctctggcacgctgcaccctcccgcacatctggcccttgcccgccggagtttctcccctagctcaggccccatggggtagcgcgggagagtctgggcgaagtcggcggcgccgaracgggcgggccttggggcaggaggaaggaattggagtttcctctttttctgaacgaaggcgargaatctgcctgggattccgcctacggggccacaaaggaagccatggccccacgattctaccacaacatttctgacgctgggaaaggagtgggggatgcggcctcasaccttggaacgctaaagagggagccagggctagctcgggggttggggggactccggtttccaaggcctactgagggctgctggcctagggraggagaggcagcctggcaggcctcccagagagaggggcacagagaaagaaagaggcaggcaaagagagaaactgaaacacaaccagtttcagaggtggagagggatagggaccccgctcaaggaaaaaaaaggagaaaaacaggcagcctgcagaagtcttatttatgtataataaagaaaaagcaatggatgactgaaaccaccattttcttttcaaacaaattcctttaattcagagagaaccaagtgggtggggaggagagaaaacgagagataagacacaaagcctaaaagagaaatattcaggccgtttgaaatgcaggggataagggaaagacgaaagacggaaagatacacagagtcaagaaaaggcggcccagagcaggtcagcagccgctgctggaagaggcccttgcaggcttcgcatggcttcatcgatcgcctacaaattgcttctgaaggccccagggactcccattaggtctgtccaccttagagacagacgtttgatctcagttgacagggtggaggggcggcagtaaatggaataagtgagtcatcgcctccytgaactgcctcagaggaagccagtgggtccagcaggagccccggtagggcacagggctccacacagaaggcccaagtcctagaagacattcgcagagagagggaggaaagagacgtcccgcagagcagatcgtacccgctggtccttgcytytctgccctggacttgtgggtagggtgagggccytctggcttggaatggcacctggtctccctcagggccggggagggggaggcgagatgccatcctaccccrgctgccccttgtgaggcctccggggtgtgggcgctgcgcgtggatgcgagtcccagctgtttgggcctcgcagactttcccatcgctcctcctctgggataccttggctccatccgctttggggtttccagtctttgttggagtcaggactctcaaaagaagggaacgcgttataggggcccaaactggatttggggactgcaaaggcgagcagcgctcgttcagtttatctcctgggaacgcaccaggagttgggcacacgcgggagctgggtcggtgctcctggcaggtaacggcttgttcccggtgcagacggcagactgcggaggaacgggaggccgagaggcagcaagcgaaccgcatcctcctgcagttgcagcaggaggccttccagaagagcctggcacagccgctgcccgctgaccctctgtgcgtgcacaactcgtcgctcttcgccctgcagaatctgcagccgtggtctgacgaytcgaccaaaatcactagcgtcacgtcggtggcgtcggcctgcgagtgagcctgcccattctgccctgtgggaccccaggcccactcaggggtcactgaggcstgagacccaggactcctccccaccytcctggcctcagactgcacccaggaggggaacactgccctcgcacggccccraagggcccccacatttgtgccgacactgttctcccttcggtggaagagytcaagggacaaggacacgcgcccccytcccagaggcgtcccgcacctgtctgaactgttaagaaatctgtttttgtttatttcattttattttaatttttaacgtgggattcagagaaaggcaagggaggtaagggaggaggagcttctggggtccccagggctgtcatctgaatttgccctgggaaaccccttctctgtgacccayttctcatcacacacatggaaacccataggyccacacacaggtggtgtcactgtccctcctggtgtcaccccagagccacacatgggcatstatgggagagtgtcaaccagacagagggtcacagtgtttacactttggaccttacgatcaggcwcaggtcaggggtgacacagactcatcctgaacagcatggcactccctccagcacaaacacaaggtcatggccacactgtgacacactacaccacacacarcagccaacagctacaacagcctcacttggtctgccaggcccccaccacacatcccagcccaatccaggtacgcacagacaggttttcacataaatgcagcccatttctccagaacccatttgaggggtgggggggtgttaatttatgcacttataaggtgttttctgtgtaaccattttataaagtgcttgtgtaatttatgtgaaaaaaataaataaaagcctccggatccggagtcagggctgcctgctccttgcggaccctagcgtccttcagctacttgggtttggtgtgtgagctgatgcttcaggggcagcccttggtacctgaacttgagagacatgttgcggggcaggaccctaaggctctggagagaggaaaggaagaggacagatggagagaaggcagagttgaggagagcagggagagccaggctctcctgggattaccagtgcctgagaggatgtggatttctttggatgtgagagtcgtgtgtgtgtgtgtgtgtgtgtgtgtgtgtgtgtgtggtgtgtttgtgataatgtgagcaatcagcaatgcgagcaaatagtgaatatttataatggtatttaagtgtataattgtgtttgcaattcttgcgtgtaaatgcttgtttctgcttaagttgcaaatcgaaactatcattgtatgcacgggcttgtagtggtgtgtgtgtaaccgtatgtgaatgtgactgtttctttttgggtaattgtgtaatcaaccattgtttgtgattatgtatgaatcgtgttgatgtttgggagaatatgtattagtttctctttgtaaatctatttttctgtgaaatgtgtgactgcttctgaagtggatcatcttgaattttatgggtgtaattgtgtgtgagatgtaattatgtgtgagctgtgcattttccctgtatttacttgtgtgtgacagaatgtaattgggggagtaaaggtagtggggagtgtggatcactgtgggagaccatcactgcaagtgggtgggtatggttctgtatgagtgtgtgtaattgtgtgctgatggtgtatgtgttggtgggagtctgttgtgcgatacgcagatacattgtggcgggaccaacatctgctgaagttctggggctctagacgcttacccagcaagctgcagagactggggcacattgaatcagaaattaaggccagaatcctctctggtgctgtaagtgggacctaccagttcccagcactagcctggcctaggagagatctaaagaattgactttctgrgaacctccaggagccctccagaccacccttgccagacctgcagccacagtacacatgcacacaggcataacagccagtccccagcctattcgaattatcctagacaagactgacttgggtctgcttttctggaagaagctgtgtggtggagggtctacagaactcatcaccctaggggtgagttgaaatggaggggtaagaggctttttctctgggatgggagagtgagagaacttttcagctgaaagtggaagttcgtggtgtgggggtcactggaagctctgcagaagtgtttgcgggatactgagggtggggagccaccctaactgtcagaaccactgtcccccaaccctgcccctgcccggcagccatgagggctgtgacacaggtcgtgagcacagcaacttcccaccccagcaagcccatggggaagttcggctgagtggagggtgggcttggtcatccaccccctcatctggggtcccctgggatatccgcataagagggggcttctgtcactcactttgtgtagacatgaagaaaagagaaaaagaggggagggttcagggtccgaagacagcagccagcctttccgccccatccccgcaggcccgcggagtgctcaggttgggccctgacgagctgtgtggagcgtagtgagcaggttctggcggcagcgccgggtctgctgcaggtctcccgcattcaccggctgtggcacccagcgccaggccgcgcaaaatccagaaatagcctccagcacctcagaagtcgtctccctctacctgggcaggtctgctgtcccctctgctcccgcaggactggagccaccgagctcgcgccttcttctcggggtgcgatttctctcctcttttggactcaagatcaatgcttcccggccggcgcagatcacacagcaggaccccaggggagactgtggccttcttcccgcctcccaattccccaagaccgcctctagaggctgctgtgtccggagaactccgagcattttctggacacagattgcctaacagaggaacaggggttaggtggggagcggctggccggcccaaacacagcagccccaagctggctcccaagcctgggctctccacccccgctcccatcctctcttgagcacagttaggcccaacacccctgtcccccaaaacacctcctaccctccctcccccccagcccccatcttcaggaacatcacagggctcacactcactaaccgcggagagcacatgcaggccggagccctcagcccggcagctctcggaccctgcccagctcgacgcggactcatgcagaagaggacattccgcaggtaggtacaatcccagcgctggggcctggggcgtccggggggcggcctttgagcttcccggataccgctcgcctgctcccggagctgttcggccgccggctgcccgggtcgtgcactttcagtagggccccgctgactctcctgcccttgggctaggcctcccggggatgccagactcctggggacgctgggacccgcggcgcggcgggacacgcaggactcccgcctctccgcccggaattcgttgagacggaatctcagcggatcccgcgtccgccgagcgccgcggccagggagaaaggccggtgtggcggctggacccgcaaactccgtcccaagtggggcggaggctggaggggaggggggctgcgagggtcacagtcaaggccaactactcccaacagaaagctcgaaactctccctctacctcccctgccggaaatgacccgtctctgttcaaaaatagaaaaagaacgatcggaataattgttcgcagaggtgccgggagagaaggggaattaacaaacctgcctgcgcagagaggtctgcttccttctttggcttcagaaccgacggcaatcaccaaattcctgcggccagcgagccctgcccctcagatctggccctctggttgagtgggtggcggcmtgaggggccccaggaacccaggcagggatggggtcctagaggccctgtgcagtgcggtgggtggcacacagagaatctggctcaacctgttaactataatagcggctttgtgtggccgcatctgtgcttgggggctgtgtggcacctcctgagcactgactgccctgtcgtggctccactaccaggcagttgtggggtttgccctgggcacaggactcagatgggtgccctgcttgtggggcgagtgactcgcaggtgggcaaggtaggcttcaggtgcttgagacaactaagtaaggacctctagccagctgaagcagctgggactcagcagccaggctgcagggcaaccgggaggctgcggccttggggctgccctgagggcccttcagctcaggtgccagaggagacctcctccctcatgctttactccttctgctgccctcatgcccactttcayacttatgtgtcactcccacacagccccccagtcctgctccctaccagggcccccagaccctccagatcagctcagagtttgaagttccacagccaggctgttgccaagcaactggcaggagctgccaccacgttccctgcgtggctcaaaagggcccatccaatgccttctgcccccattcagctctggcctggttggcccagggaggcccctcccaccccggaaccctcacctggatgtcttatcctggagaatctgataggaacaggctgagcagaggctggagtcaggtcaggttttccaaggagctcagagcagactccaaagactgtgcatgataggggtgaggggtggcaggttggggtgtgaggaagggctgggtgagttccagggagtgatggggtacctacattttgttgaggggtgggtacaattcacatgcccccactcacagcctgcattgctgggtacaacctcacatacctccttcaactatgcaacaatcagggtgtgcagtgttacacgaggggagctacaggtgtgctgtgccaggcacacacagagcctgcactgctggtgcaagctcacacccgaccaggccacctcctgtaagtggttacccctggacacccctcctctccttccctcctcccccagcccctacagaggaggatctaactccattcccagctggcctgggggtgggggttgtcttaggagctggcttcaggttccagccctgcagctcgggtggtaagggaaccccatgtgcctaaggctgagcttggggatagcagcggccaccttagatactggctgaggaccctagcaaggcccagaaggtccagcggccgccactgcctgcccaaagcctggggaaatctggcctcctcgtgtgcgagaagattgtgaggggtgcggggggccccctgccactgtgtgcctccttggggaaaggctttggtgggagctgctcctgcccctcctgttttatgccctacgtacccagaacccacatttctttggttgctgcgagaagagccaaaagacccaaaagctggaggccgcggccatgattcagcagccacccagaagtgggagctggacctgggacttggtcacagaaacccagaacgagtgagttctgggcgccctctaggggccgcgcgtrgcaaggcacttcgagccgaggctctgggagcttgtattctccgtggcaccctcggaaatgcaggggtggctgttactgactaggttggaaaatacgaatgataatcacactagcgagcaatgttatggagcatatgctggtgccaggcactgcactatgctttaagagtactaattcatgcctagcaactaccttatgaggtagtggtatttttatccctgctttatacataacgaaaattgaagtttaaagagactaagcaggggccaggcgcggtggctcacgcctgtaatctcagcagtttgggaggccgaggcgggcggatcacttgaggtcaggagttcgtgatcagcctggccaacatggtgaaaccccgtttctactaaaaatacaaaaattagccggacgtggcggcgggcgcctgtaatcccaggtactccagaggctgaggcaggagaatcgcctgaaccagggaggcggaggttgagcagcttgcctgagagcccgcggctggtaaacagtgaggccagcattccaaccatgaggtctaactctagagccacggtctttgagagggatggccgagtcctggagtatcatggaattagtgagaattggagatgagaccctaccagactcctgtcagatttggctttttggagggagctcttagtctagaggggggctgggtgtttgtcctctagagctctgggaaaatcgccttcagtcccatccagtctactggaaccttcctccccgtgaggcgcctggcttccaggccccactctgccaggcctctgtggccgccccctcttcccccgcactgactgcaagcgcacactctacgtcttcccagcagggcttgaagccttgtgggattggaagggggttccgtgcactttcacctcttcccctcccttctctgggtcaagaaaatggaaggactcaaactgacagaaagttaaaaatagaagccaatgaatcacactttattagtcaaaggaacagagaaccagaaaggaaaatccttcctctccttgtccatctgctctgtggattggaggatcggggagtgagctgaggtgggtaggagggtgagacttgaaggtcagggagttaccagaggttttcttggtgacctcttagtaagattcaatcaaactataaaaagaaagagtatggcaggccaggcgtggtggctcacacttagagtcccagcactttgggaggccaaggtgggaggatcgcttgagcccaggagttcgagaacagcctgggcaacatgatgagacccccccagctatatatttaggccgggcatggtggcacacggctgtagtcct

SEQ ID NO: 6840 - DNA, 27797 bp, Homo sapiens
tatgtgtaggcctatttttaaaggagaagtaagtcttgctttacaacataaaacagttactttgtagtttatggagtatgttttgtaaaggaaaaaaagaaaccacatcaaaagcctgtgaaagctgtcctgatatggcctcagagaaaaagggagactctatcttcagttaaatgaagcaaataaaaccagcaaagggtttcccttccctctcttaagaacttcatctgtagaaacattctgatgcattccagacattctacaagttcgttaccaaaaatgcagagattacaatatcacctttcctttctcatcaaaattataagttttggatcactgattttatctcactggctattccagcctctccgtaagttgcatggtgttctctttggtttagcttgctttcttcgccacttcacaaaatagtcaataccgccggcaatctttttctgctgatcaactacaaccaaatgtatgcatttcctacaatcacctccctggaacttggcaccaaatacagattttttcatactggagtaatcttatcatctctgtattcacaccctccacattttttcccagtgtctgtattggtcctatcaccacttccttcctttcacaccacatcctccatggaaactcagtccttggcccccccaaaaaaaaaaaagctcaagaccagaagtgtttcagaattcagatgctttcagattttggaatatccgcatatacatagtaagatatcctagggatgggacccaaggctaaactcaaagttcatttatgtttcatgtatacctcatgcacgtagcctgaaggtaattttttttttttttttgagatgacgtctccactgttgcccaggctggagtgcagtggtgttaacctcggttcactgcaacctccatctcccaggttcaagcaattctcctgcctcagcctcccaagtagctggaattacaggcacccaacaccatgcccagctaatttttgtatttttaagagagacggggtttcaccatgttggcaaggtggtttcgaactcctggcctcaagtggtctgcccagctcggcctcccaaaatgctgggattactggcctgagccaccacagcaggcctcctgaaggtaattttattttgccctaggggatcctgaataaactatgttgcgcacccacattttgactacaacctgtctgtcacaaggtaaggtgtggaaatttccacttgtgtcatgttatggattttgaatttttggattaggatgctcaaccggcgtagcataaatcttatttaaatgtttaatcaccagtttagggggttttcaggttggtatcatgggaagagggacaaggaagtggcaggtgtttgtaaaactactgaaatggtataccatggaatctaaaatagacaggaagggaagtgaaaacagaaagaattaatggagagatactggaagaaagttggtggactggcagatctaccagaggctgaagagctactacaaagaattgctgtaaggctcaaatggatcaataaatacaaagagtcactaatcctcataacatccctatgagacagagttcccaaatccaattaagagcctttcaacacagtcatacatcacttaaggatggggacaggttctgagagatgcatcgttacgtgatttcgtcactgtgggaacatcgcagagtacacttacacaaagctaggtgcacagcctactccacacctaggctagatggcccagcctgctgctcctagcctacaaccctgcacagcatgttactgtactgaatactgcagacaactgtaacacaatggtatctatttgtgtacctaaacatatctacacatagaaaaggtacagtaaaaatagagtattacaatcttatgggaccaccatcttacatgaggtctgttgttgaccaaaacatcatttgttatgtggcacccgattgtatttaacagactaaacactaataaactgattatagaactgtaaagagaaaaaacaaacttcttcactccaaatataaccttctttaacctctatgcactgttttacctaaatacaagcaaagagaaacctgagattccaaaacgtaattattttccttcaaaatattcacatttacccaatattattggacagattaccatattacaaagaaggcttatggagattaaatgtccttctggttttcaataaaacattattttcaagaaactataaatagtcccctctaaaaattcaatctctttatcctaccatggatttaacagaataaacgctccttctgaactcctgactcatttagtctgtccagttcacctgcccttagtatatgttgccgtgtacgtaatacaccccactgcttgtaagcagtcagaacaacaggcacacagctgtgatgcagcacagtgctctacacacagcaggcactggccaaacattcgactaattaatgaaacccataaacacactgtgttagcaagctgaattcctcatctttagaaatgctgtaatattgggccaggcatgatggctcatgcccgtaatcccagccttttgggaggcccaggcaggcggatcacctgaggtcaggagtttaagaccagcctggccaacatggtgaagtcccgtctctactaaaatacaaaaatcagctgggcgtgatggtacacgcctcccatctaccctggaggctgaggcacgagaattgctccaccctgggaggtggaggcagtggtgagctgagatcatgccgctgcactccagcctgcgtgacagaaatgctgtaatattaaacagcatcaatgaacacttagctttctgctctttctcaaaagattcttttatatatatattttttgagacagagtctcgctctgtcgcccaggttggagtgcagtggcgcgatctcgacccactgcaacctccacctcccgggttcaaccaattctctgcctcagcctcctgagtagttggggttacaagcacccaccaccacgcctggctaattttttgtattttcagtagatacggggtttcaccatcctggccaggctggtcttgaactcctgacctcatgattcacctgacccagcctcccaaagtgctgggattacaggcatgagccactgcgcctggccagattcttttcaatatttccaatattaattaatttgtagctatagaaattatcattctcctaagtgtgtataatttgaggaaggcagataacataaccaaagtagcttgaaacagcaatacgacaaattcttttctttttgacacagaatctcgctctgtctccccaggctggagggcagtggcgtgatctcggctaaccgcaacttctgcctcctgagttcaagtgattctcctgcttcagcctcctgagtagctgggactacaagtgcccgccaccatgcccagctgatttttgtatttttagtagagacgggacttcaccatgttggccagggtggtcttggactgctgacctcaggtgatctgcccacctcggcttcccaaagtgctgggattacaggcatgagccaccacgccctgccaacaaattcttaatttacactttcatttgaaacaaaaaacacaaaacattactttcagtttcatatccagtaggattttaaacatttttctttcatcaaagcaaaaacacttgcttaagtggttaatttcacaaatgttaatcacatgcaaaagaatggttaaggaatataatgtccatgtggcattaaaaataaattggagaaataaattgaaaattgcataaaatgtgatggaatttccaccagaagtttaatcaagtttgtagtaacattttatcgtaataacactgttagacgaattcctagtgggctgagacaccaaattcaacttctgagcaatatcgaggaagagaatggtctctacaggcaacctcagaaatctgtcatcagtattaacctgcttaaaatgttttgtcattgacgaaatgaaggcatggaatacatacaccatcaattctgtggatgacaatcaattaggaaataccattaatcagataaatagccatcaagattttcaaaagatctcagtagttaaaagaacaactttaaaccaaggatgaaattcaacagatgtaaaatcttttccctgaaaagaataagacaggataaatatgaaaactctatcttagtttcaccttggggaaagggacttagggattttagttcagggcaaatgcccaaagtgaacagcctaacatagctacccaaaaagaggaggagggaaacacactcactcaagatctcctgtatacagcactttgcaaaaatggctggcatatattacataacgtaaccttcccagtaagaaaatgaggctgatatgaacaccatgttagaggacagggagtcgggacttaggaaggccttgcccaaggtcacactgctgttgagacgtggccagtgcacacgagtccctactctgtctcctgtgagcagtattaatagaaaggcagcgtctaaacccaggggataacagatcactccatttgttccacattggtgagtgtttacaagtgtttaacttatttacataccgtgtttaactcctgggacatatcaaaagctattttgaaagactcgaatttgatcaggaaagtaaccagaacagtgtgtgtgtctgctggggttgggggaagttcagaagacgaagaaagttcctggagatataactatcttgagctttctcattcagaggtaaataattcctgcaatacttttatgaccgtaactcacaggccaacatactgaatttaagagaaaaacacttgaacttcaataaatgaaacttccaagcaattaacacttttctataatggtatccgcttcaagggacgaatgttttagcgtttaagttaaatgacaaaatctctaaaaacctggcagaccttaagctattttcactcacaacctggaaaaatgtatttattcaacttggtttagtaaatgagtacattattattgttgctcttgtgttattccggtgaacagctgtcttaaaatgtttccctccagcggtggctgctttcagggggaagggaaggaaaaggaagtcttcaaaaggggaacaatatcatggcgctgtgttaatcacttcagcatccgtcactccacactcaccacccttcttgaagccgaccatccccactctttggagagaagaaaggccattctcctctctgaagggcctcccaagtgcttccctggagacgcacttccccgggatgcccaggccgaagcaaagggggcggggagagaccccgggccgaacccttctgcccccaacccctccagcgccccgactcttcctggactccgacatcttctgcaccgccccgggcccccatccctcccgcaccctggtccctctggcaccgccacggactactcctgcgccccgacttctcttgcaccctgaacccttctgcaccacggcccttcctgcaccgccacgggtcctccagggacccgacccctcctgcaccaccacggaccctctgcattccaagcccacctgcaccccatccgccactatgccccgactgcccctgcacccccttgagccctgcagtgtcccgactcctcttcggggcatccggggaacgactcggcgcctgacaggtaggaagatggcggcactcacctgtcacagcagctgcgcccgccacccccggagccagcccaggtcgcgcaccgccagtgagtccctacgacgcggccccccgtactgacccgaagacgcgcaggacaccgctgtctccgcactgacgcgaccccacaaccccaacctggcgctaatgcacttccggtgtcgccggaagtcccgccccagtcccgcgccgctgggttctccggaagccgccccacacctccgccccacacccggcggcgccggaagtcacgccccggcttccgccccgcagccccgaggggtctggkcgcgctgaagaccccttcggctgctgggccaacgcccccacccttggtcacctactcctgccgccgagcggttcgcgggaggtggcctcgggggtcgtagctactcaccggcggggcgctccgagtccatctgccccgtagcccggcagccggggcgggagggctgcgagcccggggcgcggtccgcctgaggcctgagacccggggccgcctgcgctcagggccgcggtgccggccgcgcgggagcctggcggggacggcgcggtcagtgttcggctcctccgcagtgactcaccagcgtcctgaagcttttgatcaccattggctgggaaggaaaaacagaatcagctgttccctgcgaaaggtgggacttgggccgcttttttcttagaatctaggttggaaacgtcgcatgatggtctttacgtaaacagccgtctcaacgctctacagaaagcgctaaccgcgcatttgaagcccacctagagtaaatcaagagcgtgaaagcattttttttttctgtgtaggttaacattcctgctccttcctttaaaaaggaagctcaaggccaggcgcggtggctcacgcctgtaatcccaacactttgggaggccgaggccgacgtatcacgagattaggaggtcgagaccagcctggccaacatggtgaaaccctgtctttactaaaaatacaaaaactagccgggcgtggcggcgcgcgcctgtaacccctgctactcggaaggctgaggcaggagaatcgcttgaacccgggaggcggaggttgcagtgagccgagatcgcgcctctgcactccagcctgggacagagcgagcctccgtctccaaaaaaaaataaggaagctcaagatgaagagtcagaagtggtaacttgtttgttgcacaagaaacaaatttagcattctatttaggggatccagattaccaaaaaaaaaaaagaagtgaagttatttctgcattaagtatattaataaaactttatcactaaaaacaattctgtaagaggaacgccaaggaaaaaaatatttgagtttttagagaagtcattttttaaacttttagaggttgtgacatttaagtaacataattttatttagtacctagtatgcaaagacattgtactgggcatggcagcaaatagaaagctttgtaaatcgcagtgtcccatctaattaacccgcattctaacaggtggttttattttgctggaccgcaccacagtcaggtaacaccaagaatatcgctaatgtaattttttaagttgatatatttaggattccataaaagtcactgaaaataactgagagcatgacatgtcacaaaacaagggaaagaaatcattttgaggatcagtcgctttacatcttttgtaactaatttaatccccaaaggaatccaataaagtaaaagttattctaaattgaattttaagcatgagaatgtggaaattactcgtcaaaagtcaaaaataatcgtgcagcagggcaaagactaaaggctggcatcagaatccatattcttttcactgttgatgtgctagggctgcaggaacaaaatactgcaaactaggcagcttaaacaaatttattgtcagaggtctgactggaagtcccaaatcaaggtattggcagggttgattccttctgagagctgtgatgggagcctgttaatgcatctcagcgtctaggcattccttggcttgtggcagcatgcccccgccagtcttcacatgacgttttccatgtccgtgtctgtctgcacacttagcgttctttttatgaggacatcagtcatattggagtacagtagacgctactttaatatgacctcatgttaactaatcatatccacaacaaccctgtttccaaataaggtcacattataaaatactggaagtgaggtctttaacacatgaatttgaaagggggacacaatttaacccataacacactgtatcctgaaataactatccaatgtaatttttttaaaagacacaaaactagccgaaattataaaaggttatgattgcaatcctggtatccagttacattctccctcctgcagaagctgtggagaatcctgtctcagaaaaccaatttctattttgtcacatgtccatctatgcaaaatacatgtactttgtccctgacatagggcaacaatgctgaatttactaagactcatttttgcgcatggtttgatagggaattaagatttactaggtattctgtcattgtcctcattactgattattttaactgtgtctcaaacacttggatagtacactatagtgttataagctgtttgacatgtcgcttcctaaattctcaagttatatatatgtgtgtatatatgtcatgtaacaggcacaactgttttcatgtgtatcactttattgcacttcacaggtatcatatgtttcttacaaagtggaggtttgtggcagccctgcatggagcaagtctgtcagcaccatctttctaacagtatgtgctcacttcatgtctctctcacattttggtaattcttggaatgtttccgttattaaatcagttatagtgatctgtgattagtgatctttgatattactgtcataattgcttggggggcaccatgaaccacccctatataagacagcaaactgagtcgataaatgttttatgtgttctgaccactgcactgaccagctgcctccctatctctctccttctgctcagacctccctatccttgagacacagcaatactgaaattaggggccaggcatggtggtggctcatgcctgtagtcccagctacttgggagactgaagcaggaggattgcttgagcctaggagttcgaggctgcagtgagctgtgatcacgccactgcacttcagcatgggcagcaaagcaagaccctgactcaaaaaaaaaaaaaaatcaggcaattaatagccctaaaatggctactgtttcataaaagaatgagttgcacayctcttactttaaatcaaaactagaaatgattaatgattaagcatggtgaggaaggcatgttgaaacagctaagtcgtgaatgcaaaggaaaagttcttgaaggaaatttgaagtgctcctacagtgaatacacaaatggtaagaaaataaaacagctttattgctgatatggagaaactctgagtggtctgtatagattaaaccagccacaatattctgataaagcctaatccagagtaaggccctaactctcttcagttttctgaaggctgagagaggtaaggaagctacagaagaaaaatctgaagctatcagaggttggttcatgaggttgaaggaaagaagctgtctctataatacaaaagtgcaagataggccaggcatggtggcttatgcctgtaattccagcactttgggaggccaatgcaagtggatcccttgaggtgaggagttcaagaccagcctggccaacatggtgaaaccctgcctccactaaaaatacaaaaattaactgggtgtggtggcacacgcctgtagtcccagctactcaggaggctaaggcaggaggatcacttgaacccaggagttggaggttgctgtaagccaagatcacaccaccacactcctgggtaacagagtgagactccatctcaaaaaaaaaaatgtgcaagtgcaagataaagcagcaagtcatctaggagatctacctaagatcactgatgaagacggctttgctaaacaataggttttcattggagttgaaacaaccttattttgggaaaagatgccgcccaggactgtcataactagagaggagaagtcaaagcctggcttcagagctccaaaggacaggctgacccttgctagggggctagtgcagctgatgactttatgttgaagccagtgctcatttatcattctgaaaatcctagagtccttaagcgttatgctaattctagtctgcctctgctgtgtagatagaacaacaaagcctagatgacagcacatctacttacacagtgtggtttactaaatattgtcagcccactgttgttgagacctactgctcaggaaaaaaaaaagatttcgtttcaaaatattactgctgatttacagtgctcctgttcacccaagagctctgatggagatatacaaggagattcatgttgatttcatgcctgctaacacaacatcccttytgcagcccatagctcaagaagtcattttgactttcaagtctcattatttaagaaatacattttgtaaggctatggctgcccgaagatgtaactgaatcactgcactagcataataaaacatgaatggataagcagttgcttcttgtggatgaacaaagaaagtggtctcttgagatggaacctaatcctggtgaagatgtgaacactgttgaaatgataacaaaggattcagaatactccatagacttagtttatgaagtagcagcagggtttgagaggattgactctaactttggaagttttcctggccgggtgcggtggctcatgcctataatcccagcattttgagaggccaaggtgggcagatcacaaggtcaggagttcaagaccagcctggccaacatggtgaaacccmagctctactaataatacaaaaattagccgggcatggtggcacacgcccatagtgccagctactcatgaggctgaggtaggagaattgcttgaacccaggaggtggaggttacagtgagccaagatcgcaccactgcacttcagcctgggcgaaagaacgagactctgtctcaaaaaaaagttttcctgtggtttaaaaaaaatctttcatgaaaagaattgtcaatcaacgtgacaaatttcattattgtcttattttaagaaactgcaacagccaccccaactttcaagcaccaccttgatcaacagccatcracattgaggcaaaaccctccaccagcaaaaagattatgactcattgaaggctcagctgatggttagcagtaaaaaatattaactttaatcatctcgaccattcagtactcatctaatattctctataacaaaatgggaaatgcacataaagcacttctgctacatgctgaattatgattgttgtctccaggaaaagaacttgtgggaacgtttgagttgtaagctgaactaactagctgcttttttcatgaaataccgcttttactggaaagaactgacagataaactgaggtattcaaacctagatatttggcagacattttcgtgaaaataaatatgttcgtgccacttcaaggaacataattctcagtacttgttgccaataatgttggaattttcatgcaaaaattcaaataaaaaacaaacttaaaaccatcaagaacttggtgactttatgtggaagccagtgctacaatactttagcttcccaatacttaaaaacttttctgatgagattactagtgatattaacaatgtgattgatattgaataatgaaatgttttagcatttggaagatctgtttaattcagtaaatcagtattttccaaatgaccaatgcatgacatttcaacatcacgcacaggaaaataggcattcgaggtacagtcaaaaataatgagttttaatgtaacaagtacaaaatgtccattgaagtggtttcaaattccaaatagtaattggaaaatccaccactcgtgttttggggtagtagtatcgaaaaagaataaccaagataatttgaaaaggctattaaaaaatacttctcaattttcaaactgcatacagcaggtgctcattcatttctttgtaacattgatgagaaaaagactcccagccaggggcactgtctttgtggtgtttacgtgttctcgccacacctgcataggttttctctgggtgctgcagttcttgccacatcccagaggtgtgcacgtgaggtgaactggtgtgtcttcactgtcccagtctgagtgtgggtgtgtgagtggccctgtgatggaatggcgtcctgtccagggctggttccctctttgtgccctgagctactgaaacaggcttcagctacacatgacccagaactggaataaktaagtaataattatctttttattcatctttcttaaatgtatgtatagctcacatttatttcaatgtttaatattagaatactttggcctttagaagcttagtgattttttttttccttggccagaagtatgctttaggaacttaatccttattttttagcctctggtaaaattggttttgctatacgttgtttcacttaaaagtcctgattcccaagaacgcactgacagcagtgaggacttgctgcgcatgcgggaggccagattttcttatctgtgtgaagccagacatgaaagagatctgtcaacacataaaacaaaatcaaagtctgttttttgtctggaaaagatttttaataaaaatataacttatgttagtgtcgtgtgttttttaagtgaatattttaatatgtttaatttctatgttagtaaatagcagtagtaaacaacagtgagcaaaagcttttaggtgtcctcagtacattttaagagagtgcaagcgtcctgtgaccaagaagtttgagaactggtgcccaccaggttcatctcacaagttcagtattttaaattccacacaaaaggtagaggaaatagctgaattcgcttcagctgcgcatacatttcacgattatttaaaagtttagagggctaggcgcggtggctcacacccggaatctcagcacttcggtaagctgagccaggtggatcacttgaggtcaggagttccagaccagcctgaccaacatgcggaaacccgtctctactaaaaatacgaaataagccgggcgtggtggcgcatgcctgtaattccagctacttgggaggctgagacgggacaattgcctgaacccgggcggcggaggttgctgtgagcggagactgcaccattgcactcaagcctgggcaacaagaatgaaactgtctcaaaaaaaaaaaatttagaacgtagtcatgtacctcgaaagcgaacactcccaacatagcgtggaacaccccacacccccggcgactttgctccgccttggtcccggtcgcagacaccgcagaaaggccatcgttctagacatacgagaactccccgtgcagccaaacgctgtagtcccagcggcggaactcggggggggggrggggggggagtgcccaaccagccagtcagcagtgacgtcccgcctttcctccgtttccattggtccagccatgcggaggtcgctcccatgggacgccgagcttccggctgcagggcttggcgcccgggcgctttcggattgggagggcttcctccatggaacgcgagcctcgagacgtctgacgttaggcaccgttcgcagcgcctcgggctcgcacggcaggatcgaaagcgtgattggctggcggcgtctgtggtctcgggcaccgcccagtcgcgggacgctgcctctgcggaactgggggtggggcgtgttgacccccttaaaggcgccagagcccgcggtcacggctcaggttcccggtgcttcgcgcgtctgccgttgtcacaggccagggaggtggcaccaccaggcgaagcttggcgagattgtgtcgtcaagcgcgtacgggcgccaattggccgggcgatgtggcgtggactggcgctggcgcgagcgattgsctgcgcggcccgggggcggggccagtgggcggtgcgcgccgcagactgtgctcaaagcgggcgccatccgggaccggcggttgtctgtggccggaggctgatcaggtactgtggacgggcggcggagttcgggagacaggggcagggcggcatcggggagctgcgggacggggcggggaggaggcccgaggtctgagccacccgtgaggtctcggcgcggaggcctggacagctgggggtggcggcgttggtctcccgaactggagggaggccgggccttcccgggctgtggtgggcgcccgcgccccgtggaaggcggaggcgtgagtcggggcgtcagagacgttgccattctttgtcagcggaaaagatcgtcgtctgcgcacagtcacctgaggtttaggaactcgtggaactggaaaccgagtcgcaggagactaagagttgcgagtctccccttagagaattcagaaacaagcgtagacagcatcgtcagaaacacgagcgtgacgacaccggcctccccgtgccgagtccacgcgtgtgacgcgggtgcatacacctgcgtccgtgcaagagggtgacagcaacacactcaaggcgcttctcctgggaatggagcaggagaagagatggggagcatcgcatagatggaactagacctttttcttgggttggatgatgtgttcccgcgtctactacatggtattctttaaacgcataaatagacgtattcattttatcttgtgattatgcagcttagctttaaaatctgaattctgaaaatcctgaaagagcaattgtcattacagctgggcggtggtgcacgcctttaatcccagcactttgggaggcggagtcgaaggctgcagtgagccgagatcgcgccactgcactccagcttgggcgacagacayagcaagacccagccccatccccccggaaaaaaagtcatgtcaaaaagtctagtaattatgtagtaacgaaacctatcttagtgatcacctaatatacagttggcctactgtatccttggggtccatatccatggatttaaccaactgcacattataaaatatttggaaaaaaatttcatctgtactgaacatatacagacttattctgtaaacaatacagcacaactatttatgtaggatttacatgttttagatactataagagatcatctacagatgataatttaacgttcggcccgcatcacttaacagggatactttggagaagttcattgttaggtactttcatcattgtggaagcagagtgcgctgacgcagacctagacagtggagcagctgggctgtgtggtgtagacagacggtggagcagctgggctgtgtggtgtagacagtggagcagctgggctgtgtggtgtagacagtggagcagctgggctgtgtggtgtagacagtggagcagctgggctgtgtggtgtagacagtggagcagctgggctgtgtggtgtagacaatgggcagctgggctgtgtggtgtagacagtggagcagctgggcggtgtggtgtagacagtggagcagctgggctgtgtggtgtagacagtggagcagctgggctgtgtggtgtagacagacagtggagcagctgggctgtgtggtgtagccagttgctcttaggctgtttttcctgttgcttcaggcctaaatttggacagtgtgtgactgtgctgaataatgtgggcagttgtaacacaacagcaagtatttgtgtatctaaacatagaaaaggtgatgtgttgtgctccgatgttacaatggctacaacatcattagcaataggaatatgtcagttctgttataattttatggaaccastgtagtatatgcagtctgtagtgtaccgaaacaccatcatgtgacacatgtatgtatacagtggatatacacaggtgatctgcaaatattatgccattttatatctgaaacttcagcatcctcaaattttggtagctgtgggaggtcctggaactaactcccatatataccaaaggatgactgtatataaaactagcctatagaagttggaaatctttctaaaattgaggctaactctgaagttgacttccttttcacattattttccctcttgatttgttttaatcattaaccttatttcagattttttgtattagatatcaatatctccatcatcactgactcctgacacacgcattcacacacacacacacccagaccctatgtgggtctagaactttgtattaagtagctgtttaaacactttgtgtacattctgcagtatgcttgaactctgttgaaagtatttcagtggtccccgtgtggtggctcactcctgtaatctcaacactttgggaggccaaagcaggcagatctcctgaggttaggagttcgagatcagcatggccagcatggcaagacttcgtctctactaaaaatacaaaaattagcctggcrtggtggtgcacgcctgtagtcccagctacttgggaggtcaaagcaggagaatcacttgaacccaggaggtgggggttgtagtgagctgagattgcaccattgcattccagcctgggcaacaaaacgagactccctctcagaaacaaaaaagtatttcagtaaaatctatgtatttgaaatagagtcacatagaaagtagagcacatgggatcttcaaaatatattgggtagaaaaatcagaaaacaaaaattatwattcattcagaaataaaggagaagaaaaaagggaataaaaaacttcaaggtcagactatgtaaaggtgccctgaaggatacaaagattagaaagcttagacgctgctggatayagatatgtaaaagtgtgagtcagaatactgaaagtaccctaataagtgctttacgttgtaatcacatgggagggataaatgggggttcagaaaattaatgtttgatgcactaaggtaggaatgggccaactatggcctataggccaaatctggcctgctgcctgttgttacgtcctgtgagctgagtgtttttctcatatttaaacrgatggagaagaatcaaaatattttgtgacacatgaaaattaaatgtaattcagtgtccataaatattggcatgcacccacactcagtttacatactgcccagttcacctattgcctgtgactattttagtgttacagaggcagagttcatactctctggcccttcacagaaaaaacttgccaagcactgccttaaagcatctattgaatataacgaattaagtcttctcctgtttatctagaatgatatcagctaagtactgtcctgggggaaattgacaaaactcatacaaataatttttctgataacccaggagcttgggttgagaaaaactggattaagtcttactgtgacattggtagaaaggttattgaatgtctggcasgagttgtgccttgaaaaaatggatttcaaccaagattggcctgtggcaatcttgagcaactatgcagagacaggcagtgggaaaaacaattcaggatggcaatgggagcacattctagagattacagaagctgrtgtagaaaagcaggatgaaaagttaggttggggccaaaaaccagagaagaaaagtacactggaaaaaggattgagtatcaagtgctgcagaggatctcagagrtcaagaatttagagcggaacgttgagcttggccttcaggagcatgactgtgataaaaggccagctgtgaaacctgtaggagaaatgatgacccagatagtgctgagyagccggctggcagcgttcttggggtccctgtggggatgcagagtggtacaactgcagatggggaagcagcatcattattaacctgtgtttatatgacattcagaaaaatatatgatggcctttctttctcttttcctttaatattagtgttctagaacagatcagacattttgtaatgatgcctgaaataaacactaaccacctcgacaagcaacaggttcaactcctggcagagatgtgtatccttattgatgaaaatgacaataaaattggagctgagaccaagaagaattgtcacctgaacgagaacattgagaaaggtgctgctttgaaacagtctttcttgtaaagcgatttgtgtaggcatttccgatttgctgagaagagcactctgttcaaggaagtgcagtcttcagtaataccgtattttctcgttggttccagttcgttaaatagtgtggtcattagcatctgctttgctgtcttcctgttacagcgatttctcttcacttcatgcctgttactcggcttcttcagagttattctggattcatagaagagggactagccctgacatacagcagcagcctagcctctaatatttctagagagtggagagaggcgggcaccatgcagggaagcrtgtgccttcaccactttccgagaactgaatgtccttgatagggaacttgactgccggaaaggggccaccagcatcaccatttccttcactcgacggccaacttccttgcccagtgcagagctcttcctcaccatagccatgcagagactatgcatgtggataaaccatgggaaaaagcaaaagcagcagcaagttactaatgttattctgaactgcagggagagaatttggcaaataactggtacttaaggctaaaataattgttatttcttttgctttcaggattattgcatcgagcttttagtgtcttcttattcaacaccgaaaataagcttctgctacagcaaagatcagatgctaagattacctttccaggttagtacacttttaatgtacaatattgtgtttgtacattaatttgactttttatcattctgaattcttggagccaaggtcacaaaggraaatcctgtgaatggcataattttatattctgcataaagtgagtttacacaatgagtgcaacctaatacaacagcaagaaaaaataagaactagtaagcaattgggcaatatgtataatttacatatttatctttaatctgtattatctacactttgatcttttttggttraagaagtattaataaggaacctacctacaaatgtagtctgtttcacaacataattactgatagcccattataaccaattttaaaatccttaaaataattactgatagcccattataaccaattttaaaatccttaaaataattactgatagcccattataactgattttaaaatccttaaaaatmatttcatttttcagttacttataaaactttttcttgrtctttcagacctmctttgaagaaaagttgatctgtctctgtattaccattttccaggttgttttacgaatacgtgttgtagtcatccattaagcaatccagccgagcttgaggaaagtgacgcccttggagtgaggcgagcagcacagagacggctgaaagctgagctaggaattcccttggaagaggtaaccagctctcctacacaaccatacaagctgaaacctaaacatactataaaaaggtttttaataaaatttttaaattcaaatgtagttctctgcttggtaacctccggagttatgagttagccccacaaaccatcttgaataaagattatttaaattttaatttcttaatatcacttgtcaaaacttagctcaatacggggatggattgatctgttaagcactatataaggttgaatatttctataattgatcaaatctaagatgagtattttcaagtgttacagctcttgtagaatttaactgacaggttttccagttctcacctaaaactccccacctacaaaaaaggtgaagattttctgatggaaactcttaggaatatgaaccataaatctcattggtttaattgaaatcattttttttcttggaattgtcccccttaaataagacctggataaataaagtatttcttatctatattttccaaaaagcaattttaaaatatgaaaaagaaaaatgtcgggccggtcgtggtggctcacgcctgtaatcccagcactttgggaggctgaggcaggtggatcacgaggtcaggagttcgagaccagcctgaccaacatggtgaaactccgtctctactaaaaatacaaaaactagctgggcatggtggggcggcacgtctgtaatcccagctactcaggaggctgaggcaggagaatcgcttgaacctgggaggcggaggttgcagtgagctgagatcacaccattgcactccagcttgggtgacagcaagactccgtctcacaaaaaaaaaaaaaagaagaaaaagaagaatgtcacatttctagtttgagtgactgcccctttttttaacattaaaaaaaaaaaaacttatctgatcgggaaaaaaacgcaaacacttgaaactaatgatgtaatcatttttccatatataatattaagatttccatataccattgataggagattaatsctttaaccaagttckaatcctaaractakactgctgttcgagatatcsctgtaatacagtgagctaattttagatttttttkgttacggtggccgatgttttaattacttttttttttttaatgtcttaggttcctccagaagaaattaattatttaacacgaattcactacaaagctcagtctgatggtatctggggtgaacatgaaattgattacattttgttggtgaggaagaatgtaactttgaatccagatcccaatgagattaaaagctattgttatgtgtcaaaggaagaactaaaagaacttctgaaaaaagcagccagtggtgaaattaagataacgccatggtttaaaattattgcagcgacttttctctttaaatggtgggataacttaaatcatttgaatcagtttgttgaccatgagaaaatatacagaatgtgaatatgtaggtaaatgattacagaaaaatttatctgcttaacaaacttagaatgactttttccttttaaatttagttctatcattaatttatcattaaatttagttctatcatttggtactatcattaatgtattatatacactgatactttaaaacttgtgtggaaaaaactaacttataattttgtatcacacaccctggatatgtgttctgtttctaagcgacatttgtgagagattattgtaaaatgagagcgagcaaataaaacttaatttaatctttgcagatacatacttatgggaaatttgaacaaatgagtgaaactctgtgtttttagtaggctgtgataaacatttccggagcacttgcagaggacttgctatttgccaggtgctttatgtatcattaaatttttctcatagttcagaaaaatgtgcaaaggaaactattgtctcgctccttcaaaacagtcttaattaactttcatattagcagattaaactagcagagcaggttcaagggaaattaaatgatatggaccctaatttgtatcattctgagttgattgtgtggtttattcattctggaaacatgttgatacttacagtcagccactgcttttgataagtgatattgattaggttgaatcttcttgtaaatagtatttaccagttagcaaagtctgtgttttcagaattacagtgagcacagaggtgttcataaaatgggaattgagtcccactcggtaagagttgcttaaacttgacactgttgacatttgggctggataaaacccctgtggtggggtctgtgctgtgcattgcaggatggtgagcagcgtccctctcatgtgacacccacagttatgccggatgttgccagatgcccctaggggacagagtcaacccccaactgaggaccactgtcctacagagtcaggaaatattgtagggagaaaaaaataacaacaacaaaggcctgtgttaatgttaaatagatgagattatggaatrtgtatattaatgttaaaaattgtaccttgatcaatgtactttttataaacttgccatagatatctcagatttgaaacctcaagacagatttattattcttaaatgctgtatgataatgaagaaaaataaaaatttatttcttgcaaagttaaatgtttgttaaattcaatagaatgactcatttatggttaactttgggcaatttataatttcagacaagactgtttagcaagtattttattgaaaagtaaaaaaaattgcaatttaatactgtgtttagtttgttaaaattttgatacactaataggatattgcctgtatagtttccgttgcatttataatattgtttctaatttttttagttttattttctaggaagttttaggctgaaagccacatataattagttatgtgataactatgagttgccatggctactgaattggacatgggacccttagactgctacccagcaccttgttaagtacttagcaagagttagatactactgttgtaatattactaggatgccatccagaaaatgtaaggaatgtcttttgacctgataaactccttagaactccttcatcttttataaagaggagtatccctctcctagatatagctgcttctgaccccaaaggcagatgtgttggttttcaactagaaagctaaatggtacctataaattttttttttcttaaactgttttaaactcttaatcttcaaaatatatacttctttgattctggtcaaaccattgccaactcctttaaggacaaagtagaggtggccttctaataattgctgattctgtttccctacctatattatcaagagaacaagaccaaaacagaaaatggtataataggaaggaaggcacattttcttcttacttggccctggcacctggggacaagtccaggtcgtacccgcagtgcatccctgtgggaactgccctccacctgctccctggggacacgtccaggtcgtacccgcagtgcgtccctgtgggaactgccctccacctgctccctggggacaagtccaggtcgtacccgcagtgcgtccctgtgggaactgccctccacctgctccctggggacaagtccaggtcgtacccgcagtgcgtccctgtgggaactgccctccacctgctccctggggacaagtccaggtcgtacccgcagtgcgtccctgtgggacctgccctccacctgctccmtggggacamgtccaggtcgtacccgcagtgcgtccctgtgggaactgccctccacctgctccctggggacacgtccaggtcgtacccgcagtgcgtccctgtgggaactgccctccacctgctccctggggacacgtccaggtcgtacccgcagtgcgtccctgtgggaactgccctccacctgctccctggggacacgtccaggtcgtacccgcagtgcgtccctgtgggaactgccctccacctgctccctggggacaagcccaggttgtacccgaagtgggtccctgtgggaactgccctccacctgccccttagggggtgcttgtgcagtggtttcatcctctcacttggatctgtccgttggaccctcactagggttgggagttcctcatgggatgaggtactctagatcccctcttgacagattttctttttattatttcagatacacctcttcttcacccttcctctctgggtgctttttcagccctaagtatgtacttacacattttataacattttatagcatgaactgaagtgtgtatttgtgtgtattcaggtatcctgacagctttctgctttacaattttcacacattatacttatttaccatacatggtttagactcccaaacgtaaatctccaacaccgcattctctcctctattttatatgcatataggtgaatgcataagtaaactgatatatccagacagtaggatgttatttggcactaaaaagaaatgagctatcaagccacaaagacagggaggaaagttaggtgcatgttgctgaaagaagcatgaaaggctacatcctgaaggagtccagttctccaacattccagtaaaggaaaactggaaacagtaaaaagccaggggtgacaggggagggaggaatgagtgggcagggcacaggatttttagggcagtgaaactcttctgcatggtactgaattggtggatataggtcattatgcatttgtccaacaccaagagcaagcctcatgtaaactggactccaggtgataatgatgtgttgacgtacgtctatcggctgtaacaaatggaccactccgatgaggatgtagatagtgggggagtctgtgtgtgtggaggggctgggggtttatggaaactgtctaccttccacccaattttgctgtgaacctgaactggtcgaaagaataaagtctattaaaatttgggtgttaaacatgaaaagaagcttaacctcattaatcacagggtaggtgcaaattgaaacccgaatttaaaagaccaacatcaccaagtgttgacggaatataaagtaactgcttctgagcatgcctgctaccatgaagctgttggccactatctactaaagtcaaacgagtcagacctggcaggagacaaatgtgcgtggttctgccttcttttgttgccattttactaactaagcagcgaacgaatgcagcatattcttgggctgggaagtcactgacatattcgttgttactttgagaaacaaggtgtttcccagatttttatgcactgccctataagtaggtgatacagtgtgggttcagggcttgcctcgctcacrctcacggagctctttgctacatgtccagtctctatcccagggacgcccctgcagaacatctgcagtggttacatcagccttggtgtctgcacaatcggatgctgccatgccgcgggagcagtcctgctatacacagcagtgtgagtaaatccacagacccaatcttgagtggaagaagccggatacaaaaggcatacgtgattccagtgaaataaaggtcaaaaacaggcgaaaccaattaagatgtaggcaagaatagaagctacttccagggggcgcagggagccttgtgattttcgaagtgttctctatgttgatagggtgttaattacatgggtgaatatgttaggattgattgaaacaatttgtgcacttttaagtgacagcttaacacaatatagaatccgtgagctctagagaacagagctcagcactgatagagaatcagtggagagcaagtggcatctcaccttgacaggagtggaagtgcaggtacttctggccactgcatcttggtatcagattggccaggaaaagccatgaagacacgccctgcgtgggttggggctccactcctgagagaagaaagaaaggtcagctcccacggtgtacgtcgggtccccatgcccgtgggcccctgcaggcagctgacacggcgttggttgacatgacacacttatgctgtaggaaaagaactctgtccccacccccaccccacgggggacagatgccgcagtggggttggtcacgtgctgctcaatcacatgccctgacgcagattaaaaggaacacacagagtctgaagaggaaaggtgttcccacgccaggtgacaagccagctctggctgtgaggccttgcctgcatctcagcgtgtccacgtgctttcccttctgcctggaacctgcactgccttagtctgcacctggctgaatatgactcatttaaacccttggcttaaacgtcatctcagatgatcttcccaggactcaaatctgaatcaccagcatgaagtcagagctcagtgactttgagtaaattatgaataaaaacttaagcattggccgggcgcagtggctcacgcctgtaatcccagcactttgggaggtcgaggcgggcggatcacgaggtcaggagttttgagaccagcctggccaacatggggaaaccccatctctagtaaaaatacaaaaattagcagggcgcagtggtaggtgcctgtagtcccagctactcgggaggctgaggcaggagaatggtgtgtgaatccaggagacggagcttgcagtgagccgagatcgtgccactgcactccagcctgggtgacagagcgagactccatctcaaccaaaaaaaaaaaacacaaaaaaaacttaagcatatactcacaggtcccataaggctacattgcttgtgtacagacagttccctctcagcagtcgccactcccacgtcaaaggctgttcatgcttcccttcaggtaatggtgggccaggtgggccaggtgggccaggcagtggcacagcccacctcccaagagcgctggaaaaacctgagagagaatgtcagagaccaaatagctctgaaaagaagcatagggcaaaatctaggagaagaaaacctgtgctgcttttcccaaggggcattgcccagttccagtaaatgagcagagaggctgggcaatggagaggtgcttccaatagccagacaggaatgggggagcagagaccaggggtgagagctgcgagggcaaggcccacggagagcttcccaggcttcacgtgctaggaagaggaatttagggccagcctggaattggctcaaaacctgtttttattagggaaatctgagatagttacttctctagtttcttgcagaaaaccattatgtggaggacaatagcacatcacagactccaaacaacccccatgtctttgtcatacacagcatccagagctcgctgggcatccacccggtgggagacaggccagcacgaccaagtggccagcacaccagccagcagcagtgacttcagggcccagagaacgtcagcacgctgaaacctaagacacaaagcttaacatcaaagaaataaaagtcatgacagaatttttagagaaactggacattattttttttaaagaaccaaatgggccctgttttgaaggatgtccctgagagccatcggccccagcagagaatcactgctggggtctctgtttcttatcacagaaattctagaactgtgtccagaacataatcagcactcaataattattagctaaagggaagaaagaaggaagagaagatagactagaatgtcttccatgtgaattttttattgaggaagcttgagaggcggccaagaggcctggggaggcctgcgttcctggctttaggctgtttgttgagcaaagacagtgacctttctgttcccagggagaacagcccttctcagtttcattatggacaatgttcttcacagcccttacgttactttccagaggaagagatgcagacttcatagacctatttaagtaagattgaaagatgattttattaaaatctttccaatttttatacttctggccaacaataggcattcttagaatttttgaaatttacaacttaatcatgacacgtgaacatcctaaagcacacacatgtccttgaagatattccacagagaagctacaatgaaagccgtaagactctgtgactggctctgtgaccatggtttgcagattgatctgagcactttggccaggcatgtgccatttgattcttgtcccaggaagcccaagacgtgacacggtgacccactttaatgtgtttatacataagtgatttcaggaggcaaaaaaacagattacacttttttttttttttttgagacggagtctcgctccttcgcccaggctggagtccagtggtgcgatctcggctcactgcaagctccgcctcccgggttcacgccattctcctgcctcagcctctgagtagctgggactacaggcgcccgccaccacgcccggctaatttttttgtatttttagtagagacggggtttcaccgtgttagtctggatggtctggatctcctgacctcgtgatccgcccgcctcggcctcccaaagtgctgggattcagattacacttttaaaagtaatggcaaacataattctcaatttagggtctcagtaatttacaaatgtatgtctagagttaatgggcatagaaatttacccagaagaattaggaggggtatgtatgcaaggggtagaaataggatcccaattcagagaaaagggaattgttctcagggaatcaggacagggaaagt

SEQ ID NO: 6841 - DNA, 23349 bp, Homo sapiens
agtcatttaatctctctaaatctgtcatatcacctgtgaaatagcaataataatacctactgcctaaggctactgcaagaatgaaatgggatcatgtatataaataaaggcttgcctggggttctttctcagcggagatcgctgcctgcaattctcttccttgcttccttttgccccagccagtgggagcagcctggtggtggcccccagcctcagttcttccactcactgtaggacctgagttatagtggaagcagagtgcttcacatctcactcctgtggctcactctgcctttagttttgagatgactgagcctccaaaagcctttgagagatacctctgccctcagtcttggctgtggtttggagttgtcttggaggtcacttggagctgggtaacaagaaaaatgacatttgacagaattgttttctttgtcagatgctgcaggaatttttgggggagtttgttggtcatgattgcttaaaaaatcctttttttaagtgggacattagtaacaagatgttaaaattgttaataattttttttttgagacatggtttcgctgtgttgcccaggatggagtgcagtggcatgaccacagctcactgcagcctcaacctcccaggctcaagtgattctcccatctcagcctcccaagtagctggaactagaggagcgtgccatcatgcctggctaatttttaaaatttttttgtagaaacagggttttaccatgttgccctgggtggtctagaactgccgggctcaagcgatcctactgcctcccaaagtgctgggattacaggcgtgagccaccgcgccctgccccacatcatgtgggaagggtgcggtggctcacgcctgtaatcccagtacttcgggaggctgaggcgggtggatcacgaggtcaggagtttgagaccagcctgactaacatggtgaaaccccatctctactaaaaatacaaaaattaatcaggcgtggtggtgggcgcctgtaatcccagctactcgggaggctgaggcaggagagtcgcttgaacccgggaggcggaggttgcagtgagccgaggtcatgccattgcactccagcctgggcaacaagagtgaaactccatctcaaaaacaaaaaacaaaaaacaaaaacaatggtagcgtatgctttgctgacacaattattttatgtccctaggttggttatgtgaagttttctgactcttccctgctatttaggaagggcttcaaagacctgaatacttagtagccagtgcagcagggtttcagggtctggcctggggaggggaggggagggggagggcaggttgcagctcaagtggctttagagatgctgagcctctccttctgtcctgcccaggacgcaatgagcccctgaagaaagagcggcttaagtggaagagcgactaccccatgactgacgggcagctgcggagcaaacgggatgagttctgggacacagcgcctgccttcgagggccgcaaggagatctgggatgccctcaaggctgccgcctatgctgctgaagccaacgaccacgagctggcccaggccatcctggatggagccagcatcaccctgcctcatggtaagtgggcagggccagggctttatccccgctggagctagggggtcaccagcacagtttgagggtgttgaggagtgtggagcggtggggcaggtggttactcacgtattcattcattcaagcaccccttactgagcatggaccaggagtgggtacacaaagaaaaagagacacagtctatgcttgcctaatgacatgacagaaagacaacaaacctgcaaagcagtgtcacaaatgcactttgggaccccagaacatccaaggcactgacctttttattttatttttttttttgagatggagtcttacttgctctgttggctaggctgaggctcagtggtgggatctcggctcactgcatccttcacctcctgagttcaagcaattctcctgcctcagcctcctgagtagctgggattacaggcatgtgccaccatgcctggctaattttcgtatttttagtagagacggggtttcaccatgttggccaggctggtctcaaactcctaagctccagtgatccactggcctcagcctcccaaaggcactgaccttttattgggttgttatgtgctggacaccgaactagaaacttccactgcattagctcacgtaagttcatagcagtcttatggggccatgtaaagcagagggtgacagtggagccctagaatcacagacttgagtttctttttttttgagacggagtttccctcttgttgcccaggctggaatgcagtggagcgatctcggctcaccgcaacctgcgccgcctgggttcaagtgattctcctgtctcagcctcctgagtagctgggattacaggcatgcgccatcacgcccagctaattttgtatttttagtagagacagggtttctccatgttggtcaggctggtctcaaacttccaactgcaggtgatccgcccgccttggcctcccgaagtgctgggattacaggcgtgagccactgcgcctggccacagacctgggtttcaatctgaatgtttccctttcctaactgtcttggctttagcaaggagcttctcgaatttagagcctgactgccttacgactgtaaaggggagatgattattaggattcagtaagatacacataacatcatttagtccagtcccagcacttagtaggtgctcaagagacaataaacatatttctccatgcattacgttttgccagtaaggacactaaggcccatggagagcagagctgtgctatttcattcatccctgtaaccccagcacctggcacatgtgaagaagtgaaaaataatatgccaggatgaacaagccagtacctggtggagctgggatgccagctcaggtcttcctgactccagccctgtacacctggtcatcaggctgtcctagggagatctgactgtggggtggccatggcaggtgtattagtctgctcaggctcctgtaacaaaataccacatgctgggtgacttaatcaagagacatttattttccacagttctggaggctgggaaatccggcatcatggtgctggccggttcaggttttggtgaggactctgttgctggcttgcaggtgtccgtcttcttgctgtgtcctcacatggggagcgagtggagagtgagatagtgctctagtgtctctacaagaactgtaagccagggcagtggagcacacctgtagtctcagctgctcgggaggctgaggtgggaggattgcatgagcccaggagttcgagactagcctaggcaacatagggagatcttgtctcaaaagaaaaaaaaaaaaaggaccatttttcccatcaaggggtcagaaggtcagggccccacgctatgacctcatttaactttatttatttctgtataggccccatgtccaaatacagtcacattgggggttagagtttcaccatatgaatttggggggacccaaacatttaatccatgatagtggatccccaagctgactctgacagccctgcctctcctacaggcaccctctgtgaatgctacgatgagctgggcaatcgctaccagctgcccatctactgcctgtcaccgccggtgaacctgctgctggagcacacggaggaggagagcctggagccccccgagcctccacccagcgtgcgccgtgagttcccgctgaaggtgcgcctgtccacgggcaaggacgtgaggctcagcgccagcctgcccgacacagtggggcagctcaagaggcagctgcacgcccaggagggcatcgagccatcgtggcagcggtggttcttctccgggaagctgctcacagaccgcacacggctccaggagaccaagatccagaaagattttgtcatccaggtcatcatcaaccagcccccaccaccccaggactgatgggcccacggacccctgggaagaggccccgcctggagcactaggcccccaccctgctgctgccttccagtgctgtcattttcttcaggggccctcccctcggtgtggctggtgggtgagccgtgaagggaccctgcctttcagggcactacgcgccaccagttcccggtacccagggagcaggcagccacacacgggccttgcaaccttgtcagagaaaaggcgaacagggccctcaccctgcctgtctcccgaagcaggttcgagccacaagggccaaccaggaggcccctggagcccagatctgtcatctggtgctgccagctgtgctcactctggttttctgctcagggtctgaagcagctgctgtctccctcctctgcccccatcccctggctctcccctgggcacagtgccactcccttggaagggagggaaccacccrtgagccccagggcttgggaagcctgaggcrggcctctgcctctccctgcccccagcacaattggcagagatgaggcgggtggtggacrgctgggctgtcgtggcagggtctgcacagggccatgtcctggctgtaacccaggcagtgggaggtctgcagcctggtcatggcctccacagcaggtccctgtggacagacatatctgcatatttatcaataaagccttttgctccttctcgcttgcctggcatttgactgaattctcctgcagctctgtggggcccctggagctgttctggtatgggaacaggtggatgcctggcctccccagctgctctgggcatgcaatctccagcagagtgagcctggaactgccagtcttctgggccctgatcccagctcccctggtgtcctcatgagtcctcaggaaaagccactctttgcttttctttaaagcagagccatgctgcctgccttgcctcctccatcagttgctgggaggattaagcaggaagacagatgtgaaagtgcttgcaaggcgaagacagcacctcaggaaggtggtctgctcctgcagcaagaggggctaacttccggccctggagacgctgtagccatcgtgatgttaaagcaaaatctctgacagatttagatcgtgtgtcagaggtttgtgtcagcttcccagcaagggaaccagaaaggaaaaggaaccggttcctcatgcttcctaggggaatgcatgcatatctgaagagaagggaatcttatataaggctgtttagctaagggcagccaccagccaggtgagccttacagaagcacagggctgggtgtctgcagttccctagcagattaacctgggtcacagtgactcagagctccagcatgcgagttccaggtgtggaactgagcaagtacagatctgcttttgctccacttgggagtatttttccttcttagtgagcatgggcagcctcctggccagggaagtctggcactgtctgggcctgacagggaaaccctgggagggtagaaggatccagagtagctgctgttcctcgctagctgggcttagtgctttccggagacccctttcttgaagcaagactctgtaagccctgcagaggtcccctgagcacttaccaagagaggagacagattggataaggtttgttcatgactaaaagtcacccagccaaatgcagtgatgcttaacggggaagcatgtgggaccccggagagccgaaggccagcgtgagctgtgatcagagagggagacagctgcccttcctgctaccacggccctggcctggacaagtagagtgtgaccctcctcacagccagcagggcctgtctgcaggacagcctgggagtacagaactgtcctgggtcccccgtttggttttcaggccctcttcctggagctggctgagcagggtttccaggcatccagcaggtggcactgtcatctgggctggagcatgcagccagcagttcccttttgcaactcagttgccttggctaaggcccaaccagtcccaagtgctcaggacagaggctggacgggctccttcctgcacccctgctcttgggacacagtgccctccggctctaataggccaggagttgggggggcaactggctctgctccctggccctggctccccctgctccctggggctgcccgaggtgaaggtgacaggtgggggaggcaggtggagaattgggccagtgagctcatggcaaaggcgcccagctgggcaggggtgggtgctctggcctataaagcccccgaggccctgtggcctgcagaggcggttatggacggcaccatggaggactccgaggcggtgcagagggccacagcgctcatcgagcagcggctggcacaggaggaggagaatgaggtgcgagcaggggtggaggtgcccaagggggtctgaggagatccagttctgctgtcaaggggagggagatcctgtctgctacacctgtggtggggaggggggcagatgtccccaggggyccagttgggcctcattcctgtcccagggtattactggcagggggtattgctggcagcagaagactgaggcttcagccttcaaaattaagtcagtgagatggggagctgggctgggcttcctaagactgctcaccctcctgggccttgagagacagtgggctgtacaaagcagacagctgggtgctgcctgggactttcaggaatgtgtggccctgtgatgccccagtgactgagtgggaggctggggcaggggaaactccagtatttggccagtgaagaagagagtgaggaagggatgctgggaaatgaagcatggattttgccagcctgctggccacccttggggagtcctttggcgtgtggtgttctgggcaattgcattttctctgggataaggaagtggagcggtggcagggggtgctggcttgtcctattctgcatttttttttttgagacggggtctccctctgttgcccaggctggagtgcaatgcatgatcttgactcactgcaacctccgcctcctgggttcaagcgattctcctgcctcagcctcccgagtagctgggattacaggcatgcaccaccatgcctggctaatttttgtatttttagtagagatggggtttcactctgttggtcaggctggtctcaaactcctggcctcagatgatccacccaccttggcctcccaaagtactgggattacaggtatgagccaccatgcccggcccctactcttcactttatttaaactaatacttcatctagtgttggctctgccaagagcccagagctgtagaaatgggtggaccaataagggtcagaccctgccttctttttaccaacccaggattcattttagcccatttgttggtttcatagtcaactaagaaacaaggcaaagggaagaaatgactaaatagaggtgtgaatcagaagtggaggaacacaaggggctcatgaattgttctgagggccttcaaggactcctctgtggacagggccaggtgcagtggctcaagcctgtaatcccagcattttgagatctgagatctgaggtgggcagatcacttgaagtcaagagttcgagactcacctggccaacatggtgaaatcctgtctctactaaaaatacaattagccaggaatggtgtcaggcacctgtaatcccagctactcaggaggctgaggcaggagaattgcttgaacctgggaggcggaggttgcagtaagccgagatcgcaccactgcacttcagcctgggtgacagagggagactccgtctcaaaaaaaaaaaaaaggggactcctctgtggacaggaggatacctgagctgggccttcaaggggactcagtggagtccaggatggtggagggtattccagcctcaggaaatgcaggagctgaagtttccatgagtgaaagcgtggctgtcttgataaagtctggtagtaggggctaaggctggaaagacacaagccagagagggccatgtaaaagatatttattctgtgggcagtgaggagccactaaatgttattgagtgagggagattggtgtcatctgacctattttaggaaagcagctctgatggccctgagaaggacttgttggaaaaggctggccctagcaggaatggaggggaggagataaatcaggttggaggtagatgccattcaaaaaaaggagtgtgactgaatgaggggtgaggaggaaggaagggtcaagaccccaagggaagaagggatgaggtcaggaaagagcttggaatgagccctggctggggcaagcatccctggatctctaggaatcccacttctccctcccccaagggcatgtgcctatggttggctggtgccaggcaggtgagtcatgctgctatgccagttctggagtgctgccaatagacacacagaccttcagcaaggggacgcagagcagtgtcttccgttcattcatccaataaatatagctacagagctgtcaggacaccagtgccaggccctgtgctaagcattttacaggcattctcccatttaatctgcatagcaatctatgacgtaaagtgggagctttgtgtgtttcatgaactcacattcaatgcagcaaacagctactgagcacctactgtgtgccagcccacaaagacaaacctgaaatgaagggctgtagggtctgaggaagatgtgggtgagcattagagtccccagttgtctctaccaggccccagcctggcagggttcttggaggagaacctctgtctagcctgtgccccatccccagggtgggaggggaaagagggccccagaggccagtgcaggggctggagttccactgtggcgagtttactgggttaggtcatcactgagaacttaagggttagcagagatgctgagtctgcttgccatcatccattcgatcattcattcattcaccagtcactaagcacctactatgtgctagagcctgtcacagatgctggggacaccaagatgattaagacacaagctcgggagccacagtggctcaggcctgttgtcctggcgcataaggaggcaaggctaggcatttgaggccagcctggacaacatggaaacctctcatctatgtgacaacaacaacaaaatttatagccgggtgcagtagctcacgcctgtaatcccaacactttgggaggccaaggtgggcggattgcctgagctcaggagtttggaccagcctgggcaacatggtggaaccctgtctctactaaaatacaaaaataattagccaggcgtggcggcatgcgcctgtagtcccagctactcaggaggctgaggcaggagaattgcttgaacctaggaagtggaggttacagcaagccgagatcacaccaccgcactccagcctgggtgacagagtgggactcggtctcaaaaaaaaaaaaaaatacacaagctggccctctggatgctccctgaggagcccagccagagtcccacatgcagcagtagctgcagccccaggttatctttcattcttggaagaagatgcagtgtttctgattaggccagcactgagacctcaaaccatgaagcccaacatgaaagagagaaagcagtggctaacagaaccttcagaatgaagacctgggaaatcggctctcaaaaccaccctgaaggagcaaatgcgggagctcagggaggaatgggaaaggggcctgagtgctctgtaagggtggcctccttcccagctgccacattgactcaggaccctccaacctgggcaattgttcctggactcatagccacacaagctgcctggtggggactgcagagatgggagtgccagcacatcacaaagagagaagaagcagtccaggaaaatcagagggcaaatgcagagaagacctggcaggcagttggacctggattacagtgaaaagaaggttaagacttagagcccgtttcaggctgaaggctgaggagctgctgctcccatcaccaagttcccctgaaagcaatagtttccaagctctagacttcacagatcagtgaaatctgagagaaaaaaaaaatagtatctaacaaagagctgccaaattttatattgctgagtaagaacatttaagaagtaatcatctctcatcataattatttcatcaaagtgaattatttatttttaaaacttattttatttatttatttatttatttatttatttatttatttatttatttattttttgagactgagtctcactctgccgcccaagctggagtatagtggcatgatcttggctcactgcaacctccacctcctgggttcaagtgattcttgtgcttcagcctcccaagtagctgggactacaggtgcgtgccaacatgcctggctaatttttgtatttttagtagggatggggtttcaccatgttgcctatggctggtctcgaactcctgggctcaagcaatccacctgcctcggcctcccaaagtgcttggattataggcgtgagccactgtacctggcctatttattttttgaggcagggtcattctctctctctctcactgtcactcargctggagtgcagtggcatgtccttggctcactgcaacctccccttcctgggctcaagtaatcctcccacctcagtctcccaagtagctggcactacaacaaaagccactacgcttggctaattatttaatttttttgtaaagatggggtctcactatattgcccaggctgatctcaaacttctgggctcaagagatcctcccacctcagcctcccaaagtgctgggattatagaggtgagccactgtgcctggcctatttatttttagagacacgatcttgctatgtctctggagctggtctcgaacccctgggattgagcaatacttctgtctaagcctccccagtagctgggactaaaggctggcactaccacacccagccaaagtgaatttttaatgccaaaaaagtaaagaaaaaaataatcttggtgcttgaaagagtgaatatatttaatctcatgaaaaactcaactctggtggcctttaatgttgttttgcagggatccaggccagttagtgggcaggtgtctgagctcagggttgggactggggctgaagctgaggtggggaactcaccccttttgggggcccctccaggggccctgctcttgctgggggctccccaggatcagccagaagggctctgagaccayccaggaggatgtcyctgtggggtgtccttggtgtggttgggggagaggctgcctrtctcctcgggtcctggagaaggtgccctctttggatcaccagaaactccgaggagacrcacgccagaagctgcccatggacttgctggtgctggaggatgagaagcaccacggggctcagagtgcagccctgcagaaggtgaaggtaagcctgggaggatccaatgtctgcacccaggggaccagccaggtagccatggcctgtctgcacctctccccacgtggcccatggaccagcagttcagcacccccggtagagcttgctagccctgcagaatctccgccccgtcccagaactactgagtcagaattcccccaatgtgagagccatctaggcctggaaggagggatagaccttggttccttctttcttaagagggtcttcctgcccaccccaccctccccaccagcttagctcagaggtctcccaagccccccaaactctctgcccggcctggggggttgatgggccatcccgcgcagggccaagagcgcgtgcgcaagacgtccctggacctgcggcgggagatcatcgatgtgggcgggatccagaacctcatcgagctgcggaagaaacgcaagcagaagaagcgggacgctctggccgcctcgcatgagccgcccccagagcccgaggagatcgtaagggtcctggggaggacaccgcgagggggcggagggggagcccgggaggcttcggattgctgggacggcccgtgactgctgcgtccacatctgcagactggccytgtggatgaggagaccttcctgaaagctgcggtggaggggaaaatgaaggtcattgagaagttcctggctgacggggggtcagccgacacgtgcgaccaggtgatgctcctagccgcccctgaccagcctccctgtcagttgccacccccactccgttcggctcctgggtcagcccactgtgagcctatttgagaggaggcaccggtgttctttggatgggtgggtggctggggcgctcagaatgggtgtcccttccccgtacaggaattgacctaaatccttaaacccttttccaacttgaatcacctgcagagcaacaaatgtcacatgtttgtttaggaaagaaagaaaaatagaatcaaataaaaacagaccaggaccagaagatgtgggctcaaatcccatctctctcactcacgagttgtgggacctgtggctgggtcggtgccctctccatgcctcagtttcctcctctgtaaaatggcctacttccctcacaacatgttacggtgatcaaatggaatattaggctgggcactgtggctcacgtctgtaatcccagcactttaggtcaaggtgggaggagcgcttgagcctaggagttcaagaccagcctaagcaacagagtgagaccctgtctctatacatatatagataaagatatagattttttttttttttggtaaaaggaaaaaaggaatattagcacctcagtaactcagtattcactgaatgaatgaagaaactatcaagcatgtgttaagatatgatatttttgtttctcatggtatagtactgtactttttttttttttttttgagacagagtctcactctgtcacccaggctggagtgcagtggcgcaatctcagctcactgcaactttcgcctcttgggctcaagcaatcctcccacctcagcctcccaaagtgttgggattacaggcttgaaccaccactcctggcctatttttttttcatggtaaaacataacgtgaaatgttccactttaaccattttaagtgtacaattcagtggcattaattacattcacaatgttgtgcagccatattttctttttttttctttttctttttttttgagatggagtcttgctctgtcccccaggctggagtgcagcggtgcgatctcagctcacagcagcctccacctcccaggttcaagtgattctcctgcctcagcctcctgagtagctgggattacaggcgcccgccaccacacccggctaatttgtttatttttagtagagacaaggtttcaacatgttggcccttgacaacaagctggtcttgaactcatgatctcaggtgatccacccacctyggcctcccaaagtgctgggattacaggcatgagccaccgtgtccggccccttacagccatattttctaaatttttcatcacccatcatacttctttttgttttgcctgaaactgcctctttcacacttcccggggtgctttcttgctctcgtatcctggaatttggcacattagtggttttccacctttggtctgcattattgtagacttggaccacatgtcctttctgttctttagactccagagtcttcatcctctcagtctgtccaactacctcctacttccgagcaccatgctaggtgccagaatacaaaaaaacaaaaaaagcaaaacaaaacaaaaaaacagaccagggttggttccttggggagactgacatgtaaccagatcattagaataaggaaagatactcactgtgtgtgtcctgtaaccagatcatgagaatatggaaagatattgtggcttgagcgtttcaaaagtccaaggcagaaaggagaaggggaaaagtttattctttctttgaatcagtgatcagtgtcacctgttcatgctggccttgtgctaggcacttggggagtccagcaagacttgacctgccctcgaacacactctcacagttaagggtcatctgggccctagggaagccctggcctagaggtttcaaggaaatgatggcatttgagctgcatcttgaaggagtagcagattttatcaagcactcccaggaagtgagggcaaaacaggcatgcttggcagaggaaaccacctgtagagaggcatggcttgatgtgcctggggggcagtgagaaggtcgggttccctggggcagagrgctcccaggctggtctggatagagcataagggagctggcagaacacagaaaacatgggggccaagcacaggggtgagaatcaagctggggggaaggcctgggmctcagcttgggtgggagatgggctcaggcctggagccagaggccaggccctgacagcctctctggggacagttccgtcggacagcactgcaccgagcttccctggaaggccacatggaaatcctggagaagcttctagataatggggccactgtggacttccaggatcgggtgagtgagagggcaggtattcaatgggagacaggaggtgggtccagcactgacagacaccctctccctgccacctgtgccaacctgaagcataaacaggttgctcaggtgccagactccacctcagtggcttatgtgaccttgagtaagccccttctcctccctaagcatcctctgtgagtctggcttggaccagatgggccctgagtgttcttctgttccacttggtccattgcccatgcccaggcctgctccctgtacctttcccctagatatccctctgccttcctggctggggtacattacccccgaatactttcttccctgcagctctgtagttagaccccctcatttctttctagctggactgcacagccatgcattgggcctgccgcgggggccacttagaggtggtgaaacttctgcaaagccatggagcagacaccaatgtgagggataaggtgaggcaaaaacrctcagaagcaacagatattggggtggctgtggggagaaaggcaggggtccaagggcaggaaagcctagggggcaggaaggtagtgagctagtctggtttctggctgcagagcagggaagctaaaacagtgtcctactgggcctcccagcccagggatgggtccctgccatccacacaggcccttgaggaaccaccatctgaggataggagcaggaagagcagacaagaagggaagacaagagactcactgtgttgggggctttgggaccactcaaaagatgcaagatttgttcatgttatctgtcattatccttctgtctacctatctattcatctatccgtctatccatccatccattcctccatttattcatcccctcattcatttatttatttatgcaccatccttctattcattcattatttcatgtacaaccttgaacaagtgacagcctctgagcttctgttgctcatctgtgaaatgtcttgcagagttcttgtgtagcttaggtgggaaaacatgtgtaaatgaattatttattcaacataaggcaaatgtcttgtaagcttttgccatgtccattacatagtcatctctcaataaatgacatmtattatgattattaaaagaagggtagaagagtgagcagctgggtgagaggagaatcacagaaggcttcccagaggaagtggcatttaaggctttagagttaggccattggataggatggtaagaaattgtaccattctctgcccctccaaggctcaggccttggcactaggacttggaagagggattaagctggagttaggacagcccccgccttcccaggggtaccacagttcaggccccgtcaactagcagttcctgattcctcccacccagctgctgagcaccccgctgcacgtggcagtccggacagggcaggtggagattgtggagcactttctatccctgggcctggaaatcaatgccagagacagggtgagtgctagcctgtccgctgctcacccgccatgggtgtgtgggcagcctgcgggcccctacaggtggtgtccttcctcctggggccttcaggacttggctcctgagcagggtctccagcccacctcccatcacccttgcctcctcccactgcccacaagggccatagtgagtgccacactgactctaggaaggggatactgccctgcatgacgctgtgaggctcaaccgctacaaaatcatcaaactgctgctcctgcatggggctgacatgatgaccaagaacctggtaagctcattccctccttgattcagtcactggcgtgagcactcatacagtggaggtgctgtcctggtccctggagcagcccccgcctagggacatgtatcatyggctctggccagcaccatagtacataaacttgtcctcttccagagcaccattccaactgtccgccccattctctatgtgtgtctatgtccagagtgcaagtgcagagagacagcaggaggggcagcaagaggacttcccaaagacccccaagtaggccagagggggtcctcaagtactggcccaaggaggccagaatcatgaaaggccagagctggaagggaccgagcactcagctggcatgacagttcctagcaccccatgtcagctcctgtggtctttgagttttcttaggatctaggcaggaagtccttggaaggggaaggtgcccagggaacaccttggactagggaacacttagtccaagttcttctttggggcccagagcattcacaaaaggaggccatgrgagagtccctcgggctcaagaaaggctaaagggataatgagaaaagcaggaaaatatggagaaggtataaatgaggggttttcaccctcagcattattgacatttagggcygggtgattgtttgttgtaggggaccatcctatgccttgtaggatatttaagcaacattcttggcctctgcccactagatgccagtagtacccatcccctagtgtgacaaccaaaagtatcttcacacaatgccagttgcccccatttgagaagcactggtggtgtcaatgagggtaccttctgtgaaagccttcaggacagttaacagattttctcttgccaacccccacgccccgtcccgccccctccaggcaggaaagaccccgacggacctggtgcagctctggcaggctgatacccggcacgccctggagcatcctgagccgggggctgagcataacgggctggaggggcctaatgatagtgggcgagagacccctcagcctgtgccagcccagtgaatgcgtgccccagcccagccagctacccagcccctctctgtgtgcagccggagggtcctaagaatggctcccggagctaactgagggcccagccttttttctgcatgatccaggagcacataccacaaactaccacaataaaaaagctgtttttgctaattgcgatgttcatttccacttgtgtctgaaatctttgggaatgaaggaagactgggggcaaatgctggtttggggaggagggaaactgggagccggttggccctctgagccagccctgcagcttctttactgtggtctcttttcctttcctccctgccactcaacttttcctgccccttctcacatctccagggccaggcttggcccctgcatggattgacttggtaatacactcatcctggcccccttcctggtgcctgctgtcctgtggggctgtgagtggctagcacaggcttgtcacgtggctgccttggcaggaggagcctggtaagggagcggggcaggggatggacagcctgtcacaggcagcttcttgcccagccttgccacacctcccacagggcaggacctgctcagccaatcagctccaccaacctcagaactgcccgtggaaacctggctgggcttctggcttcagagctgggaattgtgggaggagggcccagatcccactggagataccgaaggagatactctttagtattgggatcccagaaaccagtcctatatctggccagagggacactgggttgtggcatctctctagctgctacccagaaggaacagggccccctggggcctataggccttgcccctgaccctgggaacacccagctcaggcctgccccagtggccacaagtcagggaggccgcaaatttttaactagaaacattgatcattaatagggggttagaaagagttcaaactaagtctcactctgggacatagaccaattgtgcttcaggcctcctgcagagatgctgggtccccaagtctggtcttctgtgaggcaggggctaagcaggagcttgtccaggaatgtgggggtctgggcctcaggggaggggaagaaggtggacattgcgggtatctacccccctgtgaccacccccttcactgccactgcagaggtggactatgggaaactggaggagaatctgcacaaactgggcaccttccccttccgaggtaagtggggctgtcctctgtgggacctggggagatgtgagtggccctttagccagagaccaagggagggtacacaggctctgtcaagctgtccagggatagtctggtactcagtgggtcattttattatgggagaggaacaggggagactggtctggagtcaggagacaggcaggaagctccacgctggcctgtaaccttaagctaaacctcacctgcttcagtttacccagctgtaaactgttaaagtgcctttgtagctcccagagtgattctgaggttggactggataatgggcgtgaaagtccttgtcaaccttgtcacttggtgcagatgtgaaggcatgtggctggggtcacgtggcagcccagccacagtcccagttccctccaaagtttgtttgtacattctcttctggacaaagcctccttgccagaattagttctcctgtgaccccttggctcctgtgactcctgttgtggctcctgtgaccccatctctctttacacatgggtctccccaactctgaggttagggaccagatgatatttgcaacaatcaacatgtaacagagtcccaggcacaataaatgaaggtagaagaaaatgtcaaattctgcctgccctgctccgcccatccccattccttactgcacaatcccctgaggcagtgctctctgtaggaccatcccacagatgggaatctgggcctcagagtgacatggtcactgcccaaggtcattcggctaacacatagctgagctgaggtttgcacctcgtctgactgcatggcccatgctccattttactccctcgctgactctcattataaaccctttggagctgctaggccacactatttcaacggagtgtctggtcagcactagctttgttgtggctgctattgaggcagtatcgtgtagactgtggactctggtttcaaatcacagctctggagtgagcgcctgtaatcccaacactttgggaggccgaggcggagggatcatgaggtcaggagttcaagaccagcctggccaacatagtgaaaccccgtctctactaaaaatgcaaaaattagctgggcgtggtggtgtgtgcctgtaatcccagctactcgggagactgaggcaggagaatcgcttgaacccgggaggcagagattgcagtgagctgagatcataccattgcactctagcccgggcgacagagcaagactccatctcaaaaaaaaaaaaaaaaatcaaatcacatctctggcactgacttagtgtgggatgattgctgtccctatcggacacatgggagtgataatgctcatattatgggatggttggacaaaaaaatctgagagaatgcaagtgaaatcgtgctataaattgtggagtaatatacattggaaggtactgattccaatggtaataatgattaaaatgacagtgtgattggcattgcagcaaagctgctttgtgactgtgacccctggcctgatggacacgttgatcattcatagctcagtactgagggaatgtgccccttccttggggacaatgaatgccctgtggagggccacgttgagcagggcacaactgttaggtttctgctggtgcttggctcgtggggcctggaggtttggtgaggtcctggttctcttgaagtgagaagcattttgagcctctaagtgaagaccttacttcagcttcaaggttcaaggatgctctagttcagggtggggagggtggactttgcatctggtgtttgcctgacacccagagaatccacagagacccccagactcttctctggaccctcccttctgggccacccacccactcttgcagagggcatggggtgcccaggagcacaggcttccgtggatttagcaggctgtgggctgcacatacccacttgtctgtctccctcgcaacctatgcaggctccagctcccatctgatcactcacccacacaccagagagccagcggggtgtggtaggaagagcccagcatcttgagttagaggacctgggcaagaatcctgccacttctgccagttaacagagaccttggggaaaccacttaacctttcaaatccagtcctcgttttagaataggaactgagccttcaggcttctagccacagggtcaatataatcctcccaaggcactgtcacagaaaacacagagatagagggtcccttccctgcttccagggtgcagccaaaatgcccaggaaggaagacacaaacaactttagctctgaaatctgtgtttctcttgccctgtcctggcccctgaggtagactttgcagcccaacactcaggctgaggagggaacgtatcacattgtaagggcctcctgcagccagttaaaggtcctctgaagaggagatgagggccaggcacagtggcttactcctgtaatcccagcactttgggaggccaaggcaggaggatctcttgagaccaggagttggagaccagcctggccaacatagtgagaccctgtctctattaaaacaaataaataggaggtggaaagctgccctggatgaatcagtgaagagttagagattcttctggaaagcactccctgaaactgtgtagcttttttttttgagacagagtcttgctctgtcgctcaggctggagtgcagtggcatgatttgcctcactgaaacctccgcttcctgggttcaagcgattctcatgcctcagcctcctgagtagctgggattacaggtgcctgccaccacgcctggctaatttttgtatttttagtagagatggggtttcaccatgttggccaagctggtcttgaactcctgacctcacggtccgccggcctcggcctcccaaagtgctgggattacaggcgtgagccaccgcgctgggcctcttatttatttatttatttttaagatggggtctcagtctgccacccaggctggactgcagtggcacgatctcggctcactgcaacctctgcctcctgggactaaagcaatctgcccatctcagcctcccgagtagctgggaccaaaggtgcacaccactatacccggctaattttttgtatttttagtagagatgggattttgccgtgttgcccaggctgatctcgaattcctgagctcaagtgatctgcctgcctctgcctcccaaaatgctgggattacaggcatgagccaccatgcccggccccgtgtagctctttttaaaaaatctttttagcattgctaatttgtactgattatttgaatagagagtattctttttgttttttctttcttttttttttttttttgtgatggagtcttgctctgtctcccaggctgcagtgcagtggcacgatctcggcttactgcaagctctgccttccaggttcacgccattttcctgcctcagcctcctgagtagctgggactacaggctcccaccaccatgcacggctaattttttttttgtgtgtgtgtatttttagtagagatggggtttcaccgtgttagccaggatggtctcaatctcctgacctcgtgatcgtccgcctcggcctcccaaagtgttgggattacaggcgtgagccacagcgcccagccaagagtattctttttaaataaaaattatgaccagagactagaggaaggggtcattacagaagggctctatggccctgaactcacacccataaacaccctcaaagatggactttgaattgttatttccaaatgaggttagccaaccacagaactagtccagcaggactgggaagatgaggttctccataaaacacttgtgtcctattccttccatacatagagtggaccatgctttcttgcaaagatataatattttgtatatattaaaaccattactctgttaaagaaaatattttgtttaaagcatcacaatgtttacaaccccattttggcatttcttatttttttttaaatgggctagatgcttttgaggggaaaaaaaaatacagtggcccaggcctgtttataccctgagaggccttggagattaattaggcttttagttgtctgcacctatggaaagcctggccagccagcccacctgctcacaacccgaaccatgcctatttatgggggggcaaattctgggtttgtaggtgcctcactaaggcaagaggtagcagctaccatcccggagtggccccagggatctagacccgatgaagtctcctgtccactctgccttctcagcccactgcttgcctctccaccctcagcccattgtgacctcatgttagttactccagaatgagctccttcctgggttcttttccctctgaactctgccctgtagtgaggcgaggggctgcaaatgaggatggaatatgccaggctggcagcagacatgggcactggatggaggtgcactggtctcagatggctaggaatggataccagcccagtcaaggggatcattctgtcatggccagcctgacccagcatactttgccccctgggggccaccagatggggagagagagaaaccaaagactggaagatacaaaggcctaagttgtagaatggattccaagcagaaggcagaaggactcagaattggagaagcagccctttcactgagcctggggacagctgtcagggtaggagacaggacccaggcctcaggcaatgcctgccaggctagacatgagggatgctgcggcctctccccaccccactctccccaccccacccgcaactgccttcctcacaatggggttcattgttgaggtggtggggggcacctagggagggtgcagcagggggcctgcctgtcagacatccttggggagcctgccctttcaagcatgaatcataccaccagagatcacccagcktgctcttagctctgcctgcctggtgtagggtcctggagaccttcttggagctcatccagcagccatcatgcaaggtggtgctggggactgccctcttgct

SEQ ID NO: 6842 - DNA, 60486 bp, Homo sapiens
actgcagatgaagattaaaatctaaacacaaatacttaatgtaggaaaaaatgcaggataatatttttacaatttcagtatgcatatgcagaaggatttcttaatcagaaaataaagatacagtataaacaaaaagaaagttaaacaaagataaattataagcaacagggttcctacaagtgacaatgatgctgaacatcaccagtaatcatgaacttgaaaaagaaaagacaaaatagatcatgctcccctccccatcagattggtaaaattttaaatgagtgctgggaaaatatatacacataagcattgctagtgagaaggtaagttggcattttagaaagttgatgagatagtatctataaatttgaaatgtatatacatagcaaattcacaatggggacagattcattatacaaaaatacttcggcatgccccaaagtataaatatgttaggacagccattgaattctattgtttgtagtaaattgttttagtccaaacactaattcctctgtagcaaacataggatctaataaaatggattatgtgtggaaatcagtcctctttagaaacctaaaggaccaagtgtatcctgattaaaaagataaaacgctttctttctttctttttgtttttgtttttttgtttgtttgtttcgagacagaggctcgctctgttgccaggctggagtgcagtggcgtgatctcggctcactgcaacctctgcctcccgggtttaagcgattctcgtgcatcagtctcccgtgcagctgggactacaggcgcacgccaccacacccagctaatttttgtagtttaagtagagacggggtttcaccatgttggccaggatggtctcaatctcttgacctcatgatccacctgcctcagtctcccaaagtgctttttgataattttgagaaatgatggaagcatattagaatgaaaacaacctgaggatgtgcttttatctttgtatattcaaatattttttctcattaaaaagcagaaagtccgggtatgatggttcatgcctgtaaccctaacactttgcggggccgagataggaagatcccgtgaggtcaggactttgaggctagcctgagcaacatggtaggaccctgtctccataaaaagcttaagaaaaaaattagcggggcgtggtggagtgcacctgtagtcttagctatttgggaggctgagatgggaggatcacttgagcctaggagttcaaggctgcactgagctatgatctaaccactgtactccagcctgggcaacagagcaagaccctgtctctgaaaaaaaaaaatacacacacacacacacacacacacacacacacacgttagtgggatagcacaaatgagaaaaactctgctctttgatcactgagtacatctctgtagatatatatttccttcactgcagattttgcccaagatacttcgtcaaagacaaagccagtacaccctctaatagggtgaatatggttatgccacctactgagcttgtttttgatactagttaatatgtaaccagatgaaattgtcattatcgtcactgtcaggactatgggaagcttaagtgttctcttttcaaggacaatgtgcgctaactgtacaattggtacaattaaataagttatattcagttcctgggaagcactatagcaatacaaggagaaaatttgattctatttatttttgttaaggcccacctacctcctaatcctaatttctctcatttcccaaatattccttgtttgttcttactgttatgtgttttcctgtattttgctcttctactttcttttccatggactatctttttcccttcctttttttcgctctacccctttacctcagctttctagcagtatttgctaaatacttcaaaactgtatagaactggttcaaattgtgtgctcccttttctgtcaagaacttgctactcaggtaacccaattggtgatttttcctggaaacactgatggatgctgttcctatagcgaaacccagaacagagatgaaatagatgtcatcctcagccattagcattcaaactataaaaattaatttacactggtatagtaaggatcagaatgtcaaagctgtgttacacctagcatcttgtatgaaactaccccattaaggtgagaccacagatattattgccccactattggcatgaaagctgaggctcagagcagttaactgagttacccaggaccacacagctaagttagaagtagggctcaggtgtcctggcaactaactggtccagttattttttctctcaagctcgttttccctctcctaaagaataggaggctctgtcgtggtgaaaggcgattttagtaatactttcctttttatctgtgattataatgaatgcggcatctctcccattaaggatcattcctccacccacattcttaatacatctgctgcatgcatccttcagagacctccctctgggatcatcccttctcactccaaaaagctcaacttctcccctgtcatttgtacctcccactcagcatttttagaagcaatatttcattcaaacttattcaagtttatttccacctaaagaaatattcctttcaccctggcatctccgtcaggtactgctctgttgtttttctccccttcagacaaactgccaaactggctctagttcctcacattccccatcaccctcagcaagcttctgccccacaccggcactgaaacagctgaatcccaatgtccttgtccttaaacccagcagaaaaaaaaaatcaatcaattatttgatttcacagcggcacttgacatgggtagccaggaatttatcaatgacaacctttacagatcatctttgtaatttatcatgaggcatcaaatgaatgctattaacattaatccctcctattttaagtcattaatccaagtaaatgctcacttatttctagcgtcttagaaaccatttaaattatgttacattatgaatcaatacattataaaattataccatcatttgtaataattttttaaaatgttgtgtgctattaacattgatgccttggtataaagtcatgatcattctggtctagtagcaatcttctattgactattctcttactaaagcggtcccttccgtgggactcagagacctcacactctcctgcctgtgtttcttcctctctaattggcccttcttgctccacttgggtgctcctgcccattgcctagacaagagcattccctgtaactctgtcttgggctctttttctcttttcatcaacatcttctacgtgggtattatcatccatttccatggcatcagcttgcccaataaactgataaatccatagtctctataagtacagcagatctcatcaagctagtggcattcagactgctttaactttaaccaaaaataagggattttgtacatgttcaataagcagttcccactgtgacactgtaatcacattttcacaattgtgacctaggacacttagagtaaaggatacagatgattgagacagaaatagtgacaaagaaaaataaggttaggatatagattttaatgctgtaacagacctcaaaatacaatggcttaactaagagaatgcatttctctgtcacataaaggtcccaactggcgtagacttttgatgactcaagggctcaggctgtgcctggtttgtggttctgccttccttaacacatggcttccatctgatgagctacagcagtacctatcactagtcagcatgtccacattccagcctgggcaaggaagaaaggggaagcgcagaactgtacccttccttttttaagtcatgaactgaaagttgcatgtatcacttccacttgccctccagtcaccagaacttagtcatatgccatacccagcttcaagggagtgggttaaaaacatagaagtcaactaggcagtctgcacccagcaaaggatcgggagttctattattaaagcagaattggagaagtggtaacaggaaacaaccaccagcctctgctgcatgtatatgaaacagatgtttcccaaatcactattctcacttattctgtctgatacactgtattttttattatattctctttcattttttaaaatcctggtcatgactcacagggcatgatgttacaacccacttagatgctaacaccataatctgaaaaatattacctatattatgtctaatattggccacttgaagtatggctagcctaaattgatctatgttgtaagtataaaattcacaccagcttgtgaaaacaaattatgaaaaaaaagtctttaagatatcattaacaattttatattggctaaatgttgaaatgatcatattttggatatattggattaaataaaatacactattaaaattaatttaatgtttctctttatgtggttactagaaaatttaaaatttaaaattacacagggcgatcacattctatttctagtagaccacactgctgtaagctcaagattcaaatgtcaaactcctgtgaatattaatacgtgaatatcccacaagcacttactccatcttcccaaccctcagcccttctgtcctccttctgctcccaccaatctgtgtttcttctgtttcactcacccagctaaaggcaacacaattcactccgtgacgagccaggaaaatggaaagacacattttcctttattcctcacattgatatattcactgagcactataattacctcttaaatatgatataaatctgcaagctcttttcaataccaccacaaattccatagttcaaaatgccatcagctttcacctatattattacaccagctcccatctggtcttcctgcatcctggatcacctctttctagctgccctttcaaatttcaataagagcaagctttccaggaaacaaacctgaagtcaatccactgagtactcctctgaataccttaatattgttgacaaattcctttctgatttgaagtatcagaaaggaatatttcctccataccaaatagttttcatttcatgcatgtgccgtgattcttctccctcctttgcatctgtcattcgttatgcttagaaagctcttttcatctctttgttcttcgagacaaccactactcatacttcagagcttaatttacattttgctttccctcaaaatttttttaaaaggttccaggtctgggttatgtgctctcttatgtgctcccagagcatcctgaacttctgcaataatatgtttggctactgtattttatacagtagttttatattgtattttaactgtattttatacagtaggtgttatattgtattttatacagtagttgtttttctgtctgtttttgccccaacaagaatgtaaaatctttaagtgcctgttttcatacttatttgaccaccctatctctagaatcttgcatgatgtctagccctagtaggatcaaaaaatacttacaaagcaactgaatagctacatgaatagatggatgaataaatgcatgggtggatggatggattaatgaaatcatttatatgacttaaagtttgcagaggagtatcatatttggaaggcagtaaggaagtctgtgtagtcgatggtaaaggcaattgggaagtttgttaggcacaataggtcaaaatttgtttttgaagtcctgttacttcacgtttctttgtttcactttcttaaaacaggaaactcttttctatgatcattcttccagggcctggctcttcatctgcaacccagtaatatccctaatgtcaaaaagctactggtttaattcgtgccattttcaaagaggactactgaattctgatgtggcttcaaacatttaggttaggcatatctaatggagaacttgcagccacactgacttgtagtgaaatatctattttgagcctgcccagtgttgcttaaattgtagttttccttgccagctattcatacaagagatgtgagaagcaccataaaaggcgttgtgaggagttgtgggggagtgagggagagaagaggttgaaaagcttattagctgctgtacggtaaaagtgagctcttacgggaatgggaatgtagttttagccctccagggattctatttagcccgccaggaattaaccttgactataaataggccatcaatgacctttccagagaatgttcagagacctcaactttgtttagagrtcttgtgtgggtggaacttcctgtttgcacacagagcagcataaagcccagttgctttgggaagtgtttgggaccagatggattgtagggagtagggtacaatacagtctgktctcctccagctccttctttctgcaacatggggaagaacaaactccttcatccaagtctggttcttctcctcttggtcctcctgcccacagacgcctcagtctctggaaaaccgtgagttccacacagagagcgtgaagcatgaacctagagtcyttcatttattgcagatttttctttatatcmttcctttttctttcctatgatactgtcatcttcttatctctaagattccttccagattttacaaatctagtttactcattacttgcttacttttaatcattcttccccaactctctgaagctctaatatgcaaagccttcctaaggggtgtcagaaatttttagctttttaaaagaataaattttagatattcacattcatattgatctacttgagaccatgctatttatcttttcttatttcctctttctcaagggtccattttctattttataaaaataaagacaattctctcccacaaccaaacatggaacaatgccctggagtataaaaatctatagagtgccaaataaaggaacaatttgaaatactggtgttgatattgaaaaagcaagggactctaatgtcagaagagaaatccttttgcagatgaggtggtgatgaattctttgtttcaacacaactgaaggaggaactgaaggaaataccagctgatgagtgatgagaagggattcttgataatagagtactaggtgatttttggcatgtaatgcagaagttgcaagaagtggtaacaatgatgcaattgttttacctgccatttatttacttttatgtgagccattcttcttagcacttatagctacacaaaacaaaaatagtaacagaattaatgttgtttaattcttgcaatccatggatgcataaattcactgggggaaaaaacarctcatcattctcattaaagatgtgcttcaaaagtattttaattttatatctaatatgtatgaatcatactttgtatttattttgttttgatcagttatatacaagtatttttgaacatagctcagtcagaaggaaatgtttaatatttataaatttatggttacattctatttaaaagaggagttaaagttaaatttacctacccacatatgttacatatatatgtatttatgtatatgtattcatatatgtatatatgtgaacataagtatacatacgtatatgtatagatgcttgacaataaagaagtaagaataattcacaacattttttgaaatataaaaatttaggataaatttctgtatggtaattggcatggaaattcaaattcaaaaaggaaaaaagaagagaaagatattaaatatcagaccattaaaagaattttttaatgtacttttaaatagtgatagtaggtatcttatactacagtgtttattattcatgagaaaattgtaaaagtaatctaagtattaatttaaaatatcatcaaaaataatatcttttgctattacttaaaatcatgataaaaatatgtttacttgaaaatatgtaaggagtgcacagagtccaaaaattattttaggagttctgtgagcaaaaatgtataaaaactacagggttgatcttaaattacatgtcagggtactgagaaagtttctgtactgcacatgagttaccaaggtctaaagtcaatcaccagaggaccatttttggatggagccattgtctaatcatgagctgaaaggcaaatatttaaaatgcaaacatccatggttaggtaacactcttaagaccttattagctgcttaccacaactgagactgtgaagtaatggctcactttctttgaggctcagattccatatctgtggagtggaagcgagtgcttaccatacaattttcacagggctgctgaatgtgtgtatgtatgtatgtgtgtatatatattttaatgaaaattctataatttgattagtttttgtaatgtccgcatgactgagagcttgcttactttttacagcaacttgaaggtaaaaatagattttacaacatgaacaaatgtaactacatatttttatttgaattcagatgttcacaaattgttccttaaagtgaagcatgcctacaagttttaatctgtttaagacctacctcaagtaaaatgttcactgccatggcatgtgagggaaaagggaaataattcttatgcatggccttcaacrgccaaatttcatgctcatcagtrcatcttctcttggtgtagaactgatgatgataattatgatgatggaaaaaagtgctgttgatagcaatgcstctcttccttcactttcctctaactgaaccgtctcattcccaggcagtatatggttctggtcccctccctgctccacactgagaccactgagaagggctgtgtccttctgagctacctgaatgagacagtgactgtaagtgcttccttggagtctgtcaggggaaacaggagcctcttcactgacctggaggcggagaatgacgtactccactgtgtcgccttcgctgtgagtgtggctgtttgacttaatatacttggttcttttagtcagggtcatagggatctagtattctgtcagatgaggctttgggaggttgstaagaactgcaggaaggaatccaaatgtagcaaactaagtatagaaattaaggagcaatgcatgactmtccagccatgggagacaaatatttacaggcaaactaaaagtcagcttaataatcacatagaaaccctattagccagaaaggaaaaaaaaaaaaagaaaatgtgacttcttaaaattaagatggaaaaaatattaataaagcaaactagaccaaggctcaacatgagccacccgtggtggactgacaggaacacatcactccacactacttctaagagtaaaaattgtagaaattaccctgagcaaaggtgtaatatctcttcagagttgtccacatgtgagatgcttacagcctagtgtcagtaaaatacggggtttttttccatagcctgtaaaacatgcttcgaccatgcccttttagcatgtaatatcagcctggtaaagctcagcgtataattgaatcaagactgtttctgtgagctgtatgaaggtgtgaatctcacttacaacctctcttactgatttattttcctccaccttgtgtcctgtctccccatttgtaaaatggcagaagtgattcctgtccatgccaactttccctgctgagaacaagggagtgaagttaagtaagaagggcaagatctccagggaagagtgcaacagcaaataggggaggagacctgcgggtgctgaatggggtttcaggatcggtcctgtatttcaggtcccaaagtcttcatccaatgaggaggtaatgttcctcactgtccaagtgaaaggaccaacccaagaatttaagaagcggaccacagtgatggttaagaacgaggacagtctggtctttgtccagacagacaaatcaatctacaaaccagggcagacaggtatgaagaagcctacagacaggacamcttcaaaaaggaaagatcttcttcccctggatgttccccaggcaaagttcctataatcttggttccttaatagcttgtcttaccagcctacaggcctactttgggtttgggggctcatgaaaaatatttctgtttcagtgaaatttcgtgttgtctccatggatgaaaactttcaccccctgaatgagttggtgagttttctattatctacataaaatgattgtctgtataaacaggctgggaacctgttttttgtgctgagggaagaccagggagaggaagaatctggtatcattaacagtaacttctggcattacaacagcacaagatcctaatctaaaacatcattccaggtaaagaaagtaggtaattctttctgtcttggtgctggtactcagtcagttgtcacacaattaaatttacttttcggatggttcttaattaggacaattagaaagatacattcaatagcagacacagaaaaatcctcaaagaacctaagctcaaaaaacattttaaagatttagattttttctatacacatctaccaaaatcttcactataaaggaaagtcagggtaattaatttgttcctcaagactaactcttggtatctgtgataagaaacagttctttctattgtaatgcagacatcaacccaaagtcttcatttttctctcccaaattaacttcttcacattttcttatctcaaaaagaggcaactcttctcttctagctccaaagacaaaagattatggcctagttcttgtttctctttctctcatacccacatccacttcactggaaaatcatgttggcttaaaatatattcagactatttcttatcatctgaactactgctgcaagctagtcctagtcaatgtcatctctaaataagatcattacaataaccttcaaagtggtctcccagcttctactttcactcctctgtctaaaatgaggcaccacacccatcactctgtcagcctaacttggctttgtttttctatttgcacttaccaccattctatacgtattgatttttaaaaatctgcctatttctattataacataagctccattaaaacatggtttattgttcttttgtgcgtggttatattctcaatacctagaatgatacacagcgcatgagaaggtacttaataaagattagtttttaaaaatgaataaacattcatagtagcttcttatcaatgtttattcatttttaaaagtaatatttattaaactaaatttattaatgaaatatgtccattcctcctcattcttagaactacrtaagaattctatgacccatcttaatgattacatctgaacatatttacttatagttacataagtgtttatttctcaacctgtaaaattgcatagcaaaggattgawcttcactaggatgctataagcacttaagacatgttaatccatttttagtaaatggcactttacatgtatatttgttgctgaaggcctagtaagttcttaacattatttattaattgcttaaaatagattaatgaaaagttctataaaatttaatctggaatatttctgtatttcactatagagggaattattctatatgaaactaatttagattttttaaactttttattgtttttaatttttgtggaaacatagcaggtatatatatttatgggttacatgagatattttgatacaggcatgcagtgcaygataatgattatggatgataatcattatcattatccatatcattatccaatcatggataatgattattatcatgcattgcatgcctgtatcaataaatggagtacccatcccctcaaacatttattctttgtgttacgaacaaatccaattatacttttagttatttttaaatgtacaattaaattattttttactatactcaccctgttatgctagcaaatactagctgctttgcttataaatgagatttaagaatatttgaaaataattataaacttcttttttcttttgtctttcagattccactagtatacattcaggtaagcaacatgaaacattccatattaaaaggaaagcaatacatatagggaaaatgttcttatttcagaggtttttacaatatctcagaaacttgtcattaaaggagaagccttcaaactcccatagagctagatggctataactcatctcctctactcaccctttactactaccccatttgmcctttttgtagataacttagggtttccatagatatcttttattagctccaatgctccaggtgcttttgtaagttataattaatttactcatataggatcccaaaggaaatcgcatcgcacaatggcagagtttccagttagagggtggcctcaagcaattttcttttcccctctcatcagagcccttccagggctcctacaaggtggtggtacagaagaaatcaggtggaaggacagagcaccctttcaccgtggaggaatttggtatggatcatgaaaagtcatcaagcattatttttcttcatatttaaactcttaggtcctggaatttaagttcatttggagtctttccatttcccatgggtgacattgggcttggagtagaattaattacacctaagtccaatgaggacatcagtgatctgtgaataggacttmacatagcttcgttattttctgtagcaatatttaataccaacccccaaaattaaaacattcttgttttaatggagttttccataattaattaagcacacagtgatctctcatagtccctcaactgaaatcttcatttgagaggaggatagataagaatagattggagagcagagctaccttttcagagccctaaaatattattagggaactgttacagggaacctgaaaataggaattcccccaaagttgaaaaccaatcaccaaccttctttatcaccaatcaacagttcttcccaagtttgaagtacaagtaacagtgccaaagataatcaccatcttggaagaagagatgaatgtatcagtgtgtggcctgtgagttcattttttaaaaatcttttgtgggggattatttaaaagagactcaccatttgggatattttaactactctctccgggagcagtggcaacacaaaaattttaagtgctttgacagcatcctcatctgtagaatgttattctcctgttgcttttctatttttattttctttcacgttcttatcagtattattctatcatgaggtaagaaactgtttctagagaggttatgctaataggattgattctgaaagtgacaaaactgcacacacacacacacacaaaatgggaagggtggatagtgttgaagggtattggttctgccttaaccaaaaataaccaaacgtatattagggagataattaacacatggctataggggaaattcaatcatcaacagatcatttacctgaccttgcatgcttactggaaaaatcacttagattcagaatttgtagagataggcatacaactgaaatctcatctaactcactagtccacctaaggcgggtctacatacctgtctgcactgacatttttacgaagagactgaacgtgatttctcaagacagtctgttccaaccttgaaaagtcttgtttcctggatcttatgttcccatccatggtggcacacagtagcagtagcaggaagagcaggtatagtcctgyccaaagatcacacatgtaatacacctactattcagctaggcccctgctccagttctgtctcacagtgatggccaagttcctggttcctcataactggtgtgatcttgcaaatagacatacagaggacattctcaaataggaaaggagacaaatgcacttggaaacccagcaattgtctatgacatatttacgacacaatcccacttttgtaaaaaagtaaacaggcccggcgtggtggctcacgcctgtaatcccagcactttgggaggctgaggtgggcagatcacgaggtcaggagatcaagaccatcctggctaacatggtgaaaccccgtctctactaaaaaatacaaaaaattagccaggcatggtggccagcgcctgtagtcccagctacttgggaagctgaggcaggagaatggcatgaacccaggaggtggaggttgcagtgagccaagatygcaccactgcactccagcctgggcgacagagcgagactccatctcaaaaataaaataaaataaaataaaataaaataaacaagtgaaactcgatatagagatggctgcacatggggagaggatgatggaagaagagacactatcgtactaatagtttgtattcctaggtagacttgagggcgtttgggttttttttgttctgttttgttttgtttgtttcgtcttgctggtattgtttctcttttaagaacgggtttaagttttataataagaaagacttttttaagataaaactaaaaaaaaacgaggaaaaaaaagaaatgataaaagaagaatgtaaatttcagcatgttgcaatggagatttctataagagccattagtgactcttgtcttcaatattgtgtgagcccagcagagagcagagggaagtacagacagggaatatactgtagctaaaggggagatataaatagctagaaaatggggaggttcrgtgtctgctctgattcctttgggaatgbtctcatgacagatacacatatgggaagcctgtccctggacatgtgactgtgagcatttgcagaaagtatagtgacgcttccgactgccacggtgaagattcacaggctttctgtgagaaattcagtggacaggtaggttgaacactattttttctagagaatagcgataaaggcattgttgaaaagcagtgagttgcagcatttttctgacgcaggaagagaacaatctagaagagaattccatgttggctattgtaatttttcaaaaaaaatcatgaacttagcacaatgggaattatttatttctcgtaattgcccattgtgagtgtttcagaacgatagacrctgagccatctaaagcctccatgggcattcacttctacaaaggaaggaaaaaaccatacacctcttaattgccttagctggccaggccatcagttctgctctctctgtgaacaagaacctatcacatggccccaccaagatgccagagagttgacaaacacagtccccatatagaaggccgcttcccagccacagctgaatattatggaggaggaaccagactttgatgaggagttctaatggtcaagagcagatgtactgtgtatttcaaaatagcaagtggacaggacttgaactatttccaacacatagaaatgatacatacttgagttggtaggcaccctaaatcccgcratgtgatcattacacattctctgcatgtaacaaaatatctcgtgtaccccataaatatgtataaatattatgcatcctttgtacaaaaaaaattactcctcaaattttaagacatttctatcgcaatatatctagggaatttcagataccaaggaatacatctgtcaattatacatgagatattgttgtgaaatttaatatttagttgctagagaatattttattgtgtcctcgtcatagaaaatgcctacatgatgttgtccccccacaaaaatcacaccggttatctgaccactgatctatttagtataatatgcattatatttttgtattttattttctcccttcttagctaaacagccatggctgcttctatcagcaagtaaaaaccaaggtcttccagctgaagaggaaggagtatgaaatgaaacttcacactgaggcccagatccaagaagaaggaacaggtttgtgtacwacatgggtataagagaaaacacaacaggcattgattttcttagccaaataatgaattgtaagttggggggaggtgatagaattttagagacatcattcttcccaaaaataacagatttttttctcttttttcagtggtggaattgactggaaggcagtccagtgaaatcacaagaaccataaccaaactctcatttgtgaaagtggactcacactttcracagggaattcccttctttgggcaggtggagtattytccagttcactcatcaacccatgtactgttacctaattagcacaatagttatggtttgtgctaaaaccatgcctggttaatgttatcatttaatataaccaaaagtataaaatatcaccaaggcttgattagtataaccaaaggtataaaactacataaaaatagatttattcttctgtaaatttgtgtatgaaatgtatgtaattatcctaaggccttattaaaattagtagagttttccccccttcttttgaaacagcattgtacaagtcactcaatctccttctcatggtttaccaggcagtctcaggtttttatgacattttctcacaagaatctcaaaattcatgctgaccagtttcattacgatgctaacactaactttgtatggaaacaggtgggtaggtggttttaatttttattttgaagtattaaagattctacaataatgtttatttcatggatagtatatttacactatttttctataacaagtatatttctaaaacagtgaacatggggtaaaacactgctatttaaggttctcagatttttgaattatgaattttcatgttatctaccaaaaaaatcttctcttacaatttttctgttgtcagcagatgtgcaaatggatctttatgactctagaagtctgagatcacagttacatgtgcctcaatgtgtatttactgtgtatcattttcttaatgtaaatgttacaggatttcagctatgaagggtgtaaaagaggcatagactcaacaaagtggagtacattctagaaggcttggttatgtcatgacaccaaaatgtattcaacttcctaaaatgaaagtgtagctcatttgtaaatttctcagaaagatagtgtactttgtaagtacattttattgctgttaaatatcctatttgtcataagactctctagctagaagaaaatcagaattatgtgcctattcttgtctttgtacatgcagccaacatttcactggcaaacttagattttgtaaatcaattatgagtactgatgggggtcagcctattgttcttcctgctaccaactgtagcttatactgaaaaagaattgccacctttacaatctgaactggactactcaactgccaatacaatattagcagtaaattagatttggcaacttatttaatactgtgtgcctcttttcaattttatatttttcacatgggaagtgtgtcataaaatctgcctaccttccaaaaggctgaagatctaggttgagaagcagagaccatgtctaaggcaactggagaaacacacaggacaatgtattggcaattgtttacttgtgcacttatgagacttcagacactaatctataggaagttaatggtccactccaaaataggtgtttggggcacaaataaatttagttaatagattaatagattaaaatatttcattatcatattactctagtgctctgtgactctctaagagttatatataataatacacagcacttccaaaatatctagaagacatttttcaggtcactcttgttattatccctatcactctctatcccttcacactgctctgtttttcttcttaggattgattactactaaattagtgtatgttatgtatatatttatttagcatctatctctttcactagacagtaagctctgtgatggaagaaacttcgtttttttttcactgctgtgtcctcagtgcctggaaccatgttcaacatagaggaggcactaaaaaatgtgataaatgaatatgtttggtgcctattagttattaccaatataactaatccacagcttttaatcttcaggtgcgcctagtagatgggaaaggcgtccctataccaaataaagtcatattcatcagaggaaatgaagcaaactattactccaatgctaccacggatgagcatggccttgtacagttctctatcaacaccaccaatgttatgggtacctctcttactgttagggtaagtttggaaagaaattaccaatgacatgaagtagccttggaaacaaggttgcaacctaagggtgagaaaatttccaaactgtgtctagttctatggagagaaaaaaactagcaattagaaaccrattgaaggttaacttttttaaagtttatgaaaagaaggcagtatattgtgattaaaagtgcgggttagactttagcagtgttgctgggaacgtaaaatggcggagccactatgaaaaacagtatagtagttcctgaaaaaattaaaaaatagaattaccaaatgatccagtaatcctacttctggacatatattcaaaagaatcgaaaacggggtctcaaagagctatttgcacacccgtgttcatagccgcactattcacaatagctgagagatcgaggctacccaaatgtccatcaagggatgaacaggtaaacaaaatgtggtatataaatacaacagaatattatgcagyctgagaagggaagaaaatcctgtcacatgctacagcatgaatgatccttgaggacgttatggtaagtgaaataagctagtcacaaaaagaccaatactrtatgattcacgtacatggggtttctaaagtagtcaaagtcatagaaacagaaaacaggatggtggttgccaagggctagggaaagagagaaatggggaattcctcttattggtattcaggtttagttttacaagatgaaaagttctggagatctgttgcacaacagatatacttaatactaccaaactgtacactaaagaataatgaagatggtaattttatgttgtgtgtgtgtgtgtgtttataataacttttttgaaaagtgtgaattccagaatctgaatcagataaagtggttaaaaatactggctcaaccctattttaaggaattaactaaaacctctgtgcttcatttccttatctgtaaaatgattgcaatactaacacctgactcttggggtggttgtgaagattaagtgaaatmatacatgttgaatcacttagtaagccccctttaactgttagatacttttactataaaagccaattctaacataattagcatttagttttaaatatatatactccaaaaattattaccttactttattttgtcttgctattctaattttctccagatgacctgttcataccaatataagttattcggtatagcatgcagtcctctattcatcaagagagatgtagacatgtctatagatacatggatatacaatacatatttaatatatattacataatcatggtaatggaaaacgcctgcctctttagagttttaccttgttatagagaaataaataatacattttatttatttagctttaatagatggcataaaagcacctccctctaatttgaatgtttactcatttcaaaaagtgtcttgaatgctttccacgtgccagcactgtgctagtcttgacaatgaaattattatttctacctgttccctgtttggggtgatcatatatrtgttgtcaccaaaatatacattaagatatgaacaaaatgttttgctcaaggattcactagtgctattgggagctggggatgaaggtagaggaagcctgaaaggagctaaggaataacttctacaggaagaaaagttggaaatataacccaaatagggcctctgaggtattagaatccagattgcagggagcattaaaaatagtcagcctaggccaggcacggtagctcacgcctgtaatcccagcactttgggaggctgaggtgggtggattgcgtgaggccaggagwtcgagacgagcctaggcaacgtggtgaaaccctgtctctacaaaatatacaaaaaattagctgggtggggtggcatgcacctgtagtcctagcaactcaggaggctgactgggaggatcacttgagccccagaggcagagattgcactgagccaagattgtgccactgtactccagcatgggcgccagagcaaaaccctgtctcaaaaaaataataataatagcaatcagcctaagatagcccagaagagstagacttcagctaattcatcagctcagctcttaaaccaatgctttctaccaatgtcttctcagacccctaaggttacaatattttatttattcataatacccattcaaaatccaccctaaaagaggcagctgctttctgaaagcacagttcttccatttctagagattatttactctcctcaatgaagtttcatagctccagtgtctctaattgcacaggtaaagcagtcaaagaaatttcaagcaagctaatcagagcaaaggatgcctccttttatgctcttaagaaatataaatctcaatcccaggaggctctgcagtgtaaagtcacaaagcatgcctacatttgaagcagagaaasaaaatcaggggtccttctcccacttttcattgtggawcaaaagatttctagctactagttaaggtaggacagtaaacttacgtagttttgtgagaacattaatctttatgacgtataatctaaaaataatataatttttctaattcattaggtcaattacaaggatcrtagtccctgttayggctaccagtgggtrtcagaagaacacgaagaggcacatcacactgcttatcttgtgttctccccaagcaagagctttgtccaccttragcccatgtctcatgaactaccctgtggccatactcagacagtccaggcacattatattctgaatggaggcaccctgctggggctgaagaagctctccttctattatctggtgagaagggaggttactgcgttgacttcactgtagacaaaagctctctgtggagcaagtaatcatgaagctctttagatgtcattacttcaacttcttatccatgttccttttgaaagtttgatttctcttgaggtgaattattgccrgcagggactcaataaaacaagtatattgaagtgagactgaagcgtgttctctctggcacatttaatttctttttatttccttttttgcagataatggcaaagggaggcattgtccgaactgggactcatggactgcttgtgaagcaggaagacagtgagtatttccatcatctctgcattgctgccccattctgacccattcagccttacaccacggaagtatcagaatactttccctttttttccataggtttttgggggaacaggtggtgtttggtcacatgaatgaataaattctttggtagtgatttccgagattttggtgcacccatcacccgagcagtatacattgtacccaatttgcagtcttttatccctcacccccttccacccttccccctgaatccacaaagtccattgtatcattcttatgcctttgcatcctcataacttagctcccacttcctaatagcttagctgccacttcctaatagcttagctcctacttctgagtgagaagatatgatgtttggttttccattcctgagctgggaatatcaggaatactttcaagtaaygagagaccatttccatctaatattaattaaaagaaagttgagggagggaaaacaataatggtttttttctcaccctttatcaaatatgtgttgtcttttttttcagcctattttctttgcgttatttaaaatattggtgtgggccagctatgatggcttacgcctgtaatcccagtactttgggagaacgggatgggaggatctcttgaggtcaggagtttgagaccagcctggtcaacatagtgagaccccatctctataaaagtaaataaataaataaataaataaataagaacaaagggggaaaaataaaatacataaaatattgttgtgtataatctatgcttattccagatttttaaaccataaatattcttgaacctcttctcaaaatgagaattgtgttagagaatggggtggagaaaatgtacgatttcaaggtatgttgtatataccaggtcttgtgctgagtcatttatgtcatttatattattataaatatcttttttccctttcaagatagttatgatttatgaagcattaaattgggtacttctaccgactgaagcggactcttgccatgagcaaatatgtcataatataaacctttgaaggttgctcctagtctagtagactctaaaagataacttgctagaaaagtatcagtaatctactctctcattagttcttgtagcaacacagaagcaccatagcagactgaaggaaacttaatgcaacctctaaagaatctacataggcatcaaaaaataacttctgaaggagcatggtgttcctcttatggagaaagaaccaaatattggctcatagaaggttaaagagcatgtagcatgaatacaatgtgttgaactcttactcttacatctcataacttcaggttctatttccctcttctagtatgaggcctagatcaaatggtagtgaattggatgtcttcatacccttaactagcatcagaacattaggtgggtgagctgaagcttaaagctggtgaaaaatcaacagagtatatgatttatgagaggagagagggctttgatagggtttttttctaaagctagagtccttagaggtaatcatccatttgttacatctactgtttattatgtctgttacatctactaatggaaatagtcattaacctatgatggcttcctctcattctctttgtgccccagtgaagggccatttttccatctcaatccctgtgaagtcagacattgctcctgtcgctcggttgctcatctatgctgttttacctaccggggacgtgattggggattctgcaaaatatgatgttgaaaattgtctggccaacaaggtgtgtgttttagatcataaaatcttcaacatgtaaaactagaagttactattgttatcatttgttttacacatgtgaacattagggccaaaagggttaaacaaattccccagagwcattcagcaaggtagtggcagagtcacactaagaagcagaatcacttgattccttatacaaaactctcaaacttctcctagcagtgcctcttaccaattacacagttcagagtatgttattcccttcttctatgatgaaacgttgggaaatatgtaagcaagtttttaagactactaaggagccaaaagaaaaatgcaagagcacctagacccatgcatgtcccaccacaattaatragcaccttgccgtgtatcaaagataaaaatggcatttcatgactagtaatttataagaataattagaaataattctactggctcaagtgattcttgagaatgaaagagaagtgtagggaacaaaaagcttcaggattgacacaatgccaaccctccacgaagtcaagcagagtggttatacattgtacatgaggaacactctgcaaatgcgagygaatgcatgggtaaacctggaaatttgcttttctgaccttttgttccaatttcacaggtggatttgagcttcagcccatcacaaagtctcccagcctcacacgcccacctgcgagtcacagcggctcctcagtccgtctgcgccctccgtgctgtggaccaaagcgtgctgctcatgaagcctgatgctgagctctcggcgtcctcggtgagttcctggcagcctcaggaatcaagaagggccgtgccaggggctcagagcaaggaaaaatgactggataagtaggataagatcaattaaaattatatttatctaggaattaattgctttgagctctcttgtgggctttcattggtaaggaattwtatatatatatatatataactactcacttctgcagttaaaaaaataaacaaaatacaatatattgaatcaaataaaagaatttttaaaaggacaaaatgtgatgaaaattaacaaccaaaaaaggactcgttattcagacacgttaagcttcttgctcaagagcacatagcaatacaaattcaaatcttctgattgtgtcaggacatccgtatatgcaaggctggagagaatacagagcagattgtgaaaagtgctatatgagaagtgcagttatgcaaaataaaagaaaggattaactgagcaaccggggaagccgttcgaaaattatatatttaaaatgtaaaaagaccatacagtacccaaagtccttaaaatcccagagctccatgcaaccagtaataggagttgtcaaactagtttcaacatttcaaaaagcctaacaraagtgatacatatacctgcactgaggctatacaggctaaatgaaatatcagatttccgtttttataagaattatggctgggcctggtggctcacgcctgtaatcccaacactgggaggccaaggcaggcagatmacttgagrtcaggagtttgagaccagtctggccaatataatgaaaccccgtatctactaaaaatacaaaaattagtcagacgtggtggcgggcgcctgtcatcccagctactcaggaggctgaggcaggagaatcacttgaacccaggaggcagaggttgagtgagccgagatcgtgccactgcactccagcctgggcaatagagcaagacttggtgtcaaaaaaaaaaaaaaaaaaagaattacatcagttgaaataattgctgtcccaagctacacataatttctgagggaacatatgtattatctctgaggaacaaaacttagggaaattgaactactatataattgacattgataactgaactctttgaaaatatggagctaatagaagaaataccaaaaggatatgctgaattggaacaacaaaaactagttaatagcatgtactaatagtagtttgctcacatcttcaaatttttaatatgagaccaattgtaataacctcttactgaagctttttctactaccataatttaacaaagagaaatttatatttttattttcctgaaatagaaacttataaaaaaatrtttcttacttgtttgtccttctaatgggattttaactgaaaatattagaatacttctaaaggaagcatcaagtacatttcaacagtaggatctcaagaggatatgtgggaaaataatatacrtgttttatacttttataatataattttataattctcaaagaatttttcaaattataacaaccctgatgggtagataaggcagacagtcctatttattaataataaagcagaagctttcagggatttagtagtagacctgagttaaaacaccaactcttctcaagctttgattagtgtcttaccaatgaaacactttgctgctactagtgtaggtcattcattcaacacatttatttaatgcccactgtgttctaggtattatactaagtgctagtagagatcaagcagtgagctactggaaagataaaaatgtatgtctcatggaacttacattgtctgtcccatagatgagacagacaataattatgcaatatgccacaataaaagcagggagaggaaatgagaaatgttaagatactttgagaaagtgtctaatttcatcacaccactcactttgctcatctgttcttgtcaatcagttttaaactcctacgaatataatgcaatgtaactatcacaatttttatgtctgtcttacttctcaccttcaaatggacttgaaagcatcatgcctagaattttacggttaaagttgtatgtattatatgaagatctggagcattttgtttccactaataatacctaagaaaatgccatcgtgtcctgtggagagaggatattcctattcgtgtgcctgtttagaacatgcacccattaactttgctatatactgagtcagttgctcaccacaagataagcacaaaactatcatttccttctatcatctcaaagctttgtgcaatgtcacaaatacagcagacctcgatttttcaattaataaagttttatttcattccagtgttgagtctagtggtggcctctgaactgtgtaacgaagtagtacttagtacttagatgagtacttagatggagtgtttggtttttcctaaaattgttaaacatcttcaaaatgaaaacactgtgtcaagaaaatgatccataccctctataaatcatcaaagcaatgagagcgctcaaagaaagacggatgttcattattcctgttcttttctccttgaacttaaaaaatgtcacaaaggccgggcgcggtggctcacgcctgtaatcccagcactttgggaggccgaggcgggtggatcatgaggtcaggagatcgagaccatcctggctaacaaggtgaaaccccgtctctactaaaaatacaaaaaattagccgggcgcggtggcgggcgcctgtagtcccagctactcgggaggctgaggcaggagaatggcgtgaacccgggaagcggagcttgcagtgagccgagattgcgccactgcagtccgcggtccrgcctgggcgacagagcgagactccgtctcaaaaaaaaaaaaaaaaaaaaaaaaaaaagtcacaaataagtttgcctttttgtctttcgtatttgtacaggtttacaacctgctaccagaaaaggacctcactggcttccctgggcctttgaatgaccaggacratgaagactgcatcaatcgtcataatgtctatattaatggaatcacatatactccagtatcaagtacaaatgaaaaggatatgtacagcttcctagaggtaaactccttatgttgcagatggtctgatcttaagcttcttaaaatattacacatggaaaagagtctgtatttgaatgccttcatgtcctagttgagggtaatgggatataaagaggtaagtggcttctctactaatagcagcagatctgcgaaaagctgctgaactaagctggaactttttggagtattattcaagttttcttttttcacaggaattaattgctctgtgatgtttattaaaatcacatatacaaaataattactgttgaaagagtttaatgaaaagaataaaattacatccttaagtatataaatatcccttctacagatgtgaatgttaaaagtttaatttaagttaactggattgcttgtcaaattcaataaaaagaagtagctacctatgtatattttataatatatatttactgattagatgataattttctttgcaggacatgggcttaaaggcattcaccaactcaaagattcgtaaacccaaaatgtgtccacagcttcaacagtatgaaatgcatggacctgaaggtctacrtgtaggtttttatggtaaacaaaaaattaataaatatatattgcctaatatattcaccaaattttaaattttttaaaagatacaatgtgacaaaaattaacaaacaaaaaggacatgtgagtcatacatattaaggttattgctcaaggtcatatagtaatataaactcaaattctagtaaatggaggtacatgtgttaggctgaaaggaaagagaaagtttccaagcgtaggattagtgtaaacagaaatagaaatgttcacacaacaacactacattctccatcagtcaggtaaaaaagctgttcaacttccccaaaacatcagccaatatttatgttggaaccacacacattcatcaatgacatgagctacttctttgatgaactgaatagtaatcaagcatttatttatagtcccatattgtcaaatcatgattgaggataagttgagtacagagaaaagagggtcaaaaatcaaggaaagcatttaaggagaatcagttggctctatggaattcactatgaagcctaccgcatattttattatttataaattatattgtataatcctttatcagtaagatatatagtaaatttatgcatgtataggtatatatatatatatatatatatatatatatatgcacaatttttttttccagagagctggttgtgaaatattgaccagcacacccttaatagaaggtgaatagagtgaaggaaactaactgtaatcttctgacacgatagagaataaaaagtctttattattattaaacttttccctcctgtaaactgtttctcaaagccactgtcataacatgtgtgtcagtttttccttgctcctgcagaggagcacaccaatggaaacttggattcctgcccctcttcacggccttgtgtcataacactctccacttagcacagcggcagcagccacataggactccacagagtccttgtgccccacagacaatccaagcctctgtctgccaaagtctctatagcctctgcttatgaccctcctcccccagctcactcctagcttattcttgtttttttttgttgtttgtttgtttgtttgtttgtttgagacgaagtctcactctgtcgctcaggtcgcccaggctggagtgcagtggcgccgtctcggcctcggcctctcaaagtgctgggattacaggcatgagccaccgcgcccggcctctcctggcttgttaagtcawccaacatatttcctcctcaaagaagctttccttgatgacccaagcgccctctcctccttcctctctatttcatcagacgatttgttttttgttttttttttttggtggcaactattacattctctcataagctttatctgtatgtttattgtaatgtcttcttcctcactcaccatagagtcagatgtaatgggaagaggccatgcacgcctggtgcatgttgaagagcctcacacggagaccgtacgaaagtacttccctgagacatggatctgggatttggtggtggtaaagtaagtaacttcctgcatatgcaatatgcaacaatagaggtccctgactattttcaactctttgctagtttttctgtttttattgttttatatgtttatgatgtacaacatgatgttttgatatatatatatacacatacacatagtgaaatgattactacagtcaagcaaattaacacatccattagctcacattgttacctatttttgtgtgcatagcaagcacacctaaaatctatcctcttagccaagtttcagtatccaatacagtattatcaactrcagtcctcatgctgtactttagatttctaaatttattcatcctacgtaacttcaactttgtaccctttgacctgcttcttcccatccctgcaaccccaaccacctttctactctctgttcctatgtattcaacttcttttagcatccacatacaagtaagatcacgcagtacttgtcctgtgtctggcttatttcacttagcataatctcccccaggttcatccatgttgtcacaagtggcaggatcttcttccacttaaggctgaataatattccattacgcatagccacaatttatttatccattcacccagacacttaggttgtttttatatcttggcaactgtgaataatgctgtaatgaacaccaaaacacatatatctctacaaggtgcttatttcatttcctttgggagtatacccagaagagggatttctgggacatatggtagtttccattttaaaatttttgaggtatctccatactgttttccataatggctgtggcaatgtacatttgcaccaaggggagtgaacaaattccttccagagagacactggaaacagagttttatccstgaaacaagccagtggggcaggtggagagaaagagccggaatggccatatactccctttcaggctcctggagtcttgtttacttctccctttcactcccagatgcaggctgtttagaagcccaacccttaggagacagccagaaatgggagattttgcctgttctctctgtattgagccaaggggtggtgggggcrggtagccactggcattgctcaaaggcctatttaaaaccacctctgtgttcactgtggtctagggagactcctgattgcagagctccatctactcctggagctaggtgatttaggagccagacccttaggtacgagctgtaaacattggggtgcttgatgcatagacaaattattcccaggggtatgttcagacctggttttatccgtggggcgagccaggggaaggaggcatgggaagtgcccttactgcttttcagccttcctgtaagtctgtcgtttccctgctccttctgcttcccagtgcaggctagttagaagcccaacactcagtcagcaactgataaagtgggtagacgaagccsttccagggagaaactgggagctgttagctaatttttcagtactgaagtacttctttcaaacgcattgctaatttcaggagatgtttaacataaatacatcagctaagaagtcttactaatctaattgcatcagagctaaaaaattttgtgcaaatttaattctaagatttccagaaaatgggcataaggacctaatacaaccaaggactgcacagattgcctgtaagagatccctcactggttagcaatcctgagttaaatacagattcagtcaggcccactatacacaatagtagtagaatttaaaattataaagcagccctcagtgaaatagcattttagagaagagaacttaagaacaatctcaaactgcatrttaaatttataactatattgtctgtaaaagattatgctacaattctgatatactacaattaaaaacagttggaagaaaaggacttatattcccatctcaatccttgattatactctccattattggtatttctattgagtgtttttaagtcatggcagtagaatmattcctagggattctctccctagaaaggatgtatttaactgcttacttwctgttcttcacttacactcctctccagctcagcaggtgtggctgaggtaggagtaacagtccctgacaccatcaccgagtggaaggcaggggccttctgcctgtctgaagatgctggacttggtatctcttccactgcctctctccgagccttccagcccttctttgtggagctcacaatgccttactctgtgattcgtggagaggccttcacactcaaggccacggtccwaaactaccttcccaaatgcatccgggtaaggatctctttcctaaattaaatacaaggtagccatcaagtaaattaaaagttgcattcctaggaatactgcaaactcttgtatgcaaaatatgcttactagatattcatgattgtaaaagttacaggttttgagatctccaaataccaaattgcaccataaagcaagtttctagcccttataacccttcaaagttagtatttgtgtggtatgaagaattctgacaggggtgacaaaagtcagtactctattctcatgacagattctacaaggtttcaacctctacgatctcatatatttaacttttcgtagctcattcattatattaaacctaattttaaaagtcgtttgtgagcatcttacctttgctgaaaccataactgtttataagtcttgtatcctctgccgggagatccgggggaatggtcaaagttccagaccaaagaggtagagcagcatgccatcattacctttcccttcctctggtcccatcatgtgaaagagcaggttgcttccaaaataactcagatttacctgtgtaaatctgatacattaagatccacttaaatatatttcaggtacttgatcttcatttatatcatctttaatgtgaggcaacctgaaatctaaccaattcctcaagatgctttacttcaaacccattctccctctsttctccttccctctctactccctttcttatgtgtggtttcaggtcagtgtgcagctggaagcctctccygccttcctagctgtcccagtggagaaggaacaagygcctcactgcatctgtgcaaacgggcggcaaactgtgtcctgggcagtaaccccaaagtcattaggtgagcaaaaaactgctagagataattstctactcaaagattgtatatggcagtgggaaccttataktgagtgctacttccttcaggaaaagaccactagatgctgcgatttttttcctttgccttttattctaagatgcctacaaggatatcctcaacatctccaccttgaattctcagtatcattcacctctcatttgcatgtttccgttcctgcttctgtgttttaataaaacaaaagtttacagagcattgaacatttctaaatcttgagtttggaggcatggaggaaggggaagatgctattcatttctactggcctttttttwcaggaaatgtgaatttcactgtgagcgcagaggcactagagtctcaagagctgtgtgggactgaggtgccttcagttcctgaacacggaaggaaagacacagtcatcaagcctctgttggttgaagtaagtaaacctaaataatatatagtccacaataatatataatatatgtgggtaatataataatatatggatattttataatattattctcatgtatctctctgtcctatctctctcttgatttactttctgttttgttgggggtttttgtttttgtttttgaggcagagtcttgctctgtcatccaggctggagtgcagtggcaggatctctgctcactgcaacctccgcctcctgggttcaagcaattctcgtgcctcagcctcctgagtagctgggattacaggtgtgcaccaccacgcccagctagtttttgtatttttagtagagacaggatttcaccacgttggccaggctggtctcgaactcctggcctcaagtgatctgcccacctcagcttcccaaagtgctgggattataggtgtgagccaccatgcacagcctccctttgatttactttcttaatttttccttcatttgttcatgcatcgaactacctcctacgtatattgcttatatgtacagaattttcttagataatacagttcaaatccttctcttcactatccaaatatctgtggtccctccattaaaacacatgttctgaaggtcagtccattctcactagcttttctttcttttacctaaagcctgaaggactagagaaggaaacaacattcaactccctactttgtccatcaggtaagagtcaaccatcataatttaaaaaacattaaagtctaacatttaaagttcaaagaacatttatatattattcctacactttctctgtgatctaagacctgaagcaccatcaatgcatttgacaaatgtggaaaatagttcttaggaaggccaagtaatttgatcagaatatccctaggcctgcattctgagtcttgatcttttgcagcacctgtgcaaacaccaaatgactttctgaccagtgtatggtatgggcataggtagaaagtgggtagaatcaaaattaatattaccaaaagggatgtttccttaaataattaataatgcaaactatggacggctgaatttagggcattctaacactgagttttacatagccaacagtatttgataacgggattgctatttcccaaaggaaaagttgtcatggcctttaccattattgtcatattaatatctgtttgatgcctatcccgtacctaatgccctatcaaacatttgagaaggaactgaagaaacttacaggaaaaatttaatacactaagaaatttatcagcacaatgcattctcaccccaaaccaacattgaatcaacatcatacataggttcattgcctttctctgactacctacaaatttagtatgtttttcgtactaaatactttatctattcatctgttgccaagatgtaacacataaaatgtaccctaaaaacataacttccttgtcatttagccttatttctacatttaagtgaactgattacctaycattcaatccttttatcatgacttctccgtttctgagttactcattttgatgtatctcttaagtgtaagggctaatcatcaaatagttttactaaatttcattttaattaccaacataatcaaatgtgcctacctaattttacaaaaatatattcttctttaaaaaaaaaaacagaacatcacattaaaggttaatgtcacccccctgaacatttttcagtactttgccatccatttatctttagaaataatgtgtgtagatgtatatgtttgtggwtgtgtgatttacatataataaactgtataagtttcattctataaatcactgtttgtttttcamtcagcatcctgtcttggagatttacctatgttaaattgtagatctaggtctttccttggaattgcttttaagcctataatataaatacatcacaattctgcttagtgttttagtcttcctatattggttttttcaactattcactagctttaaaaaattagttagttaattataataagagcctcttaatgaacatatgcaagtacagctagggtagatccaaaatgttaaattcctgagtcagagagcatatgcatagatatgcatagttttgtttggttggttgttgttgttgttctttaattacattgtaaactgaccatttataattgtatatatatacagcatacaaagtgatgttatgatttatgaataaaatgtgaaataattaaatcaagctaacctgaaatacttatgttttgtggtgggaacatttgaaattctctaascaagtttgaaacataaaatacactattattaactatattcaccatgctgtgcaatagatcccaaaaagaaaaaaatgtattccttctgtctgagactttgtgtcccttgaacaccaccttccttttactccagcttcatcctccataaccaccattctactctctgctcctgtgaatttgaatgttttagcttccacatacaaatgagaacatgcaatatttgttttcctatacctggcttatttcacataacataatctcctccagatttaatcatgctgccataaatagcagaatgttcttgttttttaaaatggaayggaattctatgtgtatataccaaattttctttatctgttcatctgttgatgacacttatgattccataactagacagacatcagtaatttgttagggattacattcaatatgtagattgctttgggtagtgtggacattttaacagtattaattcttccaatccatgaacattgtatttttttcatttatttgtgttctctttgatttctttcatcagtgttttataattttcactgtacatttcacctccttgattagatttatttctacatattgtttatagctattgtaaatgggattgtttttatttctttctcaatcattcattgttagtgaacagaaaatactactgatttttatgtgttaattttgtatcttgcaactttattgcattcatttataagttcttgcagccctttggtgaagtcttttgagcttccaatatataagataatgtcatcaccaacagtgaaaattttacttcttccttgtcaatttggatatttttcatttctttttcatgtttgattgctcttgctgctacttccagtgctactttgaaaataaatggtggcagtgggtatccttgtcttgttccagatcttaaaggaaagtctttcaattttccactgttaaatatgtaagctataggtttatcatacatgccctttattgtgttgagraacattgcttgtatatctaatttggtgagagttttatcataaaagagcattgaattctgtcaaatactttttctccatctaacaagatgatggtatggtttttacccttcattctgtaaatgtaatgtatcacatttattgatatgcatatgttgaacaatttttgcatctcagggataaatcccacttgactaggtagatgatccttttamtgtattgttggatttagtctgctagtttatttcgtgtggttggttggttggtttagttttttaagtgatgagcttttgctgtgttccccaggctggacttgaactcctgagttcaagcartcctaccacctcagccacccacaggtgtatgccaccatgcttagctgctatgctagtattttattgaggatttttgcatctatattcatcaagaatattggtctgtaattcttttttgtaatgtctttttatgacattggtatcagggtaatgcttgcctcataaaatgagcttgaaagtattccttcctcttccagcttttggcagagtttgagaaggattggtattcattctttttaaatgataagtagaacctagcagtgaagccaacagttattaggcttttctttaatggaaaactttttattactgattcaatctcyttactcattatttgtcagttcagattttctatttcttcatgattcagtcttggtagtatgtatatgtctaggaatgcattcatttcttctagatcatccaatttattggtgtatacttatgcataatagtctcttatgatcctttgtatttctgtggtatcagccataatttctctttcatttctgattttatatatttaaggcctccctcttttttcttagctaacctagctaaaagtttttgtctgtctttttaaaaaaacaattyrgtttcattgatcttttgtattctttttctagtctctatttgatttatttctgctctaatctttattattttcctttcttctgccaattttgagcttastttgttcttcttttcctacttctctgaggaatatcattagtatctttattggaaatttttcttcttttttggtgtttattgttataagctttcctcttagaattgcttttactttatgctatgttttgttatgctccatttccatgttcatttgtcttaagatatttttgaatttccttttaaatttctttattgacccattggctgttcaggagcatgtcatttaattttcatatatttgtgaattttttctaattcctcctgttactcatttctagttttcatagtattgtggtcagaaaagatacttgatacgatgaaacgatttcagtcttcttaaatttgctaagacttgttttgtgggctaaaatatgatctatcttggagaatgtttcttgtgtgcttgagatgaaatgttctgtatgtatccattaggtctatttgatctaaagtgttggtcaagttcaacgttttcttattaattttctttctggataatctatccatttttaaaagtgagatgttgaaattccctgatattactgcattgcaacatatctctcccttcaacctttaatatttgttttatatatttaggtgctccaatgttggatatgtatagatttacaattgttatatccttttgatgaattgacccttttatcattatataatgttctcctttgtctctttgtacagtttttgactttaagtctgttttgttgaatataagtatagctacccctgctctcttttagtccccatttacctagaacatctttttccttctcttcactttcagtctatgtgtgtccttaaaaattaggtgagtctcttgtaattagcatatgtttcggtcctgtttttttaaatccattcagtcactttatgtcttttaaatggggaatttagtccatttgcattcaaggtaattattaatttaaaaatgacttggtactaccattttgttgttttctggttgttttgcttctttgttcctcttttgctgtcttcctttgtggtctgatgttctgtagtggtatgatttgaatcttttaaaatttttgttctgtgcttctattaaagatttttgccttgctgttactatgrggtttacagtcaatttcaagctgataacaacttaactttgcattctttcactcccccacacacattttatgtcgttgatgtcagaatttacatattttgtaatgtgtatttattgacaatttatttttagctatgcttgttattaatattttgtcttttaacccttgtactagagataaaattgctttaaataccatcattacagtcatagagtattttgaatatggctctatattacttataccattaaattttgtgcttttgtgtttttgtattattaattaggggccttttgtttcagcttaaagaactcccttcagtaattcctgaaggcaggcctaatgttgacgactcccttagcttttagtttgtctgggaatgttttatttctccctcatttctgaaagacagctttgctggatgaagaattcttgattccatgttgtttttatttttgttttccttcagtactttgaatatattattccactctccctcagcctgccgggttmctgctaaaaatccatggatagttgtattggaattcctttgtatgtgatatgtttctttatcaccttctgcttttcagaatttttttttgtctttgatttttgatagtttaattattgtgtcttagtgagcagttctttcatttgaatttcactggagacctctgtgcctcctgtacttggatgctagcatctatcccctaattagggaagttttcagcccttactgcttttttttttttctgattctatactcttttttttcattattgctttaaatgtgctttatagtctctttcttcttcttctggactttctttaatgcaaaggtttgatttcatgatgatgtcccataatttccataggctttcttcattcttttgtctttctgctcttctgcctggataattccaaatactctatctttgagctcactgattcttctgcttgatcaagtctgctgttgagcttactttgaatttttaattttagtcattgtattctttatttccaggatttctatttggtttctttttgattgtttctatttattttttattttacaatattagctaagttgcagataattgtttctatttcttttttttttatactttaagttctagggtacatgtgcacaatgtgcaggtttattacatatgtatacatgtgccatgttggtgtgctgcacccattaactcgtcatttacattagctatatctcctaatgctatccctcccccatcccctcaccccacaacaggccccggtgtgtgatgttccccttcctgtgtccaagtgttctcattgttcaattcccacctatgagtgagaacatgcggtgtttgtttttctgtccttgcaatagtttgctgagaatgatggtttccagcttcatccatgtcccaggaaacaacaggtgctggagaggatgtggagaaataggaacacttttacactgttggtgggactataaactagttcaaccactgtggaagtcaatgtggcgattcctcagggatctagaactagaaatacatttgacccagccatcccattactgggtatatacccaaaggattataaatcatgctgctataaagacacatgcacacatatgtttattgtggcactattcacaatcgtttctatgtcaaacttctcagtttgttggtgtattgttttgcaaatttcatttaattttgtatttatatattcttgtagtccactgaatttcttcaagaggattattctgaattctttgtcagtgatttcatagatctttatttctatgaggtcaattttttgagcttggccagtttcttttggaggtgtcatcattccttgattcttcataatcctgtgtccttgcattgtttgtgcatttgaggagaaagccacttcttctggtttttataggtattctttggcagggataaaggtttgctatttagtctagcctataattctggaaagatcagttggtgacaaccttgagcaggcagagttttcatgggttccctagttggctgggccactgcctttgcycttatgtttggtagggccactggttgggccttgctctctggcaagatcactgttttgtctctgctatctggtggagctgctggctgggtactacaatggcctctggtcaggccagtcacaagatgtgttgcctggctggatgattctgctatttgggacctgaagttaggcagggtcacaatccgggctgtgaggttaggtagagttgttgcttgggatgggcagaaataaatactatacttcttagatgtgcataatagaggattgctaccccacccttgtgaatggagccatggagtgaggttttggctgagttgagctaccctttagactcccaggtcaagcatatttaacccctacacttctatgaaatacacagaggtggtgtctgctacctgggtggggtcactggcataacctctgaagctgggcttacagactggccatctggaaactcaagctaggttgaacttcccaacatgcttctgaaagtgaccagctcagttttgcagatgggctatgcagttggctggtatctctgaatgggtgccatagctggcagaaacacagaagcactaccaaaatccacatgctggtcactgtgagctctgtccttctttgtttctacctgacctcattacttcctgtgttcccggtgaaatgagaccagagtgggcttcctgagaagtgtctttgaatacttgagaatcttgatgtctacccctggttctcttccccgctgtagaaactgtgaccccagggaactcctctctatctggcattgtgctaacctaaaggagtgggaacaatgacatggtcaaagtgagaccattcttcctactcttctaatttgtcttcactcagttctatgaacaatgtaggtgtcctagacttgtttccaagtattggggttttcaaaatagattttctgatctgtggatagcagctagttggactttctgtggagggaggaagatcctgagactttctagtccatcatcttgctttattctgaattttaattgaactacaaaacgaaaatcctcctctttattacctaaatgcatttatacttccaccaggatacatttccatagtgttatatttgccatcatctgttaccatcaaagtttttaattttaatttttgccaaaaatttagaaaaaaaaattttgctgttgttttaatttatattttcttaattacaaggatgaccttatttttgcatgtttattaattgcctttataatctttggctatttgtcttttgagtagtttttttctgactcagttgtatgacactaattctttatctgttgaatatgttgcagatattttctttcacttggtcatttttttaactttgtttatggcatctgtttttttacaaaagttttaacattaattttatgagaaagggaagataactgctacatttttcatttgtatataattcaccaatactaaaattgtagtaaatgtatgttcatcartagcagttattttattttcagtgagtcaagcattttattttgcttagccatttgtcctttaactatgcttatggcttttttttaagaaacattttaatatgaattttatgaggaagggattcagtatgaaaataaatacyatacttctctcattttcatttcatataatttaccaagattaaaatggaagtaaatgtatgttcatgagtagtaattattttattttcaatgcatcaaatactgttcgtcttcacttccttaccctcaattttctaggttttccataaaaatactatctttgtatatgaaatttgaagaaagaacatagcattattatagaattcaggaccttttgtgggtaattttacttatgtatacttatagggctttgttgttggtgttttctccatacaactgttgagtaaggaagttggtggtgggaactaaatagatcatcttgtgataaccgtcttgtgtcagccatcagwwgacagcaactgaatcacaacatcaccaggctcttacaatttgttgtcttatttggcatgcgattctacataaattactgaaaagatcattgaagaagaaattctgaaaatcacaggaaaccagtagcccatttttaagatatttatatattactgttgtattaaaggcggacaacttttcaggaggagtttaggtataaggcatagtcctagcttctgggtcatagagctgtttagaaasatataatgcagaaataattttcatatgtctgatttgcttatttctctaggtggtgaggtttctgaagaattatccctgaaactgccaccaaatgtggtagaagaatctgcccgagcttctgtctcagttttgggtgagtctccagcccctagtggatccgggcattaacagcttctattatactatttttatttcccataaatatttactaaaaataatactataattttaacttctttcttctcttcttctttgggcttgtttattgctttcaatcatacttctatccctggaagaatcatccttcctaaaaattctcaatttctaagctcaactaattatttctgcttaatgactttgatagatgataatctccaagctttatgacttcccatctctcccattctctaggagacatattaggctctgccatgcaaaacacacaaaatcttctccagatgccctatggctrtggagagcagaatatggtcctctttgctcctaacatctatgtactggattatctaaatgaaacacagcagcttactccagagrtcaagtccaaggccattggctatctcaacactggtgagtgattacttgagtaagggaaaacttgaatgttatttcaactggatttcccagtaggtttcagttacttatgaatattatgatacattagcttagctcactatgatagctgctatgatagttaatttcaaggaaactatccactctccaacctccaataaaatatttaaggctcagaaactcctaatctatgacaacaaaatttaagaaatgtcacaagagaagccaaggtacttttagtaatttctccaccctcagcatgcacattaatccattgtgctgtttcgttaatcttcctttccaggttaccagagacagttgaactacaaacactatgatggctcctacagcacctttggggagcgatatggcaggaaccagggcaacacctggtaaggaaagaacaattttttgagcttctttttgtgtgccagctcttttacatgtattacctcaattatattcacagcaacactatcagatatgtattatcagaccgatggtttgttatactagataaatccaccaagattagcaaggtaatcagaagaaaacctgatatccaaatacatgttatgttaggcttgtttccaraatggatcctattaataatgtaccaaggttttctttctgaaatggctattctttctaaagtagctaccataaccatgagttttaaaatgatattgccagtgaacatatataacttccagataaaccatgttaacttcagcttatattgtcacattctaagtcattcagcttgacttggaatgaattcattaataagaggaaacaattgagaaggaaacagtaatataaaacatttttttaaatccctaaagtaaagcaatattaaaatttactgcatgtaagagctgcatgtgagaagattctgtcatctgcagaaggaaatctctaaagataagagagatttaaagccttactcaagtaactaacaaaaataagtacattcaaattacttgaatgtaaatttgttcaaccattgtggaagacagtatggcgattcttcaaggatctagaaccagaaataccatttgacctagtaatcccattactgggtatatacccaaaggaatataaatcattctactataatgacacatgcacatgtatgtttatygcggcactatttacaataacaaagtcatggaactaacccaaatgctcatcaatgacagactggataaagaaaatgtggtacatatacatcatggaatactatgcagcaataaaaagaaatgaaatcatgtcctttgcagggacatggatgaagctggaagccatcagcctcagcaaactaacacaggaacagaaaaccaaacaccacatttctcactcataagtgggagttaagcaatgagaacacacggacacagggacaggaacaacacacaccagggcctgttgggaggtgtggggtgacgggagggaactaagcggatgggtcaataggtgcaagaaaccaccatggcacaygtatacttatgtaacaaacctgcacrttctgcacatgtatctcggaactaaaataaaattaaatatactwagactccctgtggcaaagagagagttagcaaggaaatactacatctagcagattaatcaggcagactaaagattaatcaaggagataagmtctctaagtacacaagaattttgttagctaactcacatcatatgaagcctgttgctgtgaagtggttataaaaccattttgacaacataaacatcatgattgcttcctccctggtcaggctcacagcctttgttctgaagacttttgcccaagctcgagcctacatcttcatcgatgaagcacacattacccaagccctcatatggctctcccagaggcagaaggacaatggctgtttcaggagctctgggtcactgctcaacaatgccataaaggtgaatcattctggagctagttttgatttgtccattatgatatctgcaaggatgaggataggaagtgataatgtgaaaaattctaagggaaagcctcagaggaaaataaaacctggatggcaccaaaaaagaggggatagaacaaaagttgattgtgatactttgycctatagggatggatatgggtaaggatgaattccatgacacagcagaatagaaagaactaatcaatagcattctcagaagttgaattattcaratctctctctygtattcacagggaggagtagaagatgaagtgaccctctccgcctatatcaccatcgcccttctggagattcctctcacagtcactgtaggtaccaccccattcctctgctgaaggagagttctggatgcaatgaaactgctgacctgctgtctgaaatactatcctattaaaagcaaagcatcagctttctttctatgcaatgccagtgcttcccagatctacagagaatttggtcagcccattaagaaaggtttaaattttcccagtaattcccctaggctatttaccaccaccactcaaaaaagaatcttaaagatgtatcttttgaatgtgagaataacagataaaaataatattatatctattgataagaatgaggaatcgttggaaaaatgcrtttgaaaaacttctgtgctgtgatccgtgtatttgcctgggaatgctaatatgcctgtttacatagcttagttcccttcttgttctgccttcacagcaccctgttgtccgcaatgccctgttttgcctggagtcagcctggaagacagcacaagaaggggaccatggcagccatgtatataccaaagcactgctggcctatgcttttgccctggcaggtaaccaggacargaggaaggaagtactcaagtcacttaatgaggaagctgtgaagaaaggtgagagcacacctgagatccttctcctggcccatcctctgtatcaagaactgcatggcaaaaatccctcactcctacctcctgtgatccctgtctcctctcttcttttctatatatcatatatattttgtccatattgcatcttataaaatctaggatttcttaatcaaatcagaaatcaraagacaagaggcygtgcagatgcttctcaattacgatggggttatatcctgacaaactcattgtaaagtctaaaaaatcttaagtgggaccattgtaagtcagggaccatctctatagtatgctggtaagaagagcattctctggagactagctccaaaatgtgctacctatgtgagcttgggaaagtcattaacttccttgtgtttcagttccttcatcagtaaaatggggataataatagtatttacctcacagagctgttgtaataaatgaattggtacacgtaaaacacttagtagagtacatgtcacatagcaaatcctataaaagtactagttattacaaytaacatatcagttctcaatatatgcccaacccttacctggtacattatataaccttaaacataagaaaataatcatggaagtaactccttgaatgaattctggtattttaagcccatttcataagaccaataatgttgaccaatctactcatattcacacagtacttctacatataccatggtctatatgarcrgttgaagaaatagaaaataaaatgcaaatcacaagatgtccattaaaacagtctacctttttcctttgacagccattaattcttcttaaaatgtattgagaaatattttataatagatatacaaaagggcataagctataactagaaaacactgtacarctctctcatagattaagaaatagaaaattaccgacrtgggaaaaataaatcccttgtgtatcactaccacctccagaggcaatcattatcctgaatttgtygttacaattccatggatttccttatatttttgctgcatatgtatccctaactaatatttagaatcttcacrtgtgtttcatcttgagagaaacaagatttttatttctctcttrttcaagaaacaagagaaacatttttgaatatttcagcagcttagttttttgtttgtctgctttttattttctaagttcaacactatgttgatgaagacccctatacmagtatgtgcagagtcagctcattaattttcactgctgcataatatattacagtctataaattagtcataatttacacatcgagtttctcctcatggattttttttatgttttgctaytaaaaamaatgctgcaatgaatactcatgtgcctgttttcttgtgcatctgtgtttctccaaattatgctttgagaagcataatgactgattagtgggctaagcacatcttccccattgctgaatattgccaaagagcagttggcttcccacagcagtgtatwttggttcccattgtttcacatccatgtcagcctttggtatttcaaggattactgtattttttttttcaatttaatgagtacaaactctactatttcatgtgatctgtgatcctcacaagaaactgataaagacacactttataggaaatgtaacaaactccagctatagtctaatataacatcataaataggaaatagccagactcaatgagacaactgctgtgccatttctttctcccaccaacccgactatagcaacgatttgaaaacatagataggcataggcttctgactccagcatcaatatctgccttagctgggctaaaacacaccaaattcagatttacatgaagggaaaagcatctacatacagtacaggggattataatgggcatgcaattctcatttcagcactggcttgggtactttcaccttgaattaaatataaatatgtaggcacttataaatatctttttctcatctttaagacaactctgtccattgggagcgccctcagaaacccaaggcaccagtggggcatttttacgaaccccaggctccctctgctgaggtggagatgacatcctatgtgctcctcgcttatctcacggcccagccagccccaacctcggaggacctgacctctgcaaccaacatcgtgaagtggatcaygaagcagcagaatgcccagggcggtttctcctccacccaggttggtgatttgccaaaaccttttatttcaccttcaggtagcaaaagatttgaatgaaaaagaaacaracacatccaagaagaaaaaaatacagatgwcagtaacttgaaatgaggaaaagttttcagtatccaaggataatggaaataaaagcaaatcaaagtcaaagagrgccaaaaggaaatgctcagaatyccggcaccccatcgctgtgttattatccatctcctatttcccataacaacactgccttcctcaagcagcagtggagcaccagcagaatgaaggagatgtctcctgccattctcctgaaagctctagggtctctttcaaactgttcaaaggaactctactcaaaatccaacaacctctcctcgcaaatctctccattcttaggtcccctttaataggcttttctcaaaactacacattttgtgcttcccctattcaccttttttttttttttttttttaagacagagtcttgctctgtcacctaggctggaatgcagtggtgcaatctcggctcactgcaacctccatctcccaggttcaagcgattctagtgcctcagcctcccaagtatctaggattacagtcatgtgcaatcatgcctggctaatttttgtatttttagtagagacgaggttttgccatgttgcccaggctgatctcgaagtcctgagctcaggcaatccatccgccttggcctcacaaagtgctaggattataggtgtgagccactgcgtccagccccctattcacctcttaatacacaaacatttattcatcaggagcataaagaactgtctttattcatccaacctcctaaatctagctatataaccatgtatctgaacaattcattgatatgtacacagcagaaagttttatcttcagagaattyggatgtttgcttatataccctaaaayggaaaaaatgtgacaaaatggcattccatcctatttccattgtattaatcttttatcatatgaatgaaaaaaactaagtaattttgttaaaggttatcattcatttattagaaacatattatttgaaggaggccaagcaggtttaatgttgttgaggatacataccagcagacattcactgggaacaggaaatcatccaataaaaagggaaagccaaataaaaatgtcattaaatccagaagataattataatactcatcttttatttcttttggagaaactgaagcatgactctgctcatkgctgcaaagaaccttgggttctctccaggacactgacctcagcaactgagcaaagtttaatatgggagagagccagactgaactttgcttgagtggtggcagatatgagcatagttgtcaagaaagacatgttagcaaatagctgatgccaataactgattgccattcacatgttttccacattccatgtcccacatatacttacagagagaaaaggatcaattttctgataaataaaataaacatgtagggcatacagtccaaggtagatatgtgaatgttatggttcttcaactatctaaagattataatcaatcttgaaattacagctcctatatttaagtagtgagggaagtaggaaatcaaagtccctcacatgggtctttgaaaaatatctcagccctcaaagccttataatgcccaatgggttctctcactcatctgtctctaacaggacacagtggtggctctccatgctctgtccaaatatggagcagccacatttaccaggactgggaaggctgcacaggtgactatccagtcttcagggacattttccagcaaattccaagtggacaacaacaaccgcctgttactgcagcaggtctcattgccagagctgcctggggaatacagcatgaargtgacaggagaaggatgtgtctacctccaggtgagactcttgggcaggtgaggacaggacagatgaggacagcagctgttctctctgagaagtcctaactcagaaaacaatgggacagatcagagaaagggttagggacrtggacaggaattctgggaaagggcaaaaaactgattttgtctttgatgttctatagacatccttgaaatacaatattctcccagaaaaggaagagttcccctttgctttaggagtgcagactctgcctcaaacttgtgatgaacccaaagcccacaccagcttccaaatctccctaagtgtcaggtaagaccttctgactctatcacctaatcctaagaataaccaccagtcttctttcgggaactcctctttaagtaaagcagtgcaacagtagatatttgcactattcacaaaaaatgcaatgtattctcttaagttgatataatttctcaatgatggggtttacattgtccatccaggatctactattgtgcaacctcattgtttaaagggtaataatttccctcaataacaactaagtaaatattacccattgcctctgacctgaattccttgttatgtaatgaaatcctatattattcttgctttattgaagatagagatgaagaattattgaaaagtttgaatagaaggaagtagtgactccttagttagaattcctactggcaataataaatctcaggttatatatgatataattaatttggggggaagatacacttatatgcatcaatatttaaatagctgcagatctgataaaaaactctctctccacaaacatattattacttggttggagatactattcaggaaaaaagttaggacaaaatacatgtaacaaataactggcacacatcaaaaagaatgagatcatgacctttgcaggaacatggatggagatggaggtcattatccttggcaaactagcacaggaatggaaaaccaaacactgcatgttctcatttgtaagtgggagctaaatgatgagaacatatggacacaaaaaggagaacaacagacaccagagcctacttgagggttaaggatgggaggagggagaagatcagaaaaaaacaacaattcagtgcaaaatttagtacccaagtgataaagtaatctgtacaccaaacccccatgacacgagtttacctatataacaaacctgcatgtgtacgcctgaacctaaaagttaagtatatatatatatwtttttttcatttaatttggtgtatatatatgccaaaaaataaattaagcagtccaaatttcggatgcaaactctrrgggacaagacgctaggtgtttctaagtgttttgttgaaagccagtgtttaagtaaacattataaattattgttgtttttgtaaataatgtagactgaaatttattattcataatatacatcattttgtcagctgaaagaaaataaaagtaaacaaataaataaaataactggcatagattagaggtcacaaacagcctgtgcatcacttgtagagctttcttaaaatgcagatcctcagccgggcgtggtggctcaygcctgtaatctcagcactttgggaggccaaggcgggcagattaccttaggtcgggagttcragaccagcctgaccaacatggagaaaccccgtctgtactaaaaatacaaaattagtcggamgtggtggtgcatgcctgtaatcccagctactcgggaggctgaggcaggagaatcacttgaacccaggaggcggaggttgcggtgagccgaaatcatgccattgcactccagcctgggcaagaagagcgaaaaactccatcaaaaaaaaaaaatgcagatcctcagcccccatacactagacattctgattcatcaggtctagagtagggcctggtctctgtggctttaacaggcttcctaaaaattctacgcacaccacttttacaaaccactgggataagatatttgggaagacttacgtgtaccttttagagctgtggaatgcttaacatggacatagaagaagaaaatatttaaaaacacagaaaaccctaatcctttcctcccctggatcctcagttacacagggagccgctctgcctccaacatggcgatcgttgatgtgaagatggtctctggcttcattcccctgaagccaacagtgaaaatggtaggtttatcataaccccagactgccctattttatttaatgatgtatgtatccccagcataagacaatactaatatcaaaatactattaaagtcaatctctatcaaagccttatcctttttccagctcagaaatayaatcacatgtgtttgtatgaatgctgaccatgtgcagagcactgygctaggacccatgactacaagaaaaagattgtcagcaggttcctgcttttcaatttcttcttagcttagaattttgctaagaagataaaagatatgaacacgaaccagtgaaaaatatgaaaatgactgattggcataaactataagtattacagaagttaaaagaaaaatagagcaagcaaaacaggaaaaaaactccttatgaagaaatagaaactgaattgaactttgaaatatgagtaactaccaagtttaggatacttagctgtcttttcttcagataaataactttacacattagtcgtgtgttatactaatagtaaaccctttatgcctttcatttttaattgtattacattatatatttccttacaaaaagcatttgaagaattctaccctcagggttattttggcaatacaaagattttttctctggatcccccaggggtttcatctatttattaacatttgtggtatttcaattttcttcagcttgaaagatctaaccatgtgagccggacagaagtcagcagcaaccatgtcttgatttaccttgataaggtaagagaacttccagtctatttgcaaaaaaacgtagataataatcctctaaggraacatctgggaaggtaaatgcattttagaaacatcacttccatgctagaaatttgagaattctaatgttaactctaaaagaatgttcttctctcctttatttatatttcaccagggattacaggtagaaatggcttattatgatcttgggatatgaatattcctaaaatcccataagcaagaratcttsacaaaatgtgtttattatgttgacaagttttttggatacccagtaatayaaggaagtagcccttgtgattagtcaattattagttaattatcaacatactcaacaacaatatgaaagggaaaaaaaactgtcagtctccacaaggacttgaaccataaaataataagaccagttcaccagtaaaccaatctgattttatagatatgtgtggtaggagagtttgttcatgcataagttgatgggaattatagtttacaaattttatgaaacttaagcctgggaagatcaaccttttagahcctctttgagtctacgcaagtattcctgcaagacagagaagtcaaactataccaaatctctggatattaaaaaatgaacacagttagtcrtccaataaaaagtatatatcatttacccccatgaacagagctatgtattggcattgacagaggtatatgcrttatgttagttatttaagaaataatctggagaatttatcatcccctctgagagatttctgcacaatttaattaaggaccctatagtgtgctgtaggataataaagcttttcccccaaaaaacaggtgaatacttaaactaattcaaagagagaagaaagcttcctgaaaggtcatttaattgacttttgctttccaggtgtcaaatcagacactgagcttgttcytcacggttctgcaagatgtcccagtaagagatctgaaaccagccatagtgaaagtctatgattactacgagacgggtgagtgagagtgattttcacgtagaaatatttaattcctgatcacagaaattcaggtttaggagatgtgttggggttatttattacattaagtaattacattatcacttcattttgtctccatcaagtctgatgcycctctttttgtctcttatacatacattatagaaacaacctacattataaatttatcaactactaatacaaaacacctgtgggatatttagttcccttttcatcagataaatggactgtatgacaatatgagatttaagtaagtagaacatctgaagagtccttcaggagtttgggataaaagaatatataaaacactatatttgaaaggagaatataaggtagcaagcaacacatcagatgaatgatgcttatgtttctggtacaatactgttcttcccacaacaaactccttccttggcctgtatcccacagatgtttgctttctttctcacttcatgtaatgatttctggttttttgttggttttttttttttcagatgagtttgcaattgctgagtacaatgctccttgcagcaaaggtaagccactcacactcctccaaaaggcagtcagagctccttcagcttgtcccccaaaccttctccttcataaaacgctgggtaaatatttgtcaaaaacatcaaattactcacactgcacattattatagaaaaacacatttattggagagggccgctgactctgtcaaacctcagagagtccataggattgcttatgggtaatgatttggaatagatttggtttcccwctgtactgattaggtttccttgggcactatgctacccagaactaaggsaaagaatactctctgctcatggagacccaaatctgtcttaattttttttctttccaatgtcacagatcttggaaatgcttgaagaccacaaggctgaaaagtgctttgctggagtcctgttytcwgagctccmcagaagacacgtgtttttgtatctttaaagacttgatgaataaacactttttctggtcaatgtctttccctgtttcctgttcattcaataaatatcattgtacatttccatatgattcccaatagaataccaagattaaacttaaaggaatcaagtgctgaaggacttcagaatacaaaaaaatgatacagtgatgtcggtctgagtaggcttcatgtaaggactgtggggaaagaagaaagtattgggttatgtactaggaaagtgtaaagtgtgtttggttatgggaataccctatgaaaaacccaaagggtgaatttttatgagaaaataaaagactgacttcaccagaaaagactttttacattaaaatgaagtagaatgaaatacaacattgaacaggtcatattgagaggcaagataattgggacttgacctgaattgggagtgatgtgtcctatgttacaccaaaatctgccactgatgagagtgatcagtcagttaacctggggtttcagattcaataatagatgagctgaaaataatgaagggaggattcatgcagaagcacgttttctcagaagaaggaatgtgtatgactcaaagtccaaataggagtattatattggatcatctttcttctggaactttgagccaggattaaaggatagctgtaaagtcaaggagatattctgatgcagaaatcagttctcacaacatctgattgatgtctgatgtctcacaacatctctttagtctatttttaaaatatataattttctttgcagtaagtattgcgacatatatttccattctatagaaggggaagcaaaacttcaggagtttttgaagtaggaaaggttaaagcaggaggattgagccaagagagtctgaggacaatcgtaggagtcctactcttcatttggcacaaaaatgacaatgcttagttaggcagaaggtgagtatggattgtataaactaagaactggaaaagactttgcagttcaaggaatccttagctctgtctccaggctagacaaaataagaaataaaagctatcacttctgtgtggtgcttatagaatagaattaacatatcagcattatgggatctttagggtgtcgctttcctggccagtctagtggcacctttgcctgagttttgctctgggcccactgggctgcttctgcccactcgcacttgctaccaacctggatcccggatccaagggagattgagacgggtggagcagaggggtgtgctaggggtgtgtgagcaagcgtggccactgtgcagtcacacacacaagctgctgcccaggttgggcagctccaggtgccagcacaggctctccatgaggtggctggaccaggcacacaacaaacagcttccccctggaccaggcgcatcacaagcagcttccaacagtggcactggcgaatgcagtgacgccaaccagggccccaaagagggagtcacagcccgggctcaaggagctcccaggtctgggcttctccgagggccagagctcttctctccctgtggggagcaaggggcatgttgcagccctgtttgtgttacagctcttttaaccttgctgtgcagctcctcagctcctgcatcaagcagacaagtggagaatgagacagatgaagaggagcattactgagcaatggaacagaaggataaggaagatgaagaggaaggagacctgcagttagtagctcatttccacagtaaggatgtcctttccacagcaagtgtgtcccaacgagtgttcagcttctagcagaaaggagaccctggagtggctggctcctctctgcaaacaggtcttcccattgagtgttcagctttcagcagagaggaggttctggaatgggtagtttctctccacaggtaggtcatccattgtcttcccatcctctcttccaatctagctgagtctgggggattttatgagcctcagagggaggaaatgcatgctgattggtccatgggcagccatgagtgggcccagggagcagcaccacaagttacctctctggtctgcaggcttcaagccctcaccagcttcagggtgggacttcactggggacccatccccttccacccaggaacctgtctgcctcctgctcccaggctgttcatgccaaggagcgcctgaaagtcagtgtccagctgtcttcagacccctctcagcctccctcccacgcttgttggtgcccaagttccaaagggggccgagacggcagggggctggcgtatcagcactgtcctgagcgtgtgcacgctcggccaggctgtgacagtacccaggctcggcccgaccttgctctgagttcagagtgggtgctaacagtggagagaagccaggcagccggagtaggcaccctggagcctgcagtgggcaggggactttgctgggcctctgagagcacagaaaatgtccacagccgcggcaaggtggctgcagctgcaccctgggagctcctgctccaccagttcggaaggggcggggctcctgcttgtccctggctcacctgctcctgagtgtgcaggtccggtggcgcctccttgcaggctgggctgatgggcgggggcgggggggggggggaggaagggaatgttccaggtcctccctgggcccgggactgtgtccggggcagggatgacgtcgctgcaagttcttcccgtggccccggggctcaggggcagcccaggactctccctcgcccggctcacggccctgcctggggggcgcctccgggagcagatcacgagccctggggctcagccctcaggcgcgtctagctcggcggtcaccccagtgccgggaggaccctgaagacgcgccccaggcggccctactcagagcctcctcccaaggcccaggaatgcggcgctgtcggaggtgtgcgcggtggccacaccgctgtccgggtccccaaagcgggccccgctcccacttctcgccttggccccgaaccctgggtccagccccagcgctttgtgtgcgaacaccgctccgccccggacccagctccgccttggggcccctctctgcctgcccctccgtgcccgactacactgcttcccctccggcgggcgactcagcccggtccatcgtggcggcttccagggcggcaggctccgggagtactcccggggccggctccaaggactgttcccctcctccccactcccactccgcggcggcggcgggcgagagcggcgacatagggccagggtccggagcggtggaggctcctggccggggagcacgtcgccccacccggcaacgcgaggatggtggcggcgcagtcggctgctttggggtctcaaggcacaggggacgcgaggcacagatgtcccacagcagccactgcggctcccgcagctgctccgccgccgctgcccgcccctccctgctgcagctggcgtgatggcagcggcagctctggacgccccactgctgccaccatcagccttgtgaaataggtactaccttaacaaatgaaattgaagcagagacatgtaatttgcccaaagttactaagttagtgacaaagctagaattcaagaccaagaagtctagcttccatgctcttaacttccaaccatggtgacacctcaaacaacttcagacaaaaaggccaggagaaagtatatttcagagcttaataaacattataattagctgtcaaattaagtatcaagccagggcacagaacataaaagaaatcagagtatggctatgggaacaagacaacaggattataattttacctcttggttctagtttttttctttgttcatatggaaatcgttactgaaaaggtactttaaggatatgcttgttgcaaatcattagctgtatcactgaccaagagtgtttattcctgaaatactaactgattgcctactatctgccaggcacaatatcccatgctataatacaaaattaaacaaaataggattcctcccttagaaaaactcaccgcagagtaaaagaaaaagatacacatctgggtcattataatgatcaggtgctcaagctattcattgccccagtggactggagatacaatggccttctcaagttttggggtattacactcaaattcatatgtaatactggagaaaaggcctaattacaactaaaactggatttcccaccagcctggtggcatgggaatcttggaattaaaattacgtagaatttttaaaagtgatgtatcttctacatctgattttgtgaactgaagtttattctttccaggaaagcatatagatacacgacaggaaatgaaatggatacttgttggggtcagttttatgtatagtttgtattttattttgaaatatgatacactgctattctcttgcattttcttatatgtgactcaccactaaccctatattcccccatttcaggccagttggtcataagcatccatttgcctcagagaatactgggttgttatgacaagaatataaagttggaaagaaatagaatatttgagtctaccctgtaagaataaaaagaataaaaggggtttaaatttatttagaccctattgtttaatcaagaattctggccaggagcagtggttcatgcctataatcccaatgctttaggaggccaaggcaggaggatcatttgaggccaagagtttgagaccagcctgggcaaattattgctcgggaaaaaaaggtcttatttagtattttagtctttacaatgtttttttctattatgcaatattctctcaaatactttatgtccatccacgttgtctgagacatgccactttaacattctagttatgctgtagctgtcattttaccctaagccgttagtagtactgatccacataaaattgggctgtttaggtgtttaactgtttaaatgtataatatatctgatatatttatatattgtataaaaaatcacctaacacaatagatatttactatgtctgctataaatatatatcatataacatataacaatatattataaatgataatatactataatataaaatataataaatatattataaatgtacaatatatccgatataaatatataaatatgtcaactatattatacatataaatgtatatgtataatatatacatatatgtataatacaatgtatttattatgtatatatataaatgtatatgtataatatataaatgtataatatatctgatataaacatatcagatatattatccatctattgtgtcaggtgattctttatacaatatataaatatatcagatatattatccatctattgtgtcaggtgattttttatacaatatataaatatatcagatacattatccatctattgtgtcaggtgattttttatacaatatataaatatatcagatatattatccatctattgtgtcaggtgattttttatacaatatataaatatatcagatatattacatatctattgtgtcaggtgatttcttatacgatatataaatatatcagatatattatccatctattgtgtcaggtgattttttatacactatataaatatatcagatatactatacagttcagcccatcaaagcaccatattttggggggttggtttccgtgtcccaacactagctacgaaaatattagctattagctacctataactcttcagtagtaaattcaagaaacgtaaagtaattctcttcattaagttcttgccttgtctactaaaaaaatggtcatcaccgatgtggacaatgaagacctgtggggttaaaagctctaactagtatgcctccaagattctttgattgcctgccatcatgatcgaagaataaataacttctttttcatcttatttatttattttttgtagagatagggtctcgctatgctgcccaggctggtctcaaactcctgggctcaagagatccttctacttaagcctctcaaagtgctggaattacaggggtgagtcaccacgactgaccattaataatttctttcaatgacactttaacataggctcattcatctttacctctaa

SEQ ID NO: 6843 - DNA, 108111 bp, Homo sapiens
aaagttctggtgagctgcttggctactgtgttgagattggtctggtctcttagcatttgttttggcaaagaatgtttgaatgtttatagaggacagatgctggtcaattatgagagctgttggtgggagggagaatccatttgggatcccatatgaaaagtcctgttaagggtgtgagcaggccttagaagagggtaatccaaagtggatctgtggattccttaggagttaagaggaaagaaaggccagagtggagtgcattcattcaggtcaaggcaattgcaggtgaaaacagctgtgggaacagaattgtccctgcragagtcagcgttcaaagaaaggccacatcagatattcaaaatcatctcacaacagttatcagccagataagaaccaccctcttcagtttttgttttgttttgagatggagtctcactctttcacccaggctgaagtgctatgacgcgatctcagctcgctgcaacctctgcctcccaagtaactgggattacaagtgcgcaccaccatgcctggctaatttttttgtgtttttagtagagatggggtttcaccatgttggccaggctggtctcaaactcctgacctcaagtggtctacccatcttggcctcccaaagtactgggattacagcataagcctgtagaggagtcctatgccagacagaaatgacttggctttgtatcctctttgtatcctggcagaagcaaggtcctggtgaaagcaccagctggaggctacagttcaactgtgcactccacaatagggtctcctgaagacagatccaaacagtgtgactccacggcctttgtatcaatctgggtccaatgacagcatagaaaccacacagcaatttagcgtggtttaatataaagaattactaagctatgagatgagagtaattataaagatggaaagagaagtctaaagggtaccttagggctgaaggagagtactcaagaaggggttaatttgggaggggggttcaaacattggtgaaggaggtgggattacagcctgctaggtggcagagaagtttgactccatttgcatgtgactttcccttgcatctgactaccaacctcatttcatctgcatcccagtaggttgtttctgcctgcctagagaccaaggggtggccctggcccaggttctgctgtgctgctgggttgcttcttcgtgttccttctacaccaatgtcagtagtactctgcccaggctgtgcattcccagagcatgcagttccttgagtaccctgagctttggccccagccagtaacccttttaacatggacaccatggtcttcgtgagcaggcttgtaacaacttcctgccctcaagccttgtactgctgtgtggggaactgggcttcctgcctcctcacaccatctatgcacgtatcagattgggcccctggtactccagaagggcgtttgctgtttgctcgatgactgtggaccagctctggccttggcaaccacaccttctccaaggacatctgaatccccagccttgtgaagccactcattttaagttgttcatactttgggtgtaatctcatcctaaaggattctttagatttttcttttcacttttatactactgttacagttaataataatttttctttgagatgcggtctttttttttttttttgagatggagtctcactctgttgccaggctggagtgcaatggcgcaatctcagctcactgcaacctctgactccctggttcaagcaattctcctgcctcagcctcccgagtagctgggattacaggaatgcaccaccacacccagctaatttttgtatttttagtagagatgggatttcaccgtgttggccaggctggtctcgaactcctgacctcgtgatccacccacctcggtctcccaaagtgctgggattacaggtgtgagccactgtgcccggcccgagatgggtcttgctatattccccaggctggtctcaaactcctgtgctcaagtgatcctcctgccttagcctcccaagaagctggaactacaggtatgtgccactgagcctggataattttttttttttttttttttttgagatggagtcttgctatgttacccaggctggagtgcagaggcacgatctcagctccctgcaacctctgcctcctgggttcaagcgatcctcccacctcagcctcctgaatagctgggattacagccatgcaacaccatgcctggctaatttttttgtatttttagtagagacagggtttcaccatgtttgccaggctggtgttgaactcctaacctcaagtgatccgcccacctcagcctcccaaagtgctgggattacaggcatgagccaccatgtctgggcatggctaattttttttttttttttttttttgagacagtcttgctctgtcatccaggctggatggagtgcaatggcacaatcttggctcactgcaacctccgcctcctggattcaagttattctcctgcctcagcctcccgagtagctgggattacaggcgcctgccaccacacctggctaatttttgtatttttagtagagatggggtttcaccatgtcggccaggctgctctccaacttctgaccccaagtgatccacccacctcggtctcccaaggtatgtaatctctgctgggattacaggtgtgagacaccacgcccggcactggccatgggtaattttaaaacactttttggagacatgttctggctatgctgcctaggctggtctcaaacccctggcttcaagccatcttcatgcctcagcctcccaagtaattgggattacaggcacaagctaccatgccaaacttctatagcaaataattatttgtattaaatttttcttgttcaggttactaggtggtttctctcctgattgaaacctggcagacacattatctctttctaggatgtactttttttttctttccatcttctcccctctcacaaactcctgtttattctttaagtctcagcttttaaaatttaatttaatttgattttagagacagggtcttgctgtgttgcccaggctgatctcgaactcctgagctcaagtgatccgccagcctcagcctttcaaagtgctgggattacaggtgtacaccaccatgcccagccctaaatttcagctttgacatcacttcttcatgtgcctctctccatgacctaccacccttctcttgacatgattctataggccctctgtgctcccccttaatgtggcactaaacatgaaatttgcctccctccctgaagtgaagaataacacatctgttgtttcctcactgactctcacaatacctagaataaagaaggttcccagaacatgtttctgtttaatgtggtggcctccttactgtgatcatcccaggtcttggatctccaggagatacaggtagatgggcctcaacacacttgagcccttatgttctaatcatggtttaattatagtttcattattcctcaatagacacagcagaatgcatgggaagacacatttcaaagaatgaatgaaccagttttggaaaagggtttgatgagtttcttggtaactcttaaaaggagaaaacacgtgtgacagccttgaactggaattaaagagctttatctggccaggcacggtggctcacgcctgtaatcccagcattttgggaggccaaggcgggcggatcacgaggtcaggagattgagaccatcctggctaacacagtgaaaccccgtctctactaaacaaaatacaaaaagtagccgggtgtggtggtgggcgcctgtagtcccagctactcaggaggctgaggcaggagaatggtgtgaaccaaggaggcggagcttgcagtgagccgagatatcgtgccactgcactccagcctgggagacagagcgagacttcatctcaaaaaaaaaaaaaaaaagagctttatctaagggatttgctaaggcattcatatctcagttgattttcactataaaacaaatattcccctaacacattaatttcattgacataattattaaatgagggtataggaaaactgaaccagggcattactttagccttagataggcatgggagttccaagtgacaactttctagagggtgtctgctctggatctgaaattaatttccatatgaatgggagatcttagctttcaatgaactccaagaaactttttggggatccagcatttggctgatgaattcaacacctcagagctggcctaacatatagtccttgggtatctctggtctatacaaaaacactatagtcaaccaaatctctacaacttacctggagagtggtgtgtgattcctatatccatccagactggtaatgtctttggccttaatttcaggctgcattaggaaatgtcagagtcctctgttcagagtcagtgttctccacacttgagtattttttgtttgtttttgtttttgttttttgagagagagtcgtggtctccatccaagagtctccactccagaggcagtggtgtgaacctctgcctcccaggttcaagtgtttctcctgcctcagcctcccgagtagctgggactacaggcatgcaccaccacacccagctaatttttgtatttttagtagagacggggtttcaccacgttggcctggtctcgaactcctgacctcaggtaatccacccacctcggcctcctaaagtgctgggacttgactagcttcatagatcaccttggggagtgttgaggagacaacataactttctagctggggtagtgtaggaggaaaattcttggtgacgatagtggaaaccactctcccacatcaaaaccatttgatctagctaagctggagaggcctgagaagtgttgttttgtttttgctcatttctcacttggcaataaagacgcctgttctggggccagccacctcctccacaagggaccctagagctgtccagagctatggaggtgcattccagcagcaatttctgctgagactccacttgacgtctgcgttgctaattccaatttgttgtcaaattattcaatctaggctgggcgtggtggttcacacctgtaatcccagcactttgggaggctgagatgggagcatcatttgagccctggagtcggagaccagcctgggcaacatggcgagaccctgtctctacaaaaaatgcaaaaatagccgggcgtggtggcttgcgtctgtagtctcagctactcactcaggaggctgaggtgggagtatcgttgagcccaggaggtggagactgcagtgagccgtgattgcaccactgcactacagtctgggcgacaaagcgagactctgttggggaaaaaaaaaaaaaaaagaagaaagagatgtaaccttggaaaatcaaaagcaaaaaataaaacataaggctgggccaaaggcagaggggtgggggaaggaggcatgcagaaatgcgttctcatttcttctggagaatgtgcattggtttctcctcgtaagtttgcacttgacacatattgccacgatctccgaaatcctgtgccctctgcacttgacacatatgccacgatctccgaaatcctgtgccctctgttgttgcatctgttaagttctcatggagaccagatggcacccaaagggacatggaaggggaataaactgagagatagggagattcagagagtttcttaggggagttttctcggagaagaggctttcagcatcttaaaactccacgctactccagtcccagtcatgcgtaaaggctgcttccccacaggcgcgaggcttcttttcgcaaacgtcctgaacactcagccagactcccaccgacatttgtttgacaggaacgcagggctcgtcccagtcgccgagatttgcgaggtctgggccttgcacatgcgcacggagcacacttgaccactgggccttcgtgcgcacgcgcgtggaccttgccatctgaggtgcgcatgcgcacttgtgtctagcgggatcgcttgcttggtaasccggagggagagattggaaaccgcggagtttcctttgggaggctgcggccagccggggctgacttgttatgttgggctccrgaggccgttaagagccgagagagacatgaggtgtctctgaagcccggtcgcctgggccatgaagaagatttttagtaagaagggcgagtcgcccttgggctccttcgcgcggcggcrgaggagcagcgcgggaggcgggggcgagccgggggagggcgcctactcgcagcccggctaccacgtccgagaccgagatctcggcaagatccacaaagctgccagcgcgggtaatgtggcgaaagtgcagcagatccttttgctcaggaagaatggcttgaacgatagagacaagatgaacaggtaataggcgtcgcaagcccggactgagtgccactggagtaggcgggcaggaagaggggccccttttgtgggagccacccagggcctggatcagcctcccgcgggctccgtagcccctgggacggtgacaccttgcagggctccagcgcccaggccgcctttctgagcagaaaaacaaaaacagaactctagctggtttccgatccccccgaaatccccttagagagcacttaagtgacaattttaaagtgaattaacgaacaaaagcacgtacagcgttttatttttaatgtacacatttaagatacaatgtcatacacttatggaaaggtgcataatgagataagcagtttccataatatagcaacttctgggttaaaaattatttctataaaatctgttattcgtcaggcgcggtggctcgcgcctgtaatcacagcacttcgggaggctgaggcgggaggattgcttgaggccaggagttcaaggccagcctgggcattatagcgagacccccccccccaactctaatagtctcagctacttggaaggctgaggcaggagcatcacttgagcccaggagttctaggctgcagtgaggtatgtcagtgacaacagagcaagaccctatctttcaaaaagaaaaagaaataaaatgcctttaggaaatagatatacaagtaatttgtttttctcagcattgcttaagcagtgtattaaggagaacccatagaatggattttgtgaataaatgtcagtgcatgataatatgtgaccattgaaagtggcagtagaggccaggcgtggtggctcgcgcctgtaaacccagcattttaggagaccaaggcaagcggatatcctgaggtcagaagttcgagaccagcttggccaacatggtgaaaccccgtctctactaaaaatacaaaaattagctaggcatggtggtgggagcctgtaatctcagctactccgaagactgaggcaggagaatcgcttgaacctgggaggcagaggttgcagtgagccaagatcgtgccattgcactccagcctgggcaacaagagcaaaactctgtctcaaaaaaaagaaagaaagaaaagaaagtggcaatagatacagaagtgtattggcatgtgaggatatactttggtatctcaagtgagaaaaaaagtttgattatacatacagactgtggtcttgtgttagctgaaaatatgtacaaaacgtggtaaaatttggccaggcgcggtgtctcacgcctgtaatcccagcacttcgggaggccgaggcgggcggatcacgaggtcaggagatcgagaccatcctggctaacacagtgaaaccccgtttctactaaaaatacaaaaaaatcagccrggcatggtggcgggcgcctgtagtcccagctactccggaggctgaggcaggagaatggcgtgaacccgggaggcggagcttgcagtgagcggagatcacgccactgcactccagcctgggcgacagagcaagactccgtctcaaaaaaaaaaaaaaagtggtaaaatttgttatttctgggcatttgtataataagtcaaacttttttctttatgatttctgcaatgagtatgtataaaagttctagtgaaaatttattattaatgaagtaatccttgggaagagaggaatatgaatcttgcacagataaaaatcatttcccactttcttttttttctttttttggtggattgctatcgtctgacaacttttatccttttcagaagtaaaggggatcttggctgggcacckgtggctcatgactgtaatcccagcactttgggaggcccaggcaggaggattgcttgacccaggagttcgaaactagcctgggcaacatagcaagaccctgtctctattaaaaatgaaaggtaaagcagatctttgttcttgccaccaaaaattaagaagataaaaaataaaaataaaaaaagaaaaagtaaagggtatctttttatctgtatttatagattttatgtatacattttatcatatacatgtttttattatagatttattatatatgcaaacaggtacaatcattttattttagttgtgtccttatgacaataaaaataccaaatataaatgataattaggctggatgcaatggcttaggcctgtaatcccagcactttgggaggctgaggagggtggatcacttaagtccaggaattcaagaccatcctggccaacgtagtgaaacccttctgtagtaaaaatacaaatattagccaggtgtggtggtacacayctgtagtctcaggtacttgggagactgaggcaggcagtagaatagcgtgcacctgggaggcggagggtacagtgagctgagattgcaccactgcaatccaccctgggtgacagagcgagactccatctcaaaaaaacaaaacaaaacaaaacaaaaaaaagataaatattattgcaaaagaataaaagaattactctactttataagaattttatttaaaaatattgaactccctaatgatttttccattctttcaatccatttattcatcaatcataacctgaatacctgttatgtagcagacatagtctactatctcttttttctttttttcttagacagagtctccctctgttgcccaggctggagtgcagtggccagatctcagctttactgcaacctctgcttcctgggttcaagcgattctcctgcctcagtctcctgagtagctgggacagctaattttttttttttttgtatttctagtagagacagggtttcactgtgttagccagggtggtctcgatctcctgaccttgtgatctgcccacctcggcctcccaaagtgctgagattacaggcttgagccaccgcgcctggccttttttgtttttgaggtgaagtctcgcttcttcgcccaggctggagtgcaatggtgtgatctcggctcaatgcaacatccatctcctgggttcaagcaattctcctgcctcagcctccctagtagctgagattccaggcacgtgccaccatgcctggctaatttttgtatttttagtatagatggggttctaccctgttggccaggctggtctcaaactcctaacctcaagtgatctgcctgccttggcctcccaaagtgttgggattacaggcgtgaaccaccgctagttataagcatattaatgtaagtgcgtagtattttaataaaatgtggtagaatatagacttgatctttgaattggaaacataacagtagtggacatgaagatttgcagagctgatttttttttcttttttttttttttttgagatggagtctcgctctgtctcctgggctggagtgagttggcatgatcttggctcactgtaaccttctcctcccaggttcaagcaattctcgtgcctcagcctcccaaacagctgggattccaggcacccaccaccatgcctggctawtttttttgtatttttagtagagacggggtttcaccacgttggccaagttggtctcraactcctgacctcaggtgatctgcctgcctcagcctcccaaagtgctgggattacaggcatgagccactgcaccaggccagagttgatatctttgaagtgaggattttacttctatgcaaattcttttctgtcagaggtgaatccctattttagtcatgaatatgatatttattcccctttcacaacaggaacttcatatatatgtatataagtgctgtgtggtgttctaaactatttcagtcttgcattagcattgtaatacataatgtagctaatctgctatgaatttgggaatgcattttatgacaaatttacagagctgtcagggaagatggaaagttgctgatttctcatataaaactgtcttcatagagcttgatgtgaatctcctgcacttctggaagcaggtatttaactcatccccaggaaatcaagcctgagagaagttctggtgagctgcttggctcctgtgttgagactggtctggtctcttagcatttgttttggcaaagaatgtttggatgtttatagaggacagatgagagctctggtcaagtatgagagctgttggtgggagggagaatccatttgggatcccatatgaaaagtcctgttaagggtgtgagcaggccttagaagagggtaatccaaagtggatctgtggattccttaggagctaagaggaaagaaaggccagagtggagtgcattcattcaggtcaaggcaattgcaggtgraaacatagtctactatctctcaggacctttccatcttcaaaacctttatgtttgcatacctgcccagcctgagcaagttgagagatttaaaattagactattagggcaatctcaattgaagcttttcctccctcctcttatttatttatttttttgagaggagattatgctctgacacccaggctggagtaaagtggcatgatctcggcttactccaactctgccaccagggttcaagtgattctcctgcctcagccccctcgagtagctgggattacaggcatgtaccaccatgtccggctactttttgtatttttagcagagatggggttttaccatgttggtcaggctgatcttgaattcctgacctcaagtgatctgcctgccttggcttyccaaagtgttgggattacaggcgtgagccactgcacccaacccctctttataaacaaaagtgtttctgaaggtagaaaattataagaaataacctttaattacccttttraaaatttatgtcttaaacacgaatattagtcattggaaatatctgcatatattctataaatctaaatattgaataaaatgagccaamctattcatttgaatcctgagtttcttttgtgttgaagtttcttgaaaacacartaagaattactttgttttaaaaatctgtttttcaattttaaaaatgcttccaattatagttgtaataaatcatgaattacaagtggcattccaatgtcagagatattgaaatgtgagaaaatgagcatcttagaatcactgaaatactgtgttatctctaattttttttttttttttgtagacagggtctctctctgttgcccaggctagagtacagtggcacaatcacagctcactacagcctcaacctcctgggctcaagcgattctttggccttagcctcctgagtagctgggaccacaggtgttcaccaccatgcctggctactttttaaatttttatagagatggagtctcactatgttgcccaggctggtctcaaactcttggactcaagcagtcatcctacctcagcttcccaaagttctgggattcaggcatgagccgccatgcctggccttatcgctgatctttaaaacatactgtcaactaggtataattgtatcatttcatttaattaaaacatctttattaaacagtagtaatggtaattatatctaacaattattgagctgttatttgtgctaggaactgttctaaacattttgcatagattctcatgtaagcatcccagtggtgtcctatgagatagctactattttgatccccattttattgatgaggaaactgaggcacttactaagccataatgagtaagtgacagcttaaagtaggattcaaccccaagttgaactgaatctaaaggtcaagccttttctattcagataggttgctctttcattaatgtggtgagtagtaagagctaataaatattgtactgttttcagaagaaaattaaatacttgttttgaaggcggaggattaacatgtgtattagtctgttctcatgctgctaataaagacataccctttattatatgggtaatttataaaggaaagaggtttaattaactcacagttcagcctggttggggaggcctcaggaaacttaacaataagggcagaaggagaagcaaacatgtccttgacatggtgtcagcaaggagaagtgccaagcaaaagagggaaaagccccttaagaaaccatcagatattgtgagaactcactatcacaagagcagcagcacgggggaaccatcctcgtgattcagttacctcccactgagtccccctcaccacacgtagggatcatgggaactacaatttgggatttggttggggacacagccaagatgagatttgggtggggacacagccaaaccatatcaacatgctatttaatgtttataattttatgaaccattgtatgttttgagacagtgcactacagtttataaaaagtcctgtcactctcataggacggctctacatttggcctgtgccaatggtcatccagaagtagtaactctcctggtggacagaaaatgccagctcaatgtctgtgacaacgaaaacaggacagctctgatgaaggtatatagtagccagctctttcagcatsagatggatttgacttaaatacatagaatgaaaatgaatttatctcattaaaatataaytaattggtraaacctgtggagtgtttattttgcattcctagaatttatgatctgtttcttggtctaatactcccaggctgtacaatgccaggaagagaaatgtgcaactattctgctagaacatggtgctgatccaaatcttgcggatgtccatggcaacactgctcttcactatgctgtctataatgaggacatatcagtagcaacaaagctgcttttgtatgatgcaaatattgaagcaaaaaacaaggtatagatcaaccaactttatttttacagtatttgaartgcrtttgtttcaacagtgacatatgtaagggttagttttctgtatttggaagcgcaagcattccctgactgaaagtattttaaaataacttaattgtctaagattttactttaaatgttgatacttttaaagaagcattaggcagtacacctttcttttatgcatttattgtaaatacttgtgaaaacacaatttgttaaaggcaaatcttttttttttttgagacagagtcttgctctgtctcccagtctaaagtgcagaggcgcgatctcggctcactgcaacctctgcctctgcctcccgggttcaagcaattctcctgcctcagcctcctgagtagctgggattacaggtacccaccaccatgcccagctaatttttgtatttttagtagagatggggttttgccatrttggccaggcgggcctcgaactcctgacctcaggtgatccacccgcctcagcctctcaaagtgctgatattacaggtgggagccactgtgctcagcctagaagctcttggttttgatgggaaacaatacaatgaatacaatatgccatgccaaatgatgtgatagaagcaaatattcttagaaccggtaaaaatttgaagtgagttttggagatgagtggagttcatgtggtgaggcagaggaggggtgtttccaagggaagcaagtgttttttatttgttttctattttatatgtttcagttcaaaggatctgacatagagttttcagttcagccgagaattatgtaattttatgcattttaacttgtttttgctgtcttacaggatgacctcacaccacttttacttgcagtaagtggaaaaaagcagcaaatggtggaatttttaataaagaaaaaagcaaatgtaaatgcagtrgataagttggaaaggtacagtagctggttttgttttggatttttaaacttgtatgtttaaaagtttttttagatctgtgttttgcatgttacaggttttttaaacctgcttgttcttgaggggcaacagtgattcgttggtgtttctcactcaagtcagaaatattaatttaataagaaggttaacataattatggggatatagtgmcaaatagcaacacaaatcagttaggaagaaaagcagttgcttggattgggcaatataaaagaagactatacagtaggattcatcttctcttataatattgactgatgtttgttatttgtaaacccatgtttttggccatgtgatctgttagctaaagaggtttcttatcagttttattagttttataaaatgcggactttaacttttagtttacttttttttttttttacatggagtctcccccgtcactcaggctagagtgcagtggcgcaatctcagctcactgcaacctccacctccygggttcaagcgattctcctgcctcagccccctgagtagctgggattactggtgcacaccaccacayctgactaatttttgtatttttagtagagatggggtttcatcatgttggtcaggctggtcttgaactcctgacctcgtgatccacccgccttggccttccaaagtactgggattacagrcrttaagccactgcgcccggccactttttaactcaatattgaacttcttcacccttttatggtattgttctaacctctgcttatgtacttttccttcagaaatgctgtgttaaacatcaatagcagtttttgtcttttgagtgcctctttgctttaagttgctttctttgaagagtacggatgttaggttatccctaggtgattgttgatcgctattgccagatactatagtttcattatttttttccttttctatttctagtatattttgatgtttttatttttaattggtatgggcaaagggaagaaagacagcttttattggataaacttttcctttattgaagacaagccatagatgggtgataaagagaaaagaggctttaaattcacacragactggatttaattccttgctttcccacttgttaagtgtgtaagcttggggaccttacttatcaccaaatatgttttctgatataaaaagggggatactaaatatatctcaaggtggttgtatttaaataagattatatagcatttgattcagtgcctagcccacgcttatcagcatcattggctgaaactactgtgactcctattattacctttwttattattattattattatttgagacagggtctggctctgtcacgggctggagtgcaatggtgtgatgttggctccctgcaacctctgtctcttgggctcaagcaatccccctgcctcagcctcctgagtagctgggactacaggcatgtrccaccacatccagctaatttttgcattttttgtagagatgggatttccccatattacccaggctggcctcaaactcctggactgtagtgatccacccatcttggcctcccaaagtgcttagattataggcatgagctgctgcacctggctaccattattattaatactgttttaagcctgcagatagctcttatctgacccctagctgactgcaattgtaatatatcagactagagaagaaatggagaattcttcatttaaatctttgcctactttagataagtaaactcagcataggtttttgccatgaaaggacttctagtatgtaataccccagtgagacaagaggcctcttttttgtcccttccttttagccttggtggtaatttacaaagatgagcacttgagcacccaagatgcttatgtctattagtagatgtaaatagttaattctacacagacaggcaagatactaaattggtaaagyatatcaaattatctgtgcacataaccttattaaagttcctggggtgaaattacctcttattttatttttatttatttattttttgakatggagtcttgctctgttgcccaggctggagtgcagtggcacagtcggctcactgcaacctctacctcccgggtttaagcattttctggctaatttttgtrtttttagtagagatggggtttcactgtgttggccaggctggtctcgaactcctgacttcaagtgatccacccgctttggcctcccaaagtgctaggatcacaggcatgagccaccatggctggccatatctctcttattttagaacacccctcatgcccactatattttatgartcatcaagtatagtcaggctttttgttcagcagagttttgatgttttttcttaatatgtctagggatggactacagaaaaatatgctgttgttagtggtttagtatgtaaatgtttacaataaaaggctagttaacactaaatagaggtttaaaataattatcatgattgcatcttatacatcagttgagatttcatagtttgggtcaggtaatttatggcagtgaattagcctacttcatcagccagaaatcaagcaaaaggctagactagttagaagcagcaatgcatgtaggattctttttgttttgttttgtttctgagacagggtctcactctgtcacctgggctggagtgcaggggcacgatcacaggtcaccacagcttcaagccgtgggctaaggagattctcccacctcagcctcccaagtagctgggactacaagcacataccaccatgcccggctaattttatgtattttttgtagagatgagttttgccatgttgcttagggtggtctcaaactcctaggctcaagcaatccatcaaccttggctttccaaagtgctggaattataggcatgagccactgtgtccaaccgggtatagaatttttttatctcaggacttttacgaacttaatccataggggtcccaatatcattcrtttcattccaattataacccctatgcatgggataaaaaatactatcacatgtttaatttttctagttggttatttgagtcttgaaatgtccagtttggcagataatcttgaactgtccccctgggggccatctgctatgccctctgccttgaatttttcaggaaccgaaggggttccttaagtccaaggaagacagtcctcttttataaatcaggaggggacaaaggacattctaatcattcttttgttaccagtgattytgttgctgcattgttgccactgagactggtcctgcagtctggaaatgattgacctttgctacaaggatgctcttactgattgagatccctcagccttcatggtgatccataggtagacttcaaagttaggactttttttcagttcacatacaagtgtttatatgcccagccattgttcctaaagcaccagcaccctgctctggcagctggcctcctggaagctttagccacacacagagtgagcaaattgacccttccacctacactcaaaaccttatatggagaccatatcttagccttgacttagccttgaccttcatggtaagttacccatggaggcttttgtttgtcttttctctagcaaatattagttgggattgttctcaactgtcaggttcaaataatgttgcaggaagagatcagagtttctttttttctttgctaccaggaatgtactccaaagcccctttacattctgtgtagcacattttcttaggtagtgaaaggttccatattgtccttcgctggagtagtggccaccaacttgtggttgacccctaaagtgatctgtttttcataatgaaaatctcccaagctgcttgcatctctaccttaagtttttaaaatattttcagattgtacctcacaaggaagccattcaacagaattctctgagcgtaaagtaggttagttggattgaacagagctaagcctgttccatgactcatcagtatccatgtataaaagtcgggttttgtgcttgcttcagcagcacatatactaaaatttgaacaatgtagagaagatcagcatggcccctgtataaagawgacacacacattcttgaagcgttccatattttgcacagtccctggaaggccattttactatttgctaacagtgtgagtcaaagcaaaagggtggcacccagtattgaaattgtgattttcatgacaaaaatattcatgtaaggtgatctgtgaaatgagaatggagctaacacatgggatgttacgtgcaaatatgttgttagtaggtatcacagaaatgagaaaatgtcaattcacatctccttcatggaacttaaaataaaagtgaggccaggtgcagtggctcacgtctttaattccagcactttgggaggcacaggcaggagaattgcttgaggccaggagttcaagaccagcctgggcaacatagcaagaccccattggtacaaaaaataatgaagaaaaattagccaggtgtgatggtgtgcacctggagtcctagctactcgtggggctgaggcaggaggattgcttgagcccaggagttccaggcggcagtggattatgaccatgccactgcactccatcttgggtgataraataccttgtctctaaataaaagtagagttttgttttccacgtcagttggaatgatgaacatgaagattaagcaccgttctaacaaagatctgctggttcagagtttgaggaggtagagaagcaraagtcgttgtctaaaccaggccttaacatctgttagttttctgcccttgctgtgatcagttagttcagtaataagggacaattatgttatctaatttaatgagatgctatatttataagtgaattcagttacaaattatgaaattcactgggattggaaaccacaaagaatagaataactaataaccaaaattaggacttagtaacattttctgaaaatggcaacatttgaatattagaacctttggagaaacatttaattgggttttatttgggattccaaaatagttttagcaataaaattcaggaacaaattattccatttctttactatttctctgagcatttgaaaagtgttatcttgttaaatctttataaccctagtgaaataaggcagtaaaatccttatgttttagaagaagatgttgagcctaagggaagcctcttgtccaagaacaaatagctgttggttacagagccaggacttcttctgggttcaggacactttccattatgtcaagctaactctagttaatttgctgagctccactgccctcacttcataactatttcactttaatctttttctcctttaatttgaagcttaataagaagtttgggctgggtgcagtggttcacgcctgtaatcccagcactttgggaggccaaggcaggcaaatcatgaggtcaggagttcaagaccagcctggccaacatggtgaaaccctgtctctactaaaaatacaaaaaaattagctgagcgtagtgacgggtacctgtaatcccagctattcaggaggctgaggcaggagaatcacttgaacccgggaggcggaggttgcagtgtgccaatatcataccactgtactccagcctgggtgacagagtaagactctgtctcaaaaaaaaaaaaaaaaaaaaacaaaaaagtttgtagagcttacatatttgaagtgtatgggataattaaaattctgctgttagctctgataatggctgaaatactcaagattttgagatatttggtaaatattttttgtatcagtattaacataattttgttacatttttctatacatagcagtcaccaactaatttcagaatataaagaagaaaggatacctaaacattcttctcaaaatagtaattcaggtaagacttccaatagtgaatttctcttggtaatagtaccatggataaaaaagtaaaagtaaggaagtgttgatcacagaaaagcagtttaaaaaatcagtgtataaggtgcatgtgtattttttcttaatttctcttggtaatctagaattcagaattatttaagaagttacatgtagatatttatgatgccaaatggtactatctgaaaaaaattcatttacttaattatcatccctaaattcctatatgaaatttttgtataaataraaaaggtgtttaagttagtatgttatgtgtttcctttataattacattataatgaactagacttgttataaaaaatggatcttctatttaatttttataataaatggtttgtgtttattaaatgaatattaattacagttgtcccttgagcaacgtgcatattaggactggtgatccctgtgcagctgaaaatctgcactaactttcaagtcccccaaaacttaactactaattgcctactgttgactgcaagccttatgataatataaatagtcaattaacatgtattatgtatatgtattatataatgtattgtagtaaagtaagctacaagaaagaaattatgattaagaaaatcattaaagaagaagaaatgtatttactactcattgagtggaagttgattatcatagaggtcttcatcctggttgtcatcatgttgagtaggctgagaaataagaggaagatgagaggttggtcctgctgtcttggggtggcagagatgaagaaaatccacatataggtggatttgtgcagttcaaacctatattgttcaagggtcattacatagtgatttgggtcactaaaaattaactatctttaaaagggggaactcaacagtacctttctggtaccataaacaaatggcaataagaactgcagaacttagccagtgtgcaccaataccaataggaaattattttttaaagatactgaatacagaagtcagaaaaacaattccttgttgagaagcacaagtcatgttacttattcttataccaacaaaatcttattattactgactttattcagcctaagttgaaatagaatgagatacatttacttcgttagaacaagatgtgttcttctggccaggtgcggtggctcacrcctgtaatcccagcactttgggaggcygaggcgggtggattatgaggtcaggagttcgagaccagcctggccaacatggtgaaaccccgtctctactaaaaatacaaaaattagctgggcgtggtggcgcacacctgtaaccccagctactcaggaggctgaggcaggagaatggcttgaacctgggaggcagaggttgcagtgagccgagattgtgtcactgcactccagcctgggtgacagagcgagactccatctcaaaaaaaaaacaaacaaaaaaaacaagtgtgttcttctgtctgctgaataattgtcatgataacagtaatcttgctagaatgaaacactctgttatcattagccaaaagattatcataatgaatattcaaatatctcaactctgcgctcaacaaattataatgaaagtacaaaaatgtccaatgggagactctaaaaaaaaacaggaaaaaaaaagtaagtacagaaattttttttttttttttttgaaatggagtttcactcttgttgcccaggctggagtgcaataatggtgcgatctcggctcactgcaacatccgcctcctgggttcaagcaattcttttgcctcagcctcccaagtagccaagattacaggtgcccgccaccatgcccagccaatttttatatttttagttgagatagggttttaccatgttggccaggctgatcttggaactcctgaactcaggacatctgcccgccttggcctcccaaagtattgggattacaggcttgagacaccgcacctggccagaaatgtttcgccataacaaaaatgctactatgctacctggatgtgacaccaaatgcattttataatctgaactgcatgaagacacatttaatttggtacatatttatcaaagaactttcataggttaggttttgcaagttgcaagaaatatgaatatggaacagattagttttggtctttaaagttttcataatagaatagagctgttctatttcatttgtgttttttcaatgaaagtattttaattgatttctataattgtttacttagcaaataactgtcaagtatcttttagatactaagcatttttctaaygttacagaatgcaaacattttatttcttttttctttttttttttttttttgagatgtagttttgctcttgttgcccaggctggagtgcagtggtgtgatcttggctaggctcactgcaacctccgccttctgggttcaagcgattctcctgcctcagcctcctgagtagctgggatcacaggtgcgtgctaccatgcctggctacttyttgtacttttagtagagacggggtttctccatgttgctcaggctggtcttgaactcctggcctcatgttctgcccgcctcagcctcccaaagtgctgggataacaggcatgggccactgcacccggcctaggtgctatgcaacttaggtcatagctatgcaaccctgccattgtaatgtgaaagcagtcataaataatatgtaagtgaataacatgactgtgcttccgtaaacctttatttacaaaaccgtatggctggctggatttggcttgtggcctctagtttgctggcctcttatatacaggatagatggaaggtaaccatgtaaagggattgggaaacaaggaagcttttgcagtagttaaagccatagtttttttgtcactaatccttggactagtatttatccattatgaggttctcaccatccatggtgaaatacataaagttaggaagctcagtttattaattttattttatttcattttatttattcttttagagatgaggtctcactatgttaggccaggctggtctcaaactcctggcctgaagtgatcctcctgccttggcctcccaaagtgctgggattataggcatgaggcaccatacctggccagtttatttattttaaaatgttggtctttttcttcatgttataacttttttattagttttgcttaaattttttttttcatttaagaaataacattaagagtgcatgggttttttttccttgtgaaagctatcagttaagagtgcatgtttaactaggaaatataaacatattaagtaaatattatattaagtaaataacacattaagtaaatatgtttatatttccaggagtagtggaaatgtaaggcaaaggcagaagagaggtacagttaataggatttagtgattattgagtgtaaaaagttagggggcagagagaaatctcagctgattcctaggtttccaggttgtgcacaagcatttaaactggacatgaggagtaggaaattgtcaggtgagtagagaagagtggcaggtctgcagggaagattaacttttttctatacatgtgagtataatggaatatttatagaggatattaattctattatagtctccagatatggtcccagagggatactttgtaacaaactatcagtcttatgctttaaattttatatatttttctattgttgatttaaagtgtgttttacttttctctttaatagtggatgaaagctctgaagactccttaagcaggtagtattttacagatttttaaaaatatatttaaaggaatacagagaaaagaaactgttgagtgccctactctgggtagacrccrtattatgtgcttctccatatagtygtcccaacagctttgcaaagtatctgtgctatattacaacccaactgtgtggttcagagaggttgattaattggcccatgacctcacagtgagcaagcagctgacccatgatttgaccatcagcctgcttggctcccaaatcccttctcttgcccctcarcatagattgatagagacctgtgcggcgctggatcaaggtacaggtccaaatcagatcaattcagagacctacatttagttctatgttaactctcagagtttttcttaggagcctggttagtccaacaatttgtcctaatatgcttgataattgcagtggtaattagtactttgactttatcatcaaaggttttaggccagatctcacttagctgtggccacagggccatacattttacataagcagaccacacaagtcctataaaggaattattttactgtaagtgaaaactatttacctatagaccatattgtgttaattatatttagcatccagytagaggatatttctggtttatttctctacctactgacttcccagtttggttttccctttaggctagtactctagctccatctgagttgctggaaaggatatgattttgtttctctctctccctttttttttttttttttttttttttaaataactgcatagggctgggcgtggtggctcacaactgtaatcccagcactttgggaggccaaggtgggcatatcacaaagtcaggagatcgagaccagcctggctaacacggtgaaaccctgtctctactaaaaatacaaagaattagccaggcgtggtggcgcacgcctatagtcccagtactcaggaggctgagaaaggagaatggcttgaacccgggaggcggaggttgcagtgagccgagattgcgccactgcactccagcctgggtgacagagcgggactctgtctcaaaaaaaaaaagcatagtattccatggaatatttataccacattttctttatccagccaactgtgttcctattatttttttccatttctgccagctaagtattcctcattttcctatcaacagaatcaaaagcacctagaatttcaggattttaaggaatcagactaatcagaatgccatctagtacttcaatctgtgtttaacatcttggtcaaatggttcagatggagaacctgaaactcaaagagattaaggggatttatttggatatgatattcaaactaatttcagagcccagtactcttccttctttatcatcctacaggttaatattttaataatagaaagggtgagtggatctagtgaacccagcggaaaaggaaagaatggaattagcagaggaaggccaggtttgaagagaaacagcactgggttggataggaaccgggcttttggaaaagagatcagaatattggggtttttgacaagttcgataatgataaattactggaatgaaggatacaggatgtttggaattatctagaaaggcatattaaaatagggrgttcaggggagtcctgaacaggttgttgcttttttatataattggaggaactgacaaactctcaaggtttctactgaaaaatgttaaaataatttgagccactgggaagagtctctacagccagtaggaatgtactataactacttctgcctcaacttatcggtggctttgagcccctcaagtactttggagctggaggctgctgaactacatagatctgtggcccagggcaggtgtcccctcacctctgcctcctttcccaattctctgatgtccttctcatggacatgtagggtagggcaggggtaggattagctggcaagtcagtcatggagcaacccaaatcatggagttgggtagttgttaacatgcctgtgctgctggcagatgacagagactccatttagcttgttttccaggagcagagatayagagagcttctactcttgggcatttgagaccatcctttcaggaatttgtgccttcataggctgaagacttaaaggttggagatgctatggagccctgcagaagagggatctgtaagtgggagcttataggaaggaaggtgtttagatagtacttagggaaatataggtacaactaccaggactctttctccagcattctttctctttaggtatctgagtgcctgtaaagatttttaagggcttgctagtttaaggcaggacctctatagggaaaataattggattttatwacttttaatgttttaatatttctggggtgagtagtcccaataacagcatrtacrtatgtgttttgacttttgcccatctagctttcaaacatttcacacatttcaggggactccttatactgttttagggtgaagggaagcaatgaggccttaagtggttttcatgttgaagaaccaagactgccatttttgagtgacacatattagtctttgaaatggagatagatagtggagaagggacagtgtatctttctaccttgttttatgtatttatttatttatttattttattttattttattttattttttttgagacaaagtcttgcactgttgcccaggctggagtgctacagcatgatctcagctcactgcaatctctgcttcctgggttcacacaattcttctgcctccacctcccaagtagctgggaccacaggtacacaccaccacacccagctaattctttgtatttttagtagagacagagtttcactatgttggtcagactggccttgaactcctgacctcgtgatctgcccgcctcggcctcccaaagtgctgagattacagggatgagccaccgtgcccagcctatttatttatttttatttttttgagacagtgtcttgctgtgtcacccaggctggagtgcagtggcatgatctcggctcactgcaatctytgcctcccgggttcaagcaattctcttgccccagcctccttagtagctgggattacaggcacatgccaccacgcctggttaatttttgtattttagtagagacagggtttcgccatgttggccaggctgatctcgaactcctgggctcaagttatcttcctgcctccgcctcccaaagttctgggattacaggcacgagccaccgcatctgatctccaccttgttttagattatcaggtttgtgctggttcaggtaacgaaagttatatcagccattaattggattttcagttcagccttcgggacaatttgtgaagacaaagtattsccaggttctgccattatcttggctgtcactattagttatagaactaaggttgagtctttatygaatattttatagtttcggagaggtagaggcagcaattggtaactaaaatatttttcaaaaacaagatcaaattttaattagatcaagaaacatcatttaatatgcagacagttgacctttcaccaggtttttgtttttttggwgggggcatccagattgaaaattgtaagctggtttttgttttgtttttaaagaaakgaattcactcatttttctatatttttgttctaaaggctttctggcaaaccgggtgttgatgattcatggcctacctcagatgacgaaracctcaattttgatactaaggtaaagtgctctctcatgaacttaattttcttactctgaatctagtttcgtatagtattctcttaaaattttgcagtggtctacttatcattgttttctgtttgtaatggaaaggtggtcaggggaagccattttatagaaatatggccagttgaattcttttttttttttttttttttactttggtaaataacaaaggattgataagtactttgagggagtggggattgcaaaaaaaagaatatactggaaaatacatagtgacaggaaaattatattgggaaaagttttcctacaatagaggaaatatgaaatttggtcaaagtttatatggataagcactcctactatgattttaaaatctttttccatttttctctctctgtagtaagaatgttacagctttcaggtagtagtagatgatcatttttaactaattggatgacttaaaattaaactgtttactacagaagtattttttaaaaaactggttgtaaatactaatcagtattatcagggatatcctatgaacaaaagtctgttacaggtctgtgtttctcagtgtgccttagtatacttaaagcctttccttttcttccttgacttaagctcacactcgaatggtcatgcctctattttttttctccctactctttcatcttttaaaaatgatttatctcagcctaaatgtttccttgcagaatacatttcttcagttctgttatttcagtccatgtctgtctccatttgcagcatatttaggtgcagctttctatttatgtagttatgtgtggcttttgttcagcaatcattgccccacaaggattatttttgtttttttctctgtttcttgtaaggagctgaatttatacaatcatttatttttagctttttgacagaatagaagcagcctatactatttgcagtgccaacccactttcataaaatatactaagaacaaaatgctcacagtttttctcacaagaggtaattcatgcaaatataaatcatgcatacacatttcagaaaataatatgtaattaatttaaatgttttaatgtttgacttttataatactctacctaggaaaaaattttcattttaggctactgtggttaagaaaataatcgaacagatatcatagtatttatataataatcaattaggggtaaggggagtaacctttggaggatatctgtatcatctctcataatccttaccccatgagaagatgtagcaaagggcagaactgaggtttaaatctacatctgagtgactccaaaatctttgttctttgtgttagatcatgtagtaatggtgactatctattacgattattttatcaaatttgatacttgtttttttaaaacttgttattcttatttttgttttctagaatgtcccaaaaccaagcttagcaaagctaatgactgcttctcagcaatccaggaaaaattgtaagctgtttgaaaactgcttattcttgtgttattcactgattcttaattacatatattttcatttactctttattttgtttttactgtagtagaagcaacatatggcactgtgagaacaggaaatagaactttgtttgaggatagagattcckatagtcaagatgaagttgtggttgaaagccttcctacaacatcaatcaaagtccagtgcttttctcatcctacctatcaatcacctgaccttcttccaaaaccttcccacaagtcgttagcaaaccctggtcttatgaaggtaagttgttttttaaaaaacttttttcatgtacccttcccctgccccaacaatcctcataatgatgcatctattgagatgatcatacagtttttgtttctaattatgtttatgtgatgaatcacatttaagacttgcatatgttgaaccatccctgcatccttgaaatgaaacccacttgatcatggtgaattattactttgtgatgtgctgttggattcggtttgctagtattttcttgaggatttttgtatctatattcatcagagatattggtctgcagttttctttttttgttatgtccttttctggctttggtattagggtgatactggctttatagaatgagttagggaggatttcccccttctcaaccttttggagtagtttcagtagaattgttatcagttcttttttgaatgtctggtagaatttagctgtgaatccgtgtggccctgggtttttttcttgttggcggttttaaaattactgattcaatctcactgcttattactggtctgttcaggatttctattttttcctaattcaagctagaggagttacgtgtttcccggaatttttcagtttcctctagattttctagtttgtgtgcatagaggtttttatagtagtcttgagctatcttttgtatttcggtggtatcagttatactgtctccacattcattcctacttgagcttatttgaatcttctctcttttcttagttaatgtagctagtggtctatcaactgtgtatcttttaaaaaaaagctactgggcacggtggctcacacctgtaatcccagcactttgggaggcctagacgggcagatcacctgaggtcaggagttcgagaccagcctggccaacatggtgaaactccgtctctactaaaaatacagaaaaattagccaggcatggtggtgggtgcctgtaatcccagctacttgggaggctgaggcaggagaatcacttgaacctaggaggtggaggttgcagtgagccaagatcacgccattgcacttcagcctgggtgacaagagtgaaattccatctaaaaaaaaaaaaaaaccaaacaaacaaaaaacaaactttttgtttcattgatcttttatattgtgtttttggttataaatacatttagctctgctctgatctttgttayttcatttcttctgctagctttgggtttggtttgtccttgtttctctaatttcctgaggtgtgatgttagtactgatttgctgtaagaggttttgataatttgtagcactgttatttatttcaaaacattttaaaatttccttcttgattttattattaactccgaaatcaggagcagatcattaagttaaatgggaattaccatatrtttgtataattttgagggttccttttggaattgatttctatgtattctgctgtggtctgagaagatacttcatatgatttcagttttttaaaatttattragacttgttttgtggcctatcatatggtctatcttggagaatgttccatatgcytattaaaagcatgtatattctgcagttctcaggtagaatgtttggtaaatatctgttagattcatttgttcttgagtgcagtttaagtccaatgtttctttgttggctttctaccttgatgacctgtctagtgctgtcagtggagtgttgaagtcctgtactattattgtgtggctatctcttttcttaggttttcttaggtctagtagtaattgttttattaatctgggagctctgaagataggtgcgtatatatttaggattcttagatcttcttgttgaatcgatccttttatcgttatatagtgacaatttttatctacttttactgttgttgctttaaactctgttttatctgatataggaatagctactcctgctcacttttggtttctctttgtgtgaaatatctttttccacccctttatcttgagagtataggaatccttacatgataggtgtgtctcctgaaaacagcagagaatttggcttgtgatttttaaaaatccattctgccaacctgcatcttttaagtggagcatttagaccatttacttcaatggtaatattgagatctgaggtactgttccagtcattgtgttgattgttacctagtgactttgtttcctccattatgttattgttttataaactttgtgaattgtatgctttcagaagtttctattctgttatgtatcaaccttttatttcaacattgagaacttttataaatatttcttgtagggctggtctagtattgacagattccctcagcatttgcttgttcaagaaagactttatttttccttcatttatgaaacttagttttgcttgatacagaattcttggctgaygatttttttcctatttaaggagactatagataggactccagtccctcctggcttgttaaggtttctgctgagaagtctgctgttagtctgataggttttcctttacaggttatttttaaaaattctttttatttaatcttatttatttattttattttattctttttatttttgtctgattggattaatttgaaagccttgtcttcaaaccctaaagttcttacttctatttggcatagcctactgttaaaacttcccactactttttttcttttcccccctcgagacagagtctctctgtcacccaggctggagtagtgtgatctcagctcactgcaacctccaccccctgggttcaagcacttctcctgcttcarcccccctagtagctaggattacaggtatacgctaccatgtccagctaatttttgtatttttagtagagacagggtttcgccatgttggccagggtggtctcaaactcctgacctcaagcgatccacccaccttggcctcccaaagtgctgggattgcagscgtgagccaccatgcccagccccccactacattttgtagttccctaaatgtgtctttcatttccagaagttctgattggtttttctttaaaatatctttctctttagaaaatttttcattaagatcctgaattgtttttaaaaatttctttatgttggtttttaccttgcccttgtatattcttgagtaacttaataatcaaccttttgaattctttatctggtatttcaaagatttcatcttgttttgtatccattgctggagagttagtgtgatcttttagggggattatagaatgctgttttttcatattaccagaattatttttctggttccttctaatttgggtggactatttcttgtaattatttttgaatttatttttgatttgactgggttttttttwatttatttttccccccttgaggatgtgacttgaatgtctatagtttattgtcacctagcttcagctctgggtgctttcagtagtgaagaccttgtagtagtgagctccttcgttacagagaatctttgtgtgatgattttctcagatgttggtagtaataacgatgtactgggtctgtgagcaggtttactgtttcctgtgggactggaatggcagaagtctcacgaatcttatctcattctccagtgttgtgcacttaaaaattcagatgcctactctgtttcctaaaacatttttttccccagtattttatttactggattgaacatttcaggcctcaggctgaaggagcccatgggtaaaaactggttgcagctaaagcaggtggataaatgcagtaccccaagtttggccttgacaaatgtggcagggggagctctcagtgatatgcactaaagtgttttcagggggaagggagggagccacaggaaagcagtctgcctcccagtcacactcttgaccaggtgttccagctaatcagatcagacaggcaccttttttaatcttcaggaatactgatgttccatatagagagggattgtggtcctcatgcaagcctgaacgtggagggcagtcctgtgggatgcagtcaccctgaagtgcttcaggaaggctgtctacagatgcacgcacatcatgctgtcgtgggaaaagccccagctgtgtctgcagtggtgggcaagagggagaagttctcttctccaagacccttcacatgccccagggctacctgttaagggaaagccttagattttctccactgagcccagcactgcacctgtccctctgctgaaggaaacttcccacaagcggaaggcctgcagtctggtttctttttttcccatggggtgccctctcaatgtggtgcattccttcccctgggagtagcagcccctgagaacctggctgctgtgaatcctgctgctcctctgggtctagccacccagtgggctgccatactccagggtggtgctggggaatgtctgcaagggatccagtgagatgacctgtcctcgagtctcccagcagcgggtaccagcacctgctctgatagggtgggaaggggaatgatgtagactctgtgagatttcctgcattacaaatagcctttgtgtgttttttcaaatgccagctgtagtattaatgtgctgggcacatagacagttgcaggacctcctggttagccagaaagatgcaggcagtggtgattaactgaagatgcacagaagtttcctacttccttggtgctgtgtcattgtgcttgcagacgttgtgatgggctgtgcttgttgagttttagccaggaggtggcgcttgcaaaagagcgccagttgcagtggtagtggtgggatttgwttgccttaggttacccaagggaaatactctggagtctcagacaatggttggggccatggatctcccaaaagtccctgtccattgtgttatgctaccatggcaggtggagggcaaagccgggtgggggctgggtgaggccagtccacactctggctccccacatgtgggtgcaagcagtggagcggccccattggggatcagagggcagttccctggctgctagagtagtgttccagggagaagctcagctgcctctgctgcacaaaagaatccacagaaggagctggggatatcaggcaacagtatgtctcatgcagcacgggcttggcaaggcaggtctcacgcctatagggttctgctggcagcagcaagctggattccagtcagcttgtgcttggaactcaaaattgtcccaggccataagccttcctgagggacagaaaccgcactttcaagccatgcccctcctgatccgcctgtggaacaaggggcatccagctcctgcagcctgggcacacttcttgttcaccctgtggttctggccgayggggttatccccactcaagatgatatggcagctctcatttgggagcttctctccacctgtgatggcagcctgggtcagctggctgacttccggcaggacgcctgtgaggtaggatcaagaatggcttccctctgtccctcctggagtcagggaatgcatgcaatgtatatggggatgccgctttttcttgtgtgcccccactgctcactcagtcagctccagcgcggggggagttagggcttccccgtggcctggattgccgggcttcccagtggaagtgtgttccagggaccrtctctcccgttcacactctagaggctcacgattttctacctggttcatcgtgtacactgctgcccgcctgttctttcacagggtctctggtttctttaagtttttctgttaaggtcctgtgttgcttcttggaaaaaagtttgcagcgcaaatccctacacactattttgcctttccaagagggagagtcttggtcacagtgcctcccatctgtcatcttgggaaaaaaattagggaaaattaattttagtataagcattgttagagaaatgaatgtagtcccggccgggtgtggtggctcatgcctgtaatcccagcactttggcaagccgaggcgggcggatcacgaggtcaggagatcgagaccatcctggccaacacggtgaaaccccgtccctactaaaaaaaaaaaaaatacaaaaaattagccgggcttggtggcgggcgcctgtagtcccagctcctcgggaggctgaggcaggagaatggcgtgaacctgggaggcagagcttgcagtgagccgagatcgcgccactgcactccagcctgggcgacaaagcgagactctgtctcaaaaaaaaaaaaaaaaaaaaaaaatgaatgtagcaattgtttatttctgcaatattctgatttatcttgtgctaataattaatatctgtrtgtaatggacacatacgcatacaccaaatgaaagcggtcaaaatttattattgttttctaaaataaactacctattatagaatcataaggaaggaaagattgccaagggagtttacaaaattatctctaggctggacatggtggttcacacctgcaatcccagcactttgggaggccaaggcgggcagattatgaggtcaggagttcgagaccagcctggccaatatggtgaaaccctgtctctactaaagatacaaaaaattagccgggcgtggtggcacgtgcctataatcccagctactcagggggctgagtcaagagaattgcttgaacccaggaggtggaggttgcagtgagccaagatcgtgccattgtactccattctgggcgacagggcgagactccatctcaaaaaaaaaaaaaatctctagaagatgattttttacttttaaaagtacctccagcaatgaggacattttatattctcgtcaggaagctttgttaactttagtattcatagttgttaaaccttgctcmtaaattcattcatctctaaaactcagaatcctgttgacttgattttttagtccttttctgtgtgtgaatactggtcttgcttgataatcatagatatatttgaagacttttaaatcttcaacttggataatcatagctttcttttcttttgttttttgagacggagtcttgctctgtcgcctaggctggagtgcagtggcgggatctcagcttgttgcaacctctgcttcctgggttcaagcagttcttgtgcctctgcattctgagtagctgggactacaagtgtgtactaccaaacatggctaatttttgtatttttagtagagatggggttttgctatgttggctggtcttgaacacctggcctcaagtgrtccgcccacctcagcctcccaaagtgctgggattacaggcatgagccaccacgcctggcctttttttttttttttttttttaaatacagagtctctgttacccaggctggagtgcagtggcatgatcaaggctcactgaagcttaaatcttctgggtctggcttcagcttcccaagtagctgggaccatgggcatgcaccaccatgcctagctatttatttattttttgtagagatggggtctcgctatattatccaggctggttttgaaccactgggcttaagtgatcctccaaccttgacctcccaaagtgctaagattgcaggtggggcccactgcacccatcctcaaatgttgaaatatgtaattgaaaccttaaatcccatgtttttttccctctttgtcttttcattttcaaaatttcagagttctgtgtaggttcatattatttaattctaccagtttagtgtattttacaaatatttatctacttaagaccatatgcttttcctgaggtcatctacttctactctaaacgtatttatccaaatctgtcttctaaatcccctgggtaggcggggtccagtggctcacgcctgtaattccagcacttgggaaggcgaaggctggtggatcacttgagctcaggggttggtgaccagcctgggcaacacagtgaaaccttgtctctgaaaaaaaaaccaccaaaaacctaagttccctgggtgcctcaaattttatattaatatgtcccaaactgtggacattgttcctgacgctttcctgattctttgtaatttactcagtcctctggtttccccatcctagtaaataacacctaggaagtagcactgaaacattgaagcaggagaaatcttgcactccagttttccctcaaattacgaatccagtcactcaccaagttctttattttctacctgcttatcatttctcatatccttttttttttttttttttgagacgacgtctcactctgttgcccaggtcagagcgcaatggcgtcacctctgttcaccgcaagctctgcctcctgggtttaagcaattctcctgcatcagcctcccgagtagccaggattacagggcatgtgccaccacacccagctaatttttgtgtttttagtagagacagggttccatcatattggccaggctggtctcgaactcctgacatcatgatccgcccacttcttggcctcccaaagtgctgggattacaggtgtgagccaccgcgctgcgcccgacctcgtttctcatatcttattattgcaattcactttttttttttttttaggatgcccaaagaaaatgtgacagttcactttctgacctgtaattttggaataatcttctctatttttgtcctgaccactcccccaacccccatgtttatctatgtttacattgctgccagggtgacctttctgaaatgtatctgtgatgctctaactcacctgcttactgactggatccccagtacatgaaagggaaagttcacattctagcataacacaggtccttggtggtttggcctgatttttctgttttttctcctcatcctgttccctctgactgtgttccagttttaccacattactttggtaccctcatttgtcgtgttgtttcatgcctcatccttttgtttatggtgccctgtctagaaaccttttacattcccactctgcatgtattactctgttgtcacattgctaaaaagaaataccccagactgggtaatgtataacagaaagaggtttaattgactctcagttcctcatggctggggaggcctcaggaaacttacaatcatggtggaaggcaaaagggaagcaggcaccttcttcacaaggccgtaggaggtgaattaatgcatgaggaactaccaaacacttgtaaaaccatcagatctcatgagaaytcactcactatcatgagaacagcatgggggaaaccaccgcatgatccagttatctcctctggtgtctcccttgacacatgaggattacaattcaagatgagatttgggtggggacacagagccaaaccatatcactgcactgggtctacctcatagtatggccctatctttgcatcatttcctgagcttcccaggtggaacttacwgttctcttttgtgcccttactgtcctttattcacctcggttgtagaactagtgaattatacttttctgttcttacttggttttatttatctctacccgcacttgatgaatataggacagaatctgtcttctgtttatatttttagtttttmccaggatagtgcctatgatgtgatagacacataagtgcttattgtcttactgactggtatagtttggaagtgtgtcctgccccaaatctcatattgaaatgtaatccccagtgttggaggtgggacctggtgggagttgattggatcacaggggcagatttctagtgaatggtttagcaccatccccattggtcctgtccttgagatagcaagtgagttctcatgggatctgcttctttaaaagtgtgcagcacctccccaccttgctctcttgccctggctctgccatgtgagacacctgccccctctttgccttctgctgtgattataagcttcccgaggcctccccagaagcagaagctgctatgcctcctatacagcctgcaaaaccatgagccagtgaaacctcttttcttcataaattaccccgtcaggtgtttctttaaaaaaaaaaaactatgcccccatcttggatgaccaggtatttctttatggtagtgcaagtacggactaatacagtgattgaatgggtaagtgaataaatacagtgttttctgaagttttttgtttgtttgtttttgtttttaataggaagaaccaacaaagccaggcattgcaaaaaaagaaaatggtattgatattattgaaagtgctccactagagcaaacaaataatgacaatttgacttatgttgatgaagtgcacaaaaataatagaagtggtaagttagtggatatctctgaatatttttctatccttaagttctattctggggtccagatgtggctcacacctgtgatcccagcactttgggaggctgaggcaggtggatcacctgaggtcaggagttcgagaccagcctagccaacatgatgaaaccccatctctactaaaaatacaaacattagctgggtgtggtggtgcgtgcctataatcccaggtactcgggaggctgaggcagagaattgcttgaacctgggagacagaagttgcagtgggctgagattgcgccactgcactccagcctgggcatcagagcaagactctgtctcaaaaaaaaaaaaaattctattctaagacaaccaattaacatatgcagacccaaatattatattcattttaaaaatatttttcttttgctgtctttcttcatattaccaattttttcctgagactgcatcaaccttgtgaaattctttttttgctattatttttattttattgaaatattcatgaatggagatagacttgtatatgtatttaattatgtatttaaaatttacaatagtaaatgttctcatgaatatatctgtgtatcacatttgatagatatgatgtccgcattaggattaggacaagaggaagatatagaatcaccttgggattctgaggtactttctatggttgttactattattttaaaatataagcattgagtgatgttaaaacataaagagatgctttgacttgacttttttacctctgcatacatccataaggaactactttcttatatttttcagttcataattaataaagtatgtgctaagtatattactgctgcatagtataattctgctaatttgcaggattcatttaagaatccagtgaaggatagtgcaaaaaaaaaaagaaaagaaaaggcttagaagtcacatggaatcagtatgggttctgaagttaagtttatctaaaaactaaagaattatttcaggtcggccaggcaaggtggctcatgcctgtaatcccagcactttgggaggccgaggctggcggatcatgaggtcaggatatggagaccatcctggccaacatggtgaagtcccatctctacaaaaatacaaaaaattagttgggtgtggtggcgtgtgcctgtagtcactactcgggaggctgaggcaggggaatcgcttgaacccgggaggcagaggttgtagtgagctgagatcgcgctgctgcactccatcctggcaacagagcaagactgcatctcaaaaaaaaaaaaaaaaaaaaaaaagaaagaattatttcaggttagcctatggccaagtgtatgattctgtgttatgtatggatgagtaaacggcctaatgagattcagagagaaacagtttggaatgtagttttttttgttttttttttttgttttttgacaacttagaacttgaaaagataatgcctggtactttaaagtattaatatatatttgtatagatctgcagggaacatttcaggagaaagaagaatatggaaaataataacaatttggttgagtggtagtgtaataagtagaaatgattttcaaaatcatttccagtgacaataaatattcagggtactttttgtaaacgtgaaggcagtagtgtcaagaaaagaaagggaaagttggaacaggaatgtggatttctaatttggggtataagtttcagtagacagttactggagatatcctatargaatatagtgaattgacgcttgagaccttcccaatgagattttaaatgtttgaacttgaataaatttctgtttattgagtaccaaccatgtgctaggctgttagacaccgcatatacaaggtgggggcttatgctctactagtaggaactgaaaaacaagtaaaccacaaacacttataagtcactataagtgcttcatatgaagaaaacaaagtattaggttagagaaaattgagggagtttgtagttaggatggggatcaaaatgggagtgaaattctgtagtcagagaagatctttctgagtgtgaccttagattgccaactaaaggaagagaaggagcagccatccgaaaggctagaaggagggcattctgggcagagggcacaatcttcaaatctgttcatcattttgcttttaacatcttagaatgaccaagaagcaggaagcggggtaaccatcatcaccatcatttttattattatagggcatagaaaagaaaatgtgcaaataagtgcctggcacatttcacatgcttaatacataaatgttcttattcttctatttttatgaaggcttgctatacttttttgaaattatttcttaattgggagagtttgtattctgtatcttgtatttccttgcttttctttagacataacataaagcaaaatttttcttactgctttctcattttagtcaaccattttcctatcagtaaaagttgtatcaaaaagtatttagatttttctaagccattgtttacttaaatgaagcagcttctgcagtgttstatttatacttaacagggcatactccagagtttcttatcatgccacatatcttaacactaaatatttctataattagaaatattttaaatgtttaacgctgtactatarcaagtgtattctattttttaaaatacacttttttttccctcttaatcaggcatcccccgaaccggaataagttcagagaagctcccctcttatttttggtggggaatacaaagtagagttaggtcttttgatattagttccttgttgaactgtgcrcgtaagttaatattttgtctgttaatatgtgtccttgggacttccatgtttggtttgcagagtcaatagccatctgaagatgaaaagataagcttaatctagtgagcatatatgaggttctttattgaaatgttttggttttcaatacatgcttatcttatttttaagcctaattgcttttaaaataggaaattcatattatatttgaaagtgattagaaaatctttagcaattcattctttttgtaaaattgaaactcattattgatactaattttaacagagtrtctctgagaattttccacagaagtatgttgatcctttagctggggctgcagacggaaaagaaaaaaatataggaaatgaacaagcagaaggtaagagctatatttcatttttaaaaagccattggacagagtgtttatttaaaaacatgactgttgatatattctaatagccgaagaaaatcacctattaaatgcatagtaagaataaagagaggtaaaattgtgataagttgtatatcttaggtgtcagcaacagattaaattgctagtgccactaagggaactgaattattagatccatttcaaaatacattaagacctgagggagccaggaaataaggaagaggagaggagtaaaagaggacatgagagtgaggaaggcagagagtacagggagtgaatgaagggcaaagaagcaagtgtatgtaatggagagtggtaaaataaaataattctagggccaggcgcgtggcttatgcctgtaatcccaacactttgggaggccgaggcgggcagatcacttgaggtcaggagtccgagaccagcctggccaacatggtgaaaccctgtctctactaaaaatacaaaaattagctgggtgtggtggcacgcacctgtaattccagctacttgggaggctgaggcaagagatttgtttgaacctgggaggtggaggtggcagtgagctgagatcacgtcactgcactccatcctgggcaacagagcaagacttcatctcaaaaaaataaaaattaaaaaataaaataaaataattctttagaaaatggaaaagcagggtattagaaaggtaggaagagtttaaaatgagcttccagtaccaaaacttgtcagagaaatagagcaaaatttacccactcttcccatccacctcactgttgggaaggcaaggatggaggtactggaccatctatggcacatttcatctgctgtagatgaatacaggcatatgtggtcagccatacatatctagaatttaatgtcatagaaaatgttacatcaggctgggcacggtggctcacgcctgtaatcccagcactttggaaggtagatcacctgaggtcaggagttcgagatcagcctggccaacatggtgaaaccccgtctctactaaaaatacaaacattagccaggcatggtggcatatgcctgtaatcctagctacttgggaggctcaagtatgagaatcacttgaacccaggagacggaagttgcagtgagccgagattgtgccactgcactccagcctgggcaacagagcaagattctgtctcaaaaaaaaaaaaaaagaaagaaagaaagtgttacttcataggatagtatctcaaaggccaaaagaaaagaattggaaagaagagagtagggttggttatggagagatcaaggaagccatactatgattaaaagcccactagcaactttatgacttgcaatacaatttcagtttgggggacatagtagggaggagcttgacaccagattccaagagggcaatctaacataaaagaatgtggaagcaaactaagtatggaccagagcttcttaaaatttaataaatcagctggggatcttgtttaaaatgtacattttgattgagcaggcctggggttctgcatttctagtaagttcccacataatgctgatgcttctggtccttggaccacactctgagtaacaagggtatagacttcctttttgagaaatctgaaagaagcgtcattggacaataattcaaggcataacaggatcagaataaagcattatttttcttttatttctgagcatgtttcttccagaggagaagaaacaaagagatggagaaatagaaattgtagatataagataactattgttaaatgaagaggaaagaagtgctgagaatgttccataaaaagaatatagaatgggaagaatcaagaccacagatctggagattacttttgcaaaagaagagagatcgtgagtggggaaagagaagaaagaaagaagttagctaagtcatcttggagttaacgatgaggaaacttgagagaactcatttcagatggattcattgcatttacactcaaacagacgattagatcatttctgctccagagattattgcaagcaggagggcatgctagaattggggtaaactacagtgattcatatctcctttctataactatcagacatcaaagatatatgttgctttggactgatcttggtggtttgcctgtcactcagcactttgggaggccaaggtgggtgggttgctggagcccaggagtttgagaccagcctgggcaacatggcaagactgcatctctacaaaaacatacaaaaattaggcgtggtggtgcatgggcctgtagttcggctgttcaggaggctaaggcaggaggattgcttgagcctgggaggttgaggctgcagggagcaatgagccatgattttgccactgcactacagtccgggtgacagagtgagactctgtatcaaaaaaaaaaaaaaaaaatagatgttgcattgatattaatcaaatgagtttaatttgaatatagaagcattggcttttttcttaaagttgctttttgataacgatagctgtttcataaaatcctttagaggataacattttagaaatgaaaaaattacagttaataattccttgaatactaaaattgttattttaaataaacactgcattgattttaaaaaactgcactaattttgaaatataaaatgttattaatatctaattctgtggcaattaaattttttccttttgataaatattacaatattgaaagcttattatgtattatttcttagatgtgttttatataccttcttgcatgagtggatcaagaaactttaagatggctaaactagaggatacaagaaatgtaggcatgccagtagcccacatgggtatggaaaaaaaatgcgtatttttgttaactgttattctacaagtgtatatccaagctgatcaattcagaacactttctctgatgagaaataagttatatatccaagtaaagtggcatcataactgtgtgcttcctaaattacaggacaagttgaagaacatgataaatacttgtagtataatggtataaatgattctgatgtgttgcattaaagatatgctgtcgcattttaccatcagccttgacatttctcctctcagggtcatgatttgctcctctaattaaagattacttttctccacatcgaccagcatgctcacattggtatatgtgcacttttctattttagttatagtcacttggaacataaycttacattcaaatcataactgcatgttttattaaacctatattcctgtttttttctccagtatacttctgtcatgttgctgtcctaaccaaaataaaaaacatcccaaaaattaacataatcattttcaaaccaagyrtgatgattctggtcatactaacactgcatgaatttatgattgactttgtcatatttatgtataattgattatatgtcccttttggtttttagagtctcctgagagatatcttcacttgaaggtaataagttttatatttttatcttgaattattaagtgcatattgtataaagtatacattatttattaatcatkttgtttcaaaacccattcagcctaccattgaaatgaaagattctgttccaaataaagcaggaggaatgaaggatgtacaaacatccaaagcaggtaaatgttgcaatatatatttaatcttggaaggaagtacgttaaaatttttgaaatatttgaaatgctcacagttttcttattcctaattctttttttctccaaatttgttggaaggatttaaaaaaatttttttttaattgagaccgagtcttgctctgtcacccagactagaatgcagtggcgtgatctcggctcactgcaacctccgcctcccaggttcaagtgattctcctgcctcagcctcctgaaaaatagctgggattacaggtgtgcatcacyacgcctggcaaatttttgtattttaagtagagatggggtttcaccatgttggccagactggtctcaaactcctgatctcgggtgatccacccgcctcggcctcccaaaattctgggattacaggcatgagccaccatgcccggctttttgttttttgttttttgttttgatacagagtctcactctgttgcccaggctagagtgcagtggcatgatctcggctcactgcagcctccgcctcctgggttccagcaattctcctgcctcaagctccccgggcacacaccaccatgcccggctaatttttgtatttttttagagacagggtttcaccatgttggccaggctggtctcgaactcctgatctcaggtgatccgcccgctttagcctcccaaagtgctagaattacaggcatgagccaccatgcccggacagtaattatttttaattactatttggtagacatagtcttttaaaacaacaattctgaaactttttgactttggggtccttttatgctattaaaaattattgcatagaggtaaccaacacgctgaattcgctatcgttcccattcccatgctcttttaaaacattttcctgtgtatgtatacgtctataaataatacatagaatttgtttacatgtcctagaattttatataaatggttgtacattgtacatatcattcttcaactttcttttgtttgcctagcattatatttttcagatctacccgtatcgacacaagtagctctggtttaagttctttatagtattccattttattactgtacatttaattaaactctcttcattcggataaacaataataaacataaaaatcaggccagacatggtggctcacacctgttagcccagcactttgggaggctgaagcaggtggatcacgaggtcaggagatcgagaccatcccggctaacacggtgaaaccccatctttaccaaaaatacaaaaaattagccaggcgtggtggcaggctcccgtagtcccagctactcaggaggctgasgcaggagaatggcatgaacccgggaggtggagtttgcagtgagccaagattgcaccactgcactccagtgtgggtgacagagcgagacaacgtctgaaaaaaaaaacaaaaaaacaaaaaacaaacaaacaaaaaaacataaaaatcactgtgggctgggcgcggtgcctcacgcctataatccttgcactttgggaggctgaggcgggcagatcatgaggtcaggagatcgagaccatcctggccaagatggtgaaaccccgtctctactaaaaaaatacaaaaattagctgggcatggtggcacatgcctgtaaccccagctactcaggaggctgaggcaggagaattgcttgaaccagggagttggaggttgcagtgagccgagatggcgccactggactccagcctggcgatagagtgagactggtctgaaaaaaaaaaaaatcatggtggagttcatttttgaaatgaaaatcatgcttaccaatgaggagaaaagtgatttttaagtggtttgtagctgttgatatgtattatattagaaattaaaactgaaaaatagaaaatacatgcatgtacagccacgcatttgaatagactttagagctatgacccatgaaccattagcttatgatgttacgatacatcctagcttcgaaaaagtctactgtacacttctcagaaaatgagagtgaaaatgtcaaatatattatgcattatgtgacctcttgtacccttgaatggatattggattctagggattcttaaatcaaaatttagaaccacagttttaaaccatatgtatggtttgtagatgtcaaataataaatggtcccttgatgatgaaatggcctttaaagtttcacttctatggtttttacttttttcttttgcttgtcttaaaatgtttaaatccaacaattttgtttataaagaaaaaaggaaaatatttttgttatatactcatttcttgtttcatggcactgtgtactctctggatcaagtgtgcacctagatttattttcacgtgggaacaattaggtcacttaaggccatcattgtttctttcttttttctttttttttttttttgagatggagtctcgctctgtcacccggctggagtgcggtggcacgatctcggctcactgcagcctctgcctcctaggttcaagcgattctcctgcctcagcctcctgagtagctagggctacaggcgcgcgccaacaaggccagctaatttttgtatttttagtagagatggggtttcaccatgttggccaggatgatctcgatctcttgacctcgtgatccacccatcttggcctcccaaagtgctgggattacaggtgtgagccactgtgcctggccaaggccatcattttgtctataaatttctgatgtttacccaaggcttaaaaagtaaattctgaacatagtggtacgttgaggaaagagcatttcattgtaataagtttttatttaaagtttatttattaaatgtttttgtctttagaacacacacacaaacacacacacacaatactgtcatccatatttaaacctaaaatggttagacataaagtttgttcataaaaaaattcatatccctgaagaatcttaattattaataaacaaatctcttatggaaaacaaaataggtaacagacattgctgagtgaatcaaagtaaataagtaatactgaaaaataaaaacagaaaaaaatccgagagatgacagtcagttaaacttctgtgagcaaatggcaagtaaaggacatgtaaaatacaattcaccatggaggagtagtgtgtttgtagcatagaggttgacatgggacttcttctatgaagaaagttagtcaaacctatattatttacattctaataagtgaaaactttattttcagagttttcagattgggactctactagtttgaccctcagtaataagacttgccaaagacctgggactttgaaaatcaatgataaatatctatctgtatcacagtcagtgaccaaaaatcagtcagcatccgcagaactgggacaaacagctaaaggaaagattactattggagcttagtttctattagagaataatactctccatgacctttgtgaatcacagctaccagaaaacaaaaagcaaagaaggtaacacagaagcacagagaattcagtcctagagtacctttgcttggcttcataatatcatagttatgacttttattttttattttattttttgagacagaattttgttcttgctgcccaagctggagtgcaatggcatgatctcagctcactacaacctctgcctcccgggttcaagcgattctccttcctcagcctcccaagtagctgggattacaggcatgcaccatcatacctggctaattttgtatttttagtagagacagggtttcaccatgttggtcaggctggtcttgaactcctgacctcaggtaatccacccacctcagccccccaaattgtggggattacaggcatgtaaccttgcccagcctagttataactttaaaaaaaattatttttggctgggtcacacctgtaattccagcactttgggaggccaaggcgggtggatcatctgaggtcaggagttcaagaccagcctggcccacatggtgaaaccccatctctactgaaaatacaaaaattagctgggtgtggtggcgggcgcctgtaatcccagctgctcaggaggctgaggcaggagaatcacttgaacctaggaggcgaaggttgcagtgagccaagatcacaccattgccctccaacctgggcgacagagcaagactccgtctcaaaaaaagaaagaagaaaaagaatcatttttagcgaaagtactttgtgtttattctccttatgtaacctacaaccggacaaaataccttttagcagggcatttgtagtcttcctctaacaaaaacaatctatgaatcacaaagagaattaggagggacagtaattttgtttaggccagtatagagcataaacttgagagtcagtagcagggttatatttagagttttgggactggatggaaaactaggtagagatctaaagattgcctactcaagcacaatgtggtttttatgctttatttttacagctctgaattcacaagtgttagttataactacatgtaatgtaacaaaaaagcaccattcaaatcaaatattatttcttataatttctatggctttagatattatagagtggactgccccgtrttagtgggaatcattgagaatttgctctatagtgtatccccagctgtgtacacatagtctgtcaccttgttttaatgaatagttgttcactaggaatatttgttttaaggagtgctctatcatttaaaaaagatatatgaaattcaattttattaataattcttttaggacacccagtctgttgattaactgcatctaatgtgttttactttatgtaccagtttaactcggtgcccttaatcatgtgatctggtctacagtaataaatcatataatttttttatcccaatagttttgttttctttttcccccttacttgtagaattaatgttgtattttacagaagatgatcagttatcccctagagtagtgactgcaagctataaatctaaagttactcacctatacatatatatgcttgtttgctctcatttcttcatgagcttagtagatccaagaagcaggacttttaaaacaaaatacctaaatgaaatcccttaacacaggaagacatgaaacagaaaaagtatgaagtaaacaacttaaacagtgcctgtagattgtttcacttctcatttaataccttttataaggtaatgaatagagtctagctctccagggacccagatatatacatctattcatttaataaaaattcactctgtattgggtactgatattctatatcctaaatatttttggaaacattccctcagtttaggcctgcattatccttgttctgcaatattgtcttctaattaatctccctttatttattcatatgcccctgaaattcattctctccacagtatttagggtgatctgtctccaatgcaaataggaccttgagtccctcttgaaarcataaatgttcaaacatcttaagattacatataaggctttcatcatctgacttctgcctaactctccatctttagccctttcccctttctgcccttttctctgggattactcaactgctggtgatgctctcttctctggtgcttgtattttagacaaatatataacgctatttgaggcttctttccctctcttgttgctgccttgcatgctgttaccctttcctgccctttaccccttttagtctggctaacctcactttttaagtctcaactcaggcatgatctctagcaaagccatctttgacacttttatttacattctttttttgtgtgtgtgatggagtctcagtggagtgcagcagcacgatcttggctctccgcaacctccgcctcccgggttcaagtgattttcctgactcagcctcccgagtagctgggatcacaggcacmcaccaccacgcccagctcatttttatatttttagtagacagggcatttcatcatgttggccaggctggtctggaactcctggcctcaagtgatccacccacctcgacctcccaaagtgctgggattacagatgtgagccaccgtacccggtyttatttacattctttaaacctcagtgtttagaacttagcaggaactcagtaaataattatcgagtaaaatagataaagactgtttatacaaagataacttgaaagattgtcccctaccgtctgggagcaagggcataaacatataaataaataatatacagttcagatggaaaagatacagtacaaagataaggtactaaggcagccccaaggaaggagacacctgtttatctgggggaagatagctctaatcgaggaagacttcacatagctgtcttagtcttaaaagatgaaaaaaaatttgtcaaaatagcagaaaacatttcagatgtaaggagcgtgatgtacaatgataaagatgtaaaaagtagcagtaattttggaattcattaataatgaaaaacactctttgtgccttgttaaaaagatactgttatrgagaacattatacaatgttactttatatattcctactgtatcataaaattttgttttgtttctgacagtttagcttatttatgttgggtgaatgaatttgtgagtgaatatttgagatgtttgtatgggttgaacctggtattgtctagtgttactagtttccccaagtggtttgttgaagttttagataatggttgaaattttaattagatacctcattaagttgatacttagaagtatttcttactgagaagtaaatattccactaaagattaggcttcattgaaactttgtgattgcgccactgcactccagctagggcgacagagtaaggccctgtctcataaacaaatagaagaaaaccctctcgatttataaaataaaataaatattattttctatttctgtaaagactataccttttacctaactgttctaagtagttcattaaactaaatatttggattttttcagctgaacatgacttagaagtagcatcagaagaagagcaagaaagggaagggagtgaaaataaccagccacaggtattatatatttttaaaaatttctggtttaatattgttttctttgctttaatgatgtaacatagtccaaatgaaattacttttcagactagccttttagaatcaatagatcatcatttaatatttagtattaaaaacgttttgactagttaaaatgttcttagaatgtgtagtaacctatagctaatcttttgtttttgtttttgtttttgttatagttaatctttacccttggaattgaagccagaaatttcctgagtattgtttcctctttcatttttataacttccttatatgataaagatggtaacatcaaatattgaatcatattattaagcagtagaaattatgaacattttaacactgatggccactgagttggattcatcttaaaggagtaatcattcccagtggttcaggatttacattcttatattgctggtcactgattccaaggttaaagatttattctgccttgtgatccctgttgatttcagtgtctacattcagggaaagaatgaggtcagaaaatcaacccagttattaagagaatcattcctttcagaatgggatctttccattgttaggatatacacaataactttctgattatttcagtctaggaaatcagtaaatattatagaatttttaaatccactattaatgaaccttaggatatttaagaattagacttaagtcttatatagtttatacagatgcataacaccatattatggtatataatttcaattaaaatgtaagagttaacttttctttctgattggtgtttattttggctcctaataatttaaactttccctactctccagttagaaatctttacaaaaagtacttaaatgcactgtaggggctcagtatttgaggtatggtaaggtaaaatcttttaaaatgaggatgcctttataatgctacaaatcatctgctaatttatttttggtagatttaacacataatgaattaagtttaatccaaaggaacagtgataaacttaactttgctggttcatgtttttctcctattttaggctaaggcaaattagtttttacttcttagttacaatccagtgatttgggagtaactaaacatagactaagtttaacagttgaattttaattatttcctaatttttctttgtccrtacttgattactcaaggataaagttattttaaaaacatgcaccctgacagaaaagacatctgaaaaacaaaacaagcaaattaatcgtccactttcatgtctgcaaaagatgtctcaagaaccagaactgaataaggagtgtgatagagaggatgtatctgtatattcaggacttccttgtgtgcaaaatgatgaagaaatgtggaccaaacaaggcaaattagagtggaaaaataacttaaaactcatcacaaatgagttaaagcagagctgtggtgaaacttgtgaaaaatacaaaattactgcttctcctggggaagagtcactacatgataactctaaaggaggcacaaacttaaaggaaataccttcttctttgacaaataatatacttgattgcgatgaaaaagattctcctgtctctgtactattccaggcattgcctgaacaaaaagtactcagtctcgaaaatggcttttcatttccttcatactctgggtccccagaatatgcttgccagtcatcttctaagccttatttaaatgaaaataaattaggccatgaaaatgttaacaaaccagacactgaacatgtttttaacacagatgagaatttttataatgatacagaaaataaaaaagtaaggaacccagaagtagttacaggtgtaatgaaagaagagtttgataagacaaaaaatatgaaccgaaataccactaactggaaattagacatcagacgtgtgcctcagtatagtgatccaaaaagaccttttgatttgatctgctccaaagaaatgaatcatatgtttcacataaaaaggcatagtatttctgctggtacagacgcttacaagaaaacaaaaccaatacagaacttgttccagaagccattatatgatcattgcagtgctaataactataaaagcatggaacctgaattagaaaatgtgaggtcttctccaccacgtggtgacagaacatcaaaagtatctctaaaagaagaattacagcaagatatgcaaaggtttaaaaatgagataggcatgttaaaagtagagttccaggctttggagaaagaaaaagtccaacttcaaaaagaggtagaggtttgcttgctgctactctttgtttttttctctatcaattatttgatccattctgattttctgcttatgaagagctcatgtataaaatggtgttacctaaatatgtaattgtgtttagaaatagatattattctgctatctaagtaacaagagttaaggaaaacattctcaaaatctttgttccttaatcaacctaagaagtctatcagtcttccaagtgacatatggactgggaaactaatttagccatataccgtgtgaccttgtgaaccagtataagcataaaggaaattgccttatgaaaggtaataagtgctagggtttttttccctattttcttaaagatgaatttcttttatttaaacaacaacatggcaatacagtgggagagaagcagtgactgagaagagatataaaaatatatctagccctgagtattgttaacaaatattcccagccaaagggatctttttaatgtgctttcgtgtgtgtaaagcttatctgtttgactcaaactgttggaacttataattccattctgatcactttaaagatttttgacaacaaatacatgtactttcacatattttttaaaacaccagtcaaatgtttctgttgaaccagacctttacattatgttgtttaataaagtatgataagtttgggcatgtataccctatcagtagcataaatcctcagccagaaatttagtatttaactccaaagtagaaagctgagttctgtacattgagttgtaaagataaacaataatctgcagatattcttctttttctttctttctttcttttttttttttttttttttttttttttgagacagattcttactctattgcccaggctgcagtgcaatggcatgatcttggctcactgcaacctccgcctcccgggttcaagcaattatcctgccacagcctcctgagtagctgggattacaggcgcccaccaccacacccggctaatttttgtattttagtagagatggggtttcaccatgttggccaggctggtcttaaactcctgacctcatgatccacgcacctcggcctcccaaagtgctgggattacaggcgtragccactgcgcccggccaatattcttctttaaaagtaaaagcagacgagrcttcccacaccctgctatggcattaaattactttgccagtgtcacacttaattcatctgattaatttgatgaatttatctggtaatttatctgattcagcattatggagttatatcatctcttttggtgccataaagtgctagataatgccactttaggagctctggatggatcatttaatctttcttgttttaatctggatggatcatttaatcagtagataatgaggttaacttagataattaatacttatactatatatcctccagctataaaattttagttattgaatgtgaaattcgggaagcatctcattctccagaattccacaccagcaactcagcagtttcactctgttccttatgttgtggcaaaccttggtttctgtatttcagtgagcaccttcactttgttgatatcccaggatccaaacgaaaaaaagaattataaaagacactggggaaaagaatatcttagtgcagaaagggggaagattcctttctcttcctggctgcgtagtgtaaaatccaggtggtaaaaaggcagaagaagatgcatcttgtgtctttgtctttttatttctctgtttctgccagtaaaatggggtgaaaattcatagtagatagtgaagattggatgggaataaaagcacaaaattaagaagagcctttgaaattttggaaaattctgttttacccaaacagaaatgaagcagactttacaaaaatttcgttgataaaattataataatagctgataattatataacaattatgtatacaatgatcccattagagtaagcagaaaatatttttattggctaaagttaccatagttaaactgagtcaaatgataaactcaatgaaaacaaagaaattattattgaataaagtaatagcaattccttagtatcaaactttcattaaaggttgaagaagaaaggaaaaaacacagaaataatgaaatggaagtatcagcaaacatacatgatggtgctactgatgatgctgaagatgatgatgatgatgatggattaattcaaaaaagaaagagtggagaaactgatcatcagcaatttcccaggaaggaaaataaagagtatgctaggtaagctgatagcatatttaacagcagataattgttattgtgctataaaaattctaatttggactaatattcatgattaataaattttatacttttactatgcaagggatatgcaaccttgccttgcaattagaaaaatgcaaattagcaaacaatgagataccagttttttcaatcatattgatattttatttaaaaaataatacccagtgatggcaaatgtgagaaaaaaggcattctcatacactgttggtaaatgaaattggtaaatcctttttgaaggataatttagtatgtatcaaaatttcaaatatttcctatctttaacctaacagcttcacttctgggactagattctacaggaaaatatgacttacataaaaatgcacacacacaagttaaggacatttattatatattatgtgtaatacacagtaagcctatgtataatatatgtataacatgttaaataatgtatgtattttaaggatatttatataaacacattacatatatacacatgttgctaaggatatttattatagtatcccaaatgttgggctctcaaattaatttgaattttgccaagggattgcacagagagatctgtagtacatgtaaacatttcagtatattgggtatttttaggggctcatgctcaactcttaacacagtgggaaatttcagtctctgtaaattatataggtatatgatagtgatatccttgtgcatgtttttagaccgtaaaaaagtagttatggccaggtgcggtggctcatgcctgtaatcccagcactttgggaggccgaggcaagtggatcacttgaggtcagagttccagatgagcctggaaaacatggtgaaaccccatctgtactaaaaatacaaaattaggcaggcatggtggcaggcgcctgtaaacccagctactggggaggctgaggcaggagaatcacttgaacccgggagtcggaagttgcagtgagccgagattgtgccactgcactccaaactgggtgacagggcgagactccatctccaataataataataataataattattattattattattagtagtagtagtagtagtagtattattacagtttttctggtggtaaatccaactaggctaaaagtctataaaagttaccaaattcttttattttctttctttgagatggagttttgcttttgttgcctaggctggagtgcagtggtgtgatctcagctcactgcaacctctgtctcctgggctcaagcaattctcctgcctcaacttcccgagtagctgggattacaggcccgcaccaccacaccaggctaatttttttgtatttctagtagagatggggtttcaccatcttggccaggctggtcttgaactcctgacctcatgatccacccgcctcagcctcccaaagtgctgggattacaggtgtgagcctccgtgaccagcccattattttatttgcaaacaaaatcataactaatcagaatattgctattttggaactgcatataatgacatataggtattctaaaaggatttttcccccacccaggatattttcctgatttcttcttccatgttatatgtgtatcatgctatttttaaaacttcatttaaaataaacttcatttaaatgaaacattatgatgtttaaaaacaaaacaaaaaatatagcccaaatctaattgctacttccatgtctaaagaccattgtttgtaggcaatgagctccagccttttactgtcacattcaagtttagtgtagcattcacytgtctctagtttctttctctttttctttcaagttcctaggaaacatctagatgccgtgtgcctaatctgtgctcaccttctattctctaagtagaatggttttctcccattttttgtmtcatgaactcctctattttgtctcttctgttttaaagctgtccttgtgttcagatatatcttttcatatatcaaccttacatatcacattttatcataatggtatgataaaattatggtttttgaagcagggaatatacattttctcttawgttgttggtaattcgtgttttttgaattagtgaatgaattgagatgggggaaatgttggaattttataaaaaattatttttattctttgttagaattactagaaaacattggctttttaatggattttttattctttcttttccttaactctctttctgcatgttgtttctttttttcttttttcttatgtaactgtcatttcccatggattttttaaagtagtggtcctgccttgcaaatgaaggaagtaaagagcactgaaaaagaaaaacrgacctcgaaagaatctgtgaattcaccagtgtttgggaaggccagtttactaactggtggcctgctacaagtggatgatgacagcagtttaagtgaaatagatgaggatgaaggaaggtaaaatctatgatttctttatttttctatggaggaaggttagtagtaatttttttctgaaaatagaatgatgtagtctcccaaagctagagaatatcgactgtttccatgctgctgaaagattaagatgaggacaagtgactttgacaagcagccatttcaataaatggtcaccatggagccctgactatagtggatgggcacagacggcgtttgagagaacttggactgagaggcaataggtaaatgggtggtaactgaagaagaatgtgggattcaagggagccttctttcttttttattttaaaatgcaagcttttagagtttatttgcatgcttttgggagtgacccagtagagaaggaaatgcttatgaaatttagttttgtttgcatgtcwaagcctcagaaagcttgatccattatcttttaaagatttataataaactaattgtccttagaacttctattaatgtagttttttgctaagaggttgttcatttggaattgtttcaaaaatggagtattgtaatataattgaatgtgtcaatgatgatcttaaagttaaactatcatatatggattttaaaaaattatctaataataaacmtgcaaacatataggccatactgaattgaatttaaacatttcttgataattgaagatatcagagtacttttgacagtagcatcatgaacagctatgattttgtaagactaaaagatcaggtgtattaacttaatagttgtttagattctggggagaaggggaggattttgtttatgtacagtagaaaattaaactattgacaatctatcacagactattacttttagattataaagttctaaaatattaaaaaccatgttgccttatgctaatagtgtcattgacatgtatgctgagtaaggatttttttttttttttttttaagtcagagtcttgttccgttgcccagactggagtgcagtgacgtgatctcagctcactgcaacctccgtctcctgggttcaagcaattctcatgcctcagcctcccaagtagctagaactacaggtgcacaccaccatgcccggctattttttgtatttttagtagagacagggttgcgccatgttggccaagctggtcttaaactcctgacctcaagtgatctgcccaccttggcctcccaaagtgctgagattacaggcgtgagccagcacgcccagcttcaataaggatttttgaatgcatgaataaagagttgagtagatgaatgaatgaacattgatgaatttctttagaaaaaataaatgttgagcttattgaaagtagatttccaaattggctagatttaaggtctttttattttaaaaatatttgcaagattcagaaattatttataattataaccagaaatagaatgaaaatatagattcatctgctatcatatcacttaaaaacacttgaaaataaatattactttcacagcacagcaaaatatgttttggagctagaatttttgggtttgaattttgggtctgctactgaccagctatatgtgcttgggcaagttacttggttttcctgtgcctactttcttcctttataaaatacctaatatgttatcaacctcacagaattattgttaggattaaaatgagtttaatatatgtacagtgcttaggataatgcatagtacctgcattgtgagtcctgaaaaaagctaactaataccgtcattcaaaaagggtttccatcatgtaagggtgttaagtaatatattccaaataggttttagtgcccgtaaaagcttgtttttattgaaaaggtcgacagcaaaaaaaaaaaacctggtatatttctttctattgaataatgcaagtaacactatgttttcattttgctttgactgtcaggaagcttgatctaaatttgtttgttatgatattgttagtatatttttcttgtcccttacttttactttttctgtatatagtttaataccccttgtagaragttattatcttttatattacctgtaaaaaagattcctgtaaactttatgaatagggtaaataaattacaaatgcagagcttttatttaaaaaaacaatagttttagatattccttgcattttacatgtttactatttgcctgaaaggtattttttttttttaggcctactaagaaaacatctaatgaaaagaacaaggtactgtaaaaaataaattatcaaaattattgtttaaaaaaatacattataaaagataaagtgggctgggcacagtggctcacacctgtaatctcagcactttggaaggctaaagcgggaggattgcttgactccaggaatttgagaccagcctaggcaacatggtgggagccctgtctctacaagaattaagaaaaaattaaccaggcgtggtgagcatgcctgtagtcccagctacttgggaggctgaggtgagaggattgcttgagcctgggagtttgaagcttcagagagctatggtcacgatactgcactccagcctgggtgatagagcgagacccgatgtcaaaaaaaaacaaaaacaaaaacatgaaattaaaaaaaagagaatcttttgttgtaaagacatttactttgaaaaagtgattaagaagcactagctgttgataaataaatccttttaacaaaaatcagttctttttaagaaatacctgtgtttttgctcatttagaaagatggataattaccacttctgtatgtgctataaatattctggggacattttgaaacagtgttatttatttcataggtcaaaaaccaaatacagtctatggatgatgttgatgacttaactcagtcatctgaaacagcctcagaggattgtgagctaccccactctagttacaagaattttatgttgctcattgaacaacttggaatggagtgtaaaggtaggaccattgcataaatttaaggcctttttatgtatcccattgtaatgtatgtaatgtaataaatgtatgtacatttagcatacattttgcagtgcttcattggtggctatgatgctgccactgtgcaaagctgaagagttctttatatgatatattcttgatattattcctttattagctatattttttgcagggatttttttctcccagtttgtggcttaacttttcattctctttttttttttcattttaattttttatttttttgttgacttttcattttgttaatggtatcttttgaagagcagaagtttttaattttgatgaagtccaatttatctgtttaattatggattttgctttttgtatcgcatttaagaagtctttgcataacacagggtcacaaagatttcctcttatgctttttttctagaaattttatagatttaggtctttttttttttttttttgagacaaaatttcactctgtcaatcaggctggagtgcactgtcactgcaacctccacctcccgggttcaagcgattcttgtgtctcagcctcctgagtagctgatatgataggcgtgtgccaccacacccagctttttttttttttttttttttgkatttttttgkttgktttttgtgtttgtttgtttgtttgttttttgagatggagtctcgctctgtcgtccaggctggagtgcagtggcgcgatctccgctcactgcaaggtctgcctcctgggttcacgctattctcctgcctcagcctcccaagtagctggaactacaggtgcccgccaccaagcctggcaaactttttgtatttttagtagagacagggtttcaccgtgttagccaggatggtctcaattgcctgacctcctgatccacccgccttggcctcccaaagtgctgggattacaggcgtgagccaccacgccctgccagcttttttgtatttttaatagaggcggggtttcatcatgttggccaggctggtctcaaactcccgacctcaagtgatctgcccaccttggcctcccagagtgctgggatttcgggcgtgagccaccgtgcccagccagttttgcgtcttacatttaggtgtgtgatccattttgagttcatatttttgtatggattgaagtatggattcaagttcatttttttggatatggacatattgttccagcatcatacatcagaaaggctagccttttcccactgcatttgccattgtgcctttgtcaaaaatatgttggctgcgtacatgtggttctgcttctcgactctgttgtgttccattgatctacagatgctcctgagttttatctcaggtttttgggtttgttttttttttgacttataagctatgactctttgttttgctatcttagtggttgctttaggatttatagtatatgacttgaatttatcacagtccaccttcaaataatatcataccacatcatatatggtataattttgttatagttctgatatatggtataattataatagtttgctttcatttttttctctcctggccatatcctttctgaatctgtgggattatagtttttattaagtttagaaagttttggccaatttttcttcacattttttttctgtctctcttccttcctctttgggggcttatatattagctgcttggatttttttccgtagttcattgatgtctcaaagttatgaatcttttcttttgtgatggttaatctgtgtttattttcatctaatttagttttcatctttgacattgtaatttgcatctctacaagtgcaatttggtttttaaaaaatatcttccatgcctccacttatcttcttgagctttattttgaggtacagttgagttacatataaacagcttgactttttcctatattgcttttatgatttgggctaattccccactcctgaggcaatacctttctgattattcattgtcttgagaagtatgagttttttcagcctgactgtgggaatgaacactcttcctggtgctgtggaagcaccaggcaggatttcctctcctttttttaatggggttttttctttggtttcagatagtttcctagcatacatgcactgtttattactttgctcaatacccaagaggggatctctgtagatctccagggttctctgtacctctcgctcctctctagtgtcctgtgatctctgtctactttgcgtttaccagactctcagcttcatcacttcaactcagggagtctgctggactttatgtcagtttttcctccccgcatcatgacctagaaactctgaaagcgggtctctgggcattcataagaccataaaacttacttcctttgtttgttttcttttcttttttttttttttctgaggcagagtctcgctctgttgcccaggctggagtacagtggcgcaatctcagctcactgcaacctccacctcctgggttcaagcgattctcctgcctcggcccccccaagtagctgtgattacaggtgcctgccaccacgccccactaatttttgtatttttagttgagacagggtttcactatgttggccagactggtctcgaactcctaacctcaggtgatccgcccacctcagcctcctaaagtgctgggattacaggtgtgacccactacgcccggccacttcctttgtttcttgtctgtcagggatccttgtgttcattgcctgagtccactctcttgaaactcgttgtttcatgtattttgtctgttttgtctttggtcgtttcaggaaagaaggaaagttagtacctgaagcagactgcagtagagcctcagcacacgctgcagactgcctggaatgcttttcttccccatttgcttaactgctgccttctcgtccttcatttctcagtgtagccacctctccctcagggaaatcttccctggacccagtatagatcaaattctcttttgtggtcatagaactctgtttccttacagcatctatctgaatkcataattgtcactttttttgtattttgtcactttttttgtcttcactatactttaagctaagcaagtgcagaggtcttgcctgttttatcttcagagcttagtttaatgtcttccacattgtaggccctcaatatgtaattggtcagtgtcttaatgagtgaatgttatagtgyacagtgtgttatatggaaaaatgctcatatatttctatcttgttttcttcctgatacagattctgttagcctattgaaaatccaggatgcagctctttcatgtgaaagattattagaacttaaaaaaaatcactgtgaactacttacagtaaaaattaaaaaaatggaagacaaggttaatgtactacaaagggagctatctgaaacaaaagaaataaaatcacagttagagcatcaaaaagttgaatgggaacgagaactgtgctctttgaggtatgatagcctagttttaaagaaatgtttaactatttgtactaaagatatatagaattcttgtaattgctgacttatcttctggggcttagcagggaagaaaacttcttagtcttgtggagtgtgaaattcttggaaataatataactagttcttaactatgaacttctactaaatatatattcttttaaatcactttaatggctatgtagaagtttgtcgtatggaagactcattatttaatacagtaagttttgggtttacagtttttttgtattatagttaatgctggaaggaatacctttttataaatctttttctacatttctaattatttactttgaataaattcttcaatatagaattattcgtttaaagtataggaattttttttaaaaaggcctttggtccagatttttaaattgttctcaggaaagtttagttaatttacgtttcaatcaatagagaatgaaatggccattttttcaacctaaattttttttttttttttgagatggagtcttgctctgttgcccaggctggagtgcagtggcgcaatcttggctcactgtaacctccgcctcccaggtttaagcaattctcccacctcagcctcacaagaagctgggattacaggcgcacgccaccatgcccagctaatttttgtatttttttagtagagacggggtttcaccatgttggccaggctggtcttgaactcctgaccttgtgatcctcccgccttggcctcctaaagtgctgtgattacaggcatgagccaccgttcccggccagaacaattttatagctttactcttaagatgcatgaattaaaaaataaaatggtgagtgattactgaaagtgatctctctctaatacacagataaaattcattcaaagttctgtgttgaaaatgcatattattctttacggtttacttaaatattagatcctgttttgttccaaaagagattttaaaattgtttatgcaatatgtaataatcaagaaggtatgtcgaaagtgttaccagaaaaaagaaacataaaaagtatggggtaaccagtattaggctcgttagcctaatctttaattatgctattatacagatatatgttgtatgaaagcatctgagggtgttatcttacactgtaataatttttagggatacttgcaatatttcataaaaacaaaaatatatttctattggatttataaacattttagtaaactaacttctttttagttagtttaatgatctttcctaattgaggagtaattatgactaattaaaaaaagatttttttttttttttgagatggaatctcactctgtcgcccaggctggagtgcagtggcacaatctcggctcactgcaacatccgcctcccgggttcaagcggttctcttgcctcagtctcctgagtagctgggattacaggtgtctgccaccacacctgtctaattttttgtatttttagtagagatgtggtttcaccctgttggccaggctggtctcgaactcctgacttcaagtgatctgcgcgcctcggcctcccaaagtgataggattacaggcatgaactactggcacccagccaaaaagataattttcaacttgcatctttactgaatcatttccaatatctttttccataatatttatcagaggtactcataacagaaacttaccagttagcagaatgttctttcatcactacctttcaagtatatatgtcctttggaaaagactgaagtgagaaattaaaaatcagagaactagaaaggaaaaatattcaagaacatagaaattgtattagggtaataaaccaacatacaaagcggcatatcacacaatgaactttttattttgtaacaatacagattttaagataarcatatttaactgcagatttwgcttaaaccaagaagaagagaagagaagaaatgctgatacgttgtatgaaaaaattagggaacagttaagaagaaaagaagagcaatataggaaagaagttgaagtgaaacaacagcttgaactgagtctccaaacactggagatggaattgaggactgtaaaaagtaatttgaatcaggtaaattaatttttgataaaaattttatatttttaactttatttcatcactattatcacatccttttgatttaatatatgttatctaggtttaaaacaaaactgttatctcaagctgacctgtgacctttataactaaaattattcatgataaatcttggcacctaatagatgcttagtctctgttttctgaatgaaggaatggagggtaagttgagtttaatcactaacataaatgttaatttaggcatttaatgttaaaatacaggctaaatagctctaaaattatgatgaaactagtaaaatgttttgacattttatttcacaattctatatttgcctgtatttattaagaaccatttttgctttttgattaatttagctgtcacttaggtgattaaaatttgagtaattcttgagtaataaaggttcttgcattttaatgtgctatttcctttttataagttttttgttttaaaattctgctcttgttaaccttttagacttttacaaaatgctaatagacctaaaacttaatgtatctctaggtcgttcaagagcgaaatgacgctcagaggcaactttctcgagaacagaatgccagaatgttacaagatggaattctgaccaatcacctttccaaacaaaaggagattgaaatggctcaraagaaaatgaattctgaggtatttctatttcctttagtcattttcaaatatgtgtgtatatgtatttatatgtgtatatattttaaaaaccaactatatatgcatcttggamagtrtcraggatttttaaaccatrtatgtgtatcttggggtagtggtagtgtttttggtccattggataaagtgatgttcttaattcagctccacttgtctgcagcagtcaagtaatgacattcagaatggcctcatccaaaggagaagcttttaataatatcttccgtaagaattgatggtctttccacaatctcaaaacccttgctaytaacaatagatgcttgagattttggaagtgatttcatcaccttgatatattaatggagaggttagtttattgcttctacccataggaaaggaggaaaagtacagccagttcagtgacatattttggatgttattcttctcactgttgagaagagtaatggtttactgcaagtagtatcttattttggtacaaagagcttttgaaacartgatatgccatgatatatagttagtgataatttagtgataagtattttgttcctagtaaaacagttcagcatatttctccctgtttcacattattacattttcaaacattatgaagaggaaacaaaagttattgcgacaacaaataatctcgtgattttccaagaggaactctacaaattttgtcctatttaccattagtgttgtaaaataaaaggcttcttttgtatttaaatatttataccacagaaataactgatttagtgaaagaacactataaatagagtcagaagacccagggaaaatcatacagctgcttttttttttwaacttttccttttcaaaactgtgatactaaatgagttcattgatatatgtagaagtgcttagtacaatgcctagatttattattcatcaataaacgtaattgataactgactataaagatgtgagaaaagtagagtatctatagaatatkctcagaaraaaggaacttgaaaaacttcaggaaatttcgtctgtccaaatatatgtagagccaaggctcttactatgggttggtgtatgggttagatatcagagtataaacccaattttttaatgtggtcaaattattaatcttttatgcttttgaatttgttgtacttcagtaaaaggcctttccaattctgtgattcttaaaaattttctagtggtttcttttttactttcatggattaattgtcttcaaataaatttttgaacttttgggagtttatgctctatacggtttgagttttgatccaactttttttttttcaattggatatacacttattgcaaccctttattgtaaaatgtacagtttattctttaatttcagaggaaatcatgatctgtcattttcttgggtgctagctcaaagtttcctttgttttacttagaattctcatagtcatgaagaagaaaaagacctatcgcataaaaatagcatgttgcaggaagaaattgctatgctaagactagaaatagacacaataaaaaatcaaaaccaggaaaaagaaaagaaatgttttgaggaccttaaaattgtaaaagaaaagaatgaagaccttcagaagactataaaacagaatgaggaaacattaacacaaacaatatcccagtataatggacggcttagtgttctgacagctgagaatgcaatgctaaattctaaaytggmgaatgaaaagcaaagcaaggaaagactggaagcagaagttgaatcataccattctagattggctgctgctatacatgatcgtgatcaaagtgagacatcaaaaagagaactagaacttgctttccagagagcaagagatgaatgttctcgtttacaggacaaaatgaattttgatgtgtctaacctaaaagataacaatgagattctttctcaacaactatttaaaactgaaagtaaactcaatagcctagaaattgagttccatcacacgagagatgccctcagagaaaagactttgggtttagaacgggtacaaaaggacctaagccaaacacagtgtcaaatgaaggaaatggaacaaaagtatcaaaatgaacaagttaaagtgaataaatacattggaaarcaggagtctgtagaggagagattgtctcaactacaaagtgagaatatgttgcttcgacaacaactggatgatgcccacaacaaggctgacaataaagagaagacagtgattaatatccaagaccagtttcatgctattgtgcaaaaacttcaagctgagagtgaaaagcaaagtcttctgctagaagaaagaaataaggagttaatcagtgaatgtaatcacttaaaagaaagacagtatcaatatgaaaatgaaaaggcagaaagagaagtaagtatcaagaaagataaatatttttcaaacctcctgaaagaaaatttaaaataatatatagttatgtagttaactrtaaaaataaatagataagcttatttactctatcagtttagaaacatcccttgttttcagcaaataaaagagctgagagatgctttactttgagtaaagatattgtatcatctatgaaattttgagttttaagttatgaattgttatagactagtatgaatagtaaactaatgtgaataatgtagtcttttactgctgaagtaataattttagtgtctttatgttgccacatcttaagaacatttccatttgtctgccaccatgaaacagataaatggaaatgcttatacctgaaatgaggattttgaagttaaggttcaattaagtgtgttattttgacagttaattccagatttccasataaactgaagtatattgctatatctcttaatacttttctgtcagtagctttttatatatttcagttgatgtgattttatttttattcttgtcaatttgacttgtctaaaaatatttcaatctcaaattacatattgttatgatctctcaattctttaaagcatgtactttttattaaaccataatttgggacaaatgtgaattttagcaaccatatttgacttaatctccccagtggtatttataatttactttgaatatattatgagcaaataatttgctcataattttcatttcagtgcccaatgactatcatttgggtataactttgttcagtataaagataagtaagtgtagcgatttgtgatttattagtttggcattggaccaccattttcacactaatgaggggtggcaggatgcacaggcagcaagaatggagtgagtaggggagagtcatagcagccgaggtcagggaggcaagtggaggccaggttacctagggcctctaaggccattggaatttacctgtattctgagataggaatctattggaataatttgagcaagcaattaagtatctgaggagctctgaagttgatttgatgttctaataaaaaagagcaaaaatgtttcatagggtacaattaatcactaccagttccactcacataactatttcgagacttcagtagattgttaagcagtgtaaattcatggggggatgaatgaataatgggctgaatctgttgtttaagtaacgtcatacctaattggcaggaagataacacctgtgtccttaactgaattcagtaataaacagcaatgtgtacatatgaggacaagaaggtgaatcaatgtatgtggtaatattttttaagttgtatatgtcatarttaaatattattaacataatttattttttaacataacttaataataaggtgatttataaaatcagtaacaaaatgtcttatcaggttgttgtgagacaacttcaacaagaactagctgataccctaaaaaaacaatctatgtcagaggcttcactggaggttacgtcacgttatcgtattaatttagaagatgagacacaggatttaaagaagaaattaggtcaaatcagaaatcaagtatgtatgaaatttaacatgtcaaacagttaatctataactggttaaatatatagtgttttatcatactaatttagtgggtagccttcttttgtgttttcattataattaatttaaattttattatctttttttttttttgagatggagtctcgttctattgcccaggctggagtgcagtggcacagtggcgcgatctcggctcaatgcaagccccacctcccgggctcactccattctcctgcctcagcctcccgagtagctgggactacaggcacctaccgccacacctggctaattttttgtgkttttttttagtagagaygaggtttcaccgtgttagccaggatggtctaaattttattgtctttataatacacttgcttctttatttatttgttttttttttgagacagagtctcactctgttgcccaggctggagtacagtggcactgtctcagctcactgcaaccttcacctccccggttcaagcgattcttttgcctcagcctcctgagtagctggcattataggtgtgtgccagcatgcccagctaatttttgttttttgttttttgtttttttttgagacagagtctcgctctgtagcccaggctggcgtgcagtggcataattttggctcactgcaacctccgcctcctgggttcaagcaattctcctgcctcagcctcccgagtagctgggattacaggtgcccaccaccacgcctggctaatttttgtatttacagttagagatagggttttgccatgttggccaggctggtctcaaactcctaacctcaggtgatccacccccctcggcctcccagagtactgtgattacaggtgtgagccaccgcacctggcctaatttttgtatttttaatagagatggggtttcaccctgttggccaggctggtctcgaattcctgacctcaggtgttccacctgcctgggcctcccaaagtgctaggattacagatgtgagccaccgcacccatcttgtttattaaactctttcattctgccatttttttcttataattgcacatttttaaaaataatatttagtcttaggaaagttgagaattatacatcattcctcatggaagttgagagagttttttcctgttaaacagtattttatagtgatttttctattgtcatggcaagccagattaagttagaggataatgtttaatggaatgttccagaaaattgtcttatttcttattttcacttttgtgaatggatacagagtctgtgttgatttattttatggatttcaaattaatttgtacagaaaggccattaacttttctccaaaatgcaaatgttttaggttaatttataaactatttgaaataggcatttccttcattttcctttcatttaaaatatattataaaaacatagaaatatttagattatgtatagcatgtacatctaaactagagaattaagaaaattatctagatccctccactggatttttaaagaacattattgagatataatttatataccatacagttcactcatttaaggtgtacaattcagtgtctcttagattatttacagagttgtgtaaccatcaccacagtcaattttagaacattgttatcaccctgaaaagaaaccccacatccyttagccatcaccaccatccctgtccatgtccctccaccttctccaatcctaggcaaccaccatctactttttgtctccttaaatttgcctgttctgaacatttcatataaatagagtcatacaatatgcagtcttttatgagtggcttcttttacttagcatgtttttggggtccatctgtgttgtagcacatatcagtacttcatttctttttattgtctaataatattctattgtatggctataccagttatccattcatcwgcggatgggcctctagattgtttctactttttggctactgtaaataatgctgcgatgaacattcatttataagacatatgtttttattctcctgccactggattttatcttcagagttaatcaggctgctttcaccatctctctgcttkactcctgctgttcttcctgcctttgcagtttctgttyatctagcctcattcattcagacctggcacacaattccccctcctttcggaagctttctctgactgttctggatctcattgacctcacattttagcactctttgtctagtctgtgtagaacaatttgcccttaatttaacttcacttttattttttttcataagagagaaacttgtctaattataaatttgcctacgaggtgaataatatctgatatgcctgtcacctatccttgtataaattgaaaatattttagcttagcaattgttaggttaaaattactttatattatactaagaatttcttctttgagacattgatataataaagcttttattctatttttattattttatttttttacaaggccacagctaacataggtggttattctaaatatattttaagtaattaaatataagtagaaaccacttaatctagtaaaggaaagttattcaatcaaatgctcatgtttttcaccctgaaaagaaatctacatttccrtttctttattacgtagccagagctgggatccgtagattcataccgctttcccacccaaagagctccagcttttctcctacgccrtacgacataaccttagccttaagcccaccagagtgctcgctaaagcagctcagcatagacagttgttgcaaatgacttgatttgggaaccttgtttcgcagcagagtccagtgttttcagtccagtgctctgatggccatgtaagttatgtattactyattccaggaggtgctgtttgcattgtggtcattgcccactgagtagagcagagagaaagtaatctataattgtttaaagtactgtcggcttagtggaattggcaaaagttctgtgaagtactaggggtgtattctgggcctcatgctccccatttgctttcactttcagtggtgtgaagaatgattcagtgcagctatagtagaccacttccattggcatgccatctgcctaaaatatacaattttattagaacataaaatacagtaaaaagaatcacacaaacagcaaatattatatatagctcactatatgccatgtactcatctaagtactttatgtatatattccttgactgaatcttcttaccatcccagtgaagtaatagtattactgtctctgtttctattttaccactgaagaaattgagacactgaatgttaatttgctcaaggtcacacagctggtaactggtggagctgggattcccacccggccattcccgcttctgtgtggatacggcctctcartttcatgaatatctagttgtcacctaacatgtcatcatgttaatttttataatcactggcattgccatggtcattcacatctataaatatttaaacttatagttcatgtggtggtgcttggaatgcaaaaatataaatgcttaycrtaaggtaatttcctatctttctmcattttaccaagtttgtaaatttgagtatttatctgataaaatatagtttgaaaacaagagtaatatgttttagttctagaacgcaggttgataaacttttctgtaaagggccagatagtattattttaggctttgggagccgtagataccacctgctgcaacagatcagctctacagtcacagcacaaaagtagccataaacaatatgcatattgaaggggtatgactgtgttcyrataaggtttagttacaaaaacaggtaatggacagatgtgtactagattattagtaaagtgggttttttttattctttgttttagttgcaagaagcacaggatcgacatacagaagctgtcagatgtgctgagaagatgcaagatcacaagcaaaagtaaaatttaaagcagcacacagaaaaacatgattatttatagagcaaataagcagtgtagtatgagaattatatcagctatgatcataagtacatctgtgtgaagtcaaggaaaaatttcagcattaagcaattttgaaatgcggatttttttatattatcctagaattttgtgcattatccacaaaccacaactagaaaaacgatagagttgccaaatcacctacttttgaaatctttaagaatttatgtaattatgccttcaggtgtttgctaagaaattacacagtattttaaaaatttatctgtgagaataattattttaaaatatacatttcaggcttgaaaaagataatgccaagttaaaagttacartcaaaaagcaaatggacaaaattgaggagcttcagaaaaacctgttaaatgcaaatttggtragtcagccacttaatttctgtcgtactgaaaaggaattttattgctttagtaggacaagttgagtatcccttatttaaaatgcttgagaccagaagtgtttcagattttggatttttttttattttggaatatttgtacatacataatgagatatcttggagacaggacccaagcctaacatgaaattcattgatttttcatatataccttatatatgtagcctgaagttacttttatgtaattttttttttttttttttttgagatggagtctcactctgtcgcccaggctggagtgcagtggtgcgatctcagctctgcctcccgggttcacgccattctcctgcctcagcctcccgagtagctgggactacaggagcccgccaccacacccggttaatttttttgtatttttagtagagacagggtttcaccgtgttagccaggatggtctcgatctcctgacctcatgatccgcccgcctcggcctcccaaagtgctgggattacaggtatgagccacagtgccyggccacttttatgaatattttaaaaataattttatgcatgaaacagagttttgactgtgttttcactgtgacatgtcacatgaggtcargtgtggaattttccacttgtgacatcctgtccacactcaagagtttcagattttggaacattttggatttcaaattttcagatgttcctccacttatgatgggattacatcctcataaacacattgtaagttgaaaatattataaggtgaaatttaatacacctactgaacatcatagcttagcctagcctatcttaaacctgctctgaacacttacattagcctacagttggacaaaatcatctaacacaaagtctatcttataataagtattggatatctcatataccacatattgctagcctgggaaaagataaaattcaaaatctgaagtatgttgaaattgtgatggtttcacgccattataaagtcaaaaagttgtattaataagttgacccatggtaagtaaatccaaattgtagtggtttcacacactcttaaagttgaaaaattgtaagttgggctattgtaagttggggactatctgtatgtaagaatattttagataatatgaaaatccttattgataaaaatatttattgtattcatggtaatactacttgctactagtagtgcaagtcctcttgactttatagaagttgactgaattcataacattaatgagtttggtagtaagattttaataaaaaagattatgatagactaaaaacagtgttttttatatacattttgtttgttcactcatccattgatggacgttcggattatttctgccttttgcttattgtgaataatgctgctatggatatggtgtacaattgtctgagtctctgctaatatttgtaatatcttttgaaattctaagaaatttgagtagtgacttgatctacaattctgaatttcttttataatctaaacccttcagtgagaatttcagaatgaattgcttttaacatggtagtttttattcctcatcaagaatggatactatgtcattatacaagcattcttttcccccaaagtaatgtgtttttctctttggattttaaaaaagaaaaacctgtgaaaaagtagaaatggctgctccagcaggacattacagaataacacagtgctcctagcattgcagattcagaaactttttttcccatttatctgtgttcatcagtctttcaaaaccttaacagttcctgtcaggcgcagtggctcatgcccagcactttgggaggccgaggcgggtggatcacctgaggttaggagtttgagaccagcctggccaacatggcaaaaccctgtctctactgtaaatacaaaaattagccaggcgtgatggcaggcccctgtaatcctactactcrggaggctgaagtaggagaattgcttgaacccagaaggtggaggttacagtgagacgagattgtgctattgggtgacagagtgagactccatctcaaaaaaaaaaactaaaaaaaaccaaaaccttaacagtccagtctcagaaaggatggccgtgtaatccacaataccaatttattgatgtaccaatttagtgattatttattgatgttctgcttgatgtttaacaagcagaacaggattctctggtcattcacrctttcctgtgtagaaatgaagatcagaaggttgcattgtaaatactaaagtggagcaatgaggttgatgcttctactaatgagtttctttaagtcacaacaggaagatttatgctactctcctatacagatacacctatcagaagaaacattgacaagttttttttctagatttcatgtgttagtcctactttattggcatccttttcacacaagtgacatgacaatatattgatatgaagtctcctgtgaatgagagtgtgggggacatccccttatatggatgtcatccaggaatatatcaacatctcagaaatggaaaatttagtaaaagtactcaaaacctgctaagcttattcaaaaataatgggggattttctgtagattcccatagaaatgagttaggaatatggcatataattattagtcactttgaaatgtacactgtgaatcaaaaatttaatagagaccgctttcaaccaactcatcaatagcccctaacttttccagaaggttctcatctcatgtctttatggaaaagggaattagtcaaaagaaagcaaaggcaaacaatcaataatctgacccttgtggaaaagttttgcattatgaaagaaaaacaaagacaaagtatgctggtcaacatcctaagggtgagtgtgcccacacaagatgagaaaataacactacactcaaaataacaccaataagaatcaacataaaatgtacaagattagctacctacaaaaggaatctgcaccaagtaatggtttatgagtgtgtggttgagaatatggtttatgagaagtgaaacagaaggaagagacctcaggaaagaggtctgggctggaaatctagattagggaatctgggatgaagccttgagatttaaggagctcttagagaatttaaaaaagaggaatggaaggggacaggactcagcatgaagggttgctgcatttagaaatgaagtgaggtcagagacgcctaggggagggtatggtcactgatagtagttgctgctgagaagtaaagcagattaaagactaaaaaatagggccttgatgactttcagaattttaaaatgagaattataagactgaaaattagattttagtataaaagaagacaagtgatgaagaagtagatctctagatgagaccgtgtattaaaaaatattagagcctgatgagcacagtggctgacacctgtaatyccagtgctttaggaggctgaggcaggagaatcgcttcagactaggaatcaagaccagcctgggcagcatagcaaaactctgtctctaaaaaatatgaaataaattagccratgtggtggtgcatgcctgttatcctagctactgaggaggctgaggtgggaggattgcttgagccctggagttcaaggctgcagtgaactatgattgcaccattacactccagcttggttgacagagtgagaccctgtcacagacaaacaaacaaacaaacaaacaaaaaagagagtccaatggaaaaacaggttgattaaaaaagccacaagaatcaggcaaaagttatgtttttgtttattgtggagaagaaaaactttatttaaagagaaatggttaatagaacaggaaaaattgaaacccatagaagaatgtttatagagaatgagagatagctcatcttgaagtcaggtgagtataaaaaatgtaacgggaaccagatgaaagttttctaaaaattgtcttagtaagatttgatttaacaaaaactggaatatcttgaactactgatgacagtgtttctagagcaacttcagaaatgagaacgtacatctaaaataactttttaaaaaggaattttcattaacacttagtattttatatgtaaaaacttctatttttaacaaattttggtaatttaaattccagaaaagaratatgagctgttttaagaaaagtcattttttcaaatccgttcttattgccattaggtttataaactgcattttatatgcctaaacatatgttactcatgaactcataagaaataatagttttaagaaaaaaagtgtttccagagttttaaaagtaattgaaaatattttgtttcaaagtctgaagatgaaaaggaacaattaaagaaacttatggaattaaaacagtcactggaatgtaatttggatcaagaaatgaagaaaaatgttgaattagaaagagagataactgggtaagattttaatatttcagatcattttaaccattcattaattgatttaatataattttactttgttcaaaactagatataaattcatttaatatctactttttcttaatgaaattattctcttttaaaatkgttttagaaagttgcagcacaatctgaaacttttggaatgcctaaatattacacttattctttaatgattttgaaagcagtaacaatgcctttggcatataatgtcaactgcactcttcatcttttactttgaacttttatttctgaagatattttcactttctttggtaatctttctctctttggtagtgtccttcccttcaaagaagatattcaaatcttttaatatctaaaaacctatctgtgtcatcctttggaagcatcaaaaattatcttgatttagcttatgctttctttctgcctctttgtgtgtgttgtgtgtgtgtgtgtgtgtgtgtgtgtgtgtgtgtgtgtagtaataaaatatatcatgaaaatttactcatttcccatggatatcccccatgtatacctgaggtatacatgttattaaacttctgtttgttttaaaacatatatgcctcatacatatacaaaagtatgtatgatttaagagtgaaatgagcaatcatgtttctactatccagatttaaaaatggaatgttacccattgccttggaagcccctaacatggctgcttttctgtttatttgctgagtacttacrtttgttctgattctaattactatttttctctcattgtctttctctaacgtggtttggcatcccttttactttgttaacgttgtgctagtaaagatttctggatctcttctgaaagcagcctttgtgtctttatacatgctttctctgctcatttcctttcttctaaaactctgcctgtttccttttccccttaactcagacgtcaaaaatgtttctttcctgtctcttatctactttgaatgatcttgatgttttttgtgtgtactttctttttttttttgtacttttcttcttataaacagtggtcaacggatatcaaatgtatttttgtgtctttttcaaccattcatgtataagtatgtgtatgcttttcttttctttttttttttccctggaatctctctgttgcccaagctggagtgtggtggtgcagtctcggcccactgcaacctccacctcctgggttcaagccattctcctggctccgcctcccractcagcctcctgaatagctgggattacagacatgcaccaccacgcctggctaatttttgtatttttagtagagacagggtttcaccatgttggccaggctggtcttgaactcctgagctcaagtgatccgcctggctcggtctcccaaagtgctggrattttaggcatgagccactggtccagcctaagtatgattttcctcttcaccttggactctgatctctggtttatagctaatatttgataataagttaatgttttatattaacatactaaaatggataggaataatttatttataaaaacttcatgtgattttaatgttaactctttatctgccatatatgtcatataatttttcttcacattatttacctaagattataatttcattagagtgttttcaaactatgtcagattgaaataaacragagaatcatgattcatttgtttttcttacatgctaaaacataatatctgtttaaataattattaaatgtttgcctttttaaaacttgagttactcattttgtaccttcctgcagatttaagaacctcttaaaaatgacaagaaagaagttaaatgaatatgaaaatggagaatttagtttccatggagatttaaaaactagtcaatttgaaatggatattcagattaataagctaaaacataaggtaatttttaataagttttgggaccaaaaaagtcacttaattttgggaaatatagacttctcaatgctttgaacagtgaaataaagatttttttttttaactttagggacttgatactaataaaaaaactttttttaaacttttaagttcagaggtacatgggcaggtttgttatgtagttaaacttgtgtcacgggtgtttgttaaacagattattttgtcacccaagtattaagcctagtgctcattagttatttttcttgattcctctcccttctctcaccctccatcctctaggaggccccattgtctgttgttcccctccgtgtgtccctgtgttctcatcatttagctcccacttagtagtgagaacttgcagtatttggttttctcttcctgtgttagtttactaaggataatggcttctagctctggacataggaacagacaaagatttcatggccaagacaccaaaagcaattgcaacaaaagcaaaaattgatagaatctaattaaactaaagagcttctacagagcaaaggaagtatcaacagagtaaacagacaacctacagaatgggagaaaatttttgcaaactatgcatctaacaaaggtcttatatccggcatctataaggaacttacacaaatttacaaggaaaaaacaaccccattaaaaagtgggcaaaggagatgaatagacatttctcaaaagaagacatacatgcaacccaacaaacatgataaaaagctcaacatcattgatcattagagaaatgcaaatcaaaaccacaacaagataccatctcatactagccagaatggctattattaaaaagtcaaaaaaataacaaactattcatctgacaagggactaatatccagaatatacaaggaactcaactcracagcaaaaagaatattctaattcaaaagtaggcaaaaaatctgaaacagacatttctcataagaagacatacgaatgaccaaaaggtatacggaaaaaatgctcaacatcactaatcatcagggaagtgcacatcaaaaccaccaagtgatatgatcttattccagttagaatcgctactatcaaaagacaaaaaatarcaaatgccagcaaggctgcagagaacagggaactcttagacattgttggtgggaatgtaaagtagtacagccattataaaaaacaatgtggagtttcttcagaaaactaaaaatagaactgccatatgatgtagtcgttctactaccaggtatttatccaggagaaaggaaatcagcatatcaaagggatatctgcattcccatgtttattgcagtactattcacaatagctaagatgtggaatcaacctaaatgtccatagacaatggaaaagaaaatatggtgtatacmgatacataaaggtgaaaacaacagacgctgaggtttccaagaatgcaggatctgtgccaagaaatgtgttcagaatctgggtgacaggatcaacagaagtccaaacctcggcattttgcagtatagtaacaagcctgcatatgtaccctttcaatctaaaataaaaatggawtttttttttttaaaggaaaagatttggtggctgggtacggtggctcatgcctgtaattccagcattttggaagccaaggtaggctgatcacctgaagtcaggagttccgagaccagccttgacaaaatgkcaaaaccccgtctccaccaaaaatacaaaaaaattagctggacatagcggcacacgcctgtagtcccagctactctggaggctgaggcaggagaattgcttgaaccctggaggcggaggttgcagtgagccaagattgcaccattgcactccagcctgggtgacaagagtgaaactctgtctcaaaaaaaagaaagatgtggtgtatatacaggatggaatrttattcagccaaaagaatgaaatcatgtcagtaacattatgttaagtgaaataggtcaggcaaggaagataaatatctaaggttctcactcgtatgcaagtgctaaaaagaaaaccgagctcatggaagtacagagtagaatcatgggtattagaggctgggaaaagcaggagggaggagaggcaggcaaaggggcggggaagggaggaggtgttgggtgatggctaccaaattagagctagctaggaggaatgcattccggtgttctatagcaccacagggcgaatacagttaaatataatttattgtgtattttcaaaaagctaaaaagaggattttgaatgttcacaagacaaataaatgataaatgtttgaggtgatggatatgctaattcgcttatacattgtatacatctattaaaatatctctctagccataaatatgtacaatgttgtgtgtcaactaaaaaggagaaaataattcatcccatgataaaatagaacatgggccaaactcagtgactcatttctaatgaatagaatgtggtaaaggtgacaacatgtgacttcggcattagattagaagaggcttcctatctcagactccttgccgttggaacccagccccgatcttgtgaggaagctcaggacacaaaggcagcctaggagttccagtccctcaggctttgagctgtgtccagggaacctgaggggaacagagacaagctgtcctggccgagattttcccaaaccacagattcctgaacagaataaatgttgttttaagccataaattttgggtactttgttaggaagcaataagcagaaaaaatgtattttacaaaaagagacaataagaaacataacttacacaggaaaaattagtctcatttaaagtagaatctgataaatgttgagattaatttattcatggcaaacaatgttaagcagatagccaggagaaagacgtaagagctattgaggagaaagttttttctccagatttaaaggtctggaatctgaactctccaaaataaaaacttctcaagaagactttaataaaactgaactggaaaaatataagcaactctatctagaagaattaaagcttctagatagagggggactagaatcttctggtttgtgcactaatgtgtctggttgctgatggtggccattggctggaactttggttggggcaggaaccctgagcacctactcgaatagtttgcaaatagtgtctcccattctacagattgtctcttcactctattaattatttcctttgctgtgcagaagcttttcagtttaatattgtcccatctttattttttattactattttttaaaattttattttattaatttcttttttttaacccaggctggagtgcagtggcgtgatctcagctcactgcaagctccgcctcctgggttcatgccattttcctgcctcagcctcccgagtagctgggactacaggtgcccaccaccatgcctgtctaattttttgtatttttagtagagayggggtttcaccgtgttagctaggatggtctcaatctcctgacctcgtgatccacccgccttgtcctcccraagtgctgggatttacaggctcagtgagccaccgcacctggccagtattgtcccatttttctatttttgtttttttgcctacggttttgaaaatagccataaaatctttgcctagaccaatgtcctgaagcaatttccctgtctcttctagtagttttatagtttcaaggtcttacttttttacatctttattcaattttgagttgattttagtatatggtgttcgataggggtctagtttcattcttctgcatgtggatatccagttttcccagcactatttattcaagaggatgtcctttccccaatgtatgttcttagcatctgtttaaaatcagttggctgtaaatacacgaatttatttctaggttctttattctgtggccttaacaccaataattattaccccttggaatgcaagtcaaattagcataaaacatttgcagctcagaaaaaggcttatggcattagaatctatattacaagattcattaattagagtcttattttaaaagtcttattctgggagcctttttttttgatgaggcctaaataactcaataggatgtccgaaaacttctttagaaattatagggcatgttggggctgggagcagtggctcacacctgtaatcccagcacttcgggaggctgaggcaggcagatcatgaggtcaggagatcgagaccatcctggctaacatggtgaaaccctgtctctactaaaaatacaaaaaattagccgggcctggtggtgggtgcctgtagtcccagctactgaggaggctgaggcaggagaatggcatgaacccgggaggcaaagcttgcagtgagtggagatcacaccactgcactccagcctgggcgacagagcaagactaaaaaaaaaaaaaaaaattatagggcatgtttatgggggaagtagtaagactttctgctaccccttagagccatttaaggaggaaagacatgaaacaatcatagaaaaatacaagtcgaagatcaagtgcaaatgttgtgtggcagagatgataaaaataaggaatatatttttgtgactcctggtggctttgactttgttcttgattttctgggtaatttaagggtccacatttgaagaatcttttatggttcaggtgacattttattgcaactgaatttatttcaaaatttgttcttggttttatgttaggctattytcaggctacttccttcattattacactatattattgtcttcattcagattgatgatcttacagcagaactggagactgcaggttcaaaatgtctacatctggatacaaagaaccaaattcttcaagaggagttgttatctatgaaaacagtacaaaagaaatgtgaaaaactacagaagaataaaaagaagttggaacaagaagtgatcaacctgagaagtcatatagaaaggaatatggtagaacttggtcaagtcaaacagtataaacaggagattgaagaaagagcaagacaggaaatagcagaaaaattaaaagaagtcaatctatttttacaggttagcttatgtgtagtgtgcctttgttcatttcactgcaaattgtattttggatatatacattatatgtgtttcctctacatcccttatagcaatttgttctgtagatttctagaaggatgatggcatctgtttctccctttagatattccagtttccatcattattataactaaattgatgatttagaataatgattttcatcagagaattatttgactattaagaccagttggcataaaacaaaaccatcaggaaaagaaagtattgtgatttagaaattataccatattcttgaattgttcttaaattacattgctcactttttaaaatttttaattaattttatctttaaattatcagagttcatgagtactaatgaaacaatgattcaaatgtttatacctcagcctttggatagctgggactacaggtgcacatcacgatgcctggctaaatttttaattcttatttttggtagaaacagagtcttgctttgttgcccaggctggtctcgaactcttggcttcaagtgatcctcctgcttaggtctcccaaagtgctgagattacaggcatgagccaccaaacctggctgataaatattttaaacttcagctttttttttcacatatttaaaattactctctgaatcactaactcaaaagtaaaggaaaaaaatacacaataattacccaggttttatataaattaaattttattaagggataatttacaaataattaaacacaaccattttaacagtttgacccaagtatatacttgcttaaccaccctctcaacagagaacatttccagaaagttctctcttgcccttttgcagttaattccccctacttcatcccaggaaaccactgggactttaacacaacttgtgttgtttttgccttaaaaaaaaaaaaacaaagctgggcacggtggctcatgcctgtaatcccagcactttgggaagccgaggtggacggatcacgaggtcaggagttccagaccagcctggccaacatagtgaaaacccatatctactaaaaaatttaaaaaaataatcagccaggcgtggtggcacatgcctgtagtcccagttactcgggagactgaggcaggagaactgcttgaatctgggaggcggaggttgcagtgaggcaagawggtgagagctagactccgtctcaaatacaaaacaaaacaaacaaattaggctgggcatggtagctcacacctgtaatcctagcactttgagggctgaggcgggaggaccacttgagcccaggagttcaagaccaacctaggcaacaaagtgagaccccatctctacaaaaatttaaaaaagtaattagccaggcatggtggtgcatggctgtagtcccaggtacttgggaggctgaggtgagaggatcatgtaagcccaggagttttcaaggctgcggtgagctatgattgtgccactgaactgaagcatgggcgacagactgagaccctgtctctaaaataaacaaagccaaaggaatgtctttcctctcttacccacatgggtatatgagtgtgtgagtgtgtgtgtgtctgagtgagtgataaaaatctacttaataacatgagtttgtgtgtctatgagtgattaaaactcaataatttaacaaatttgttttagttgggataaagagcgattgagaactgcgtgggacccctgtgcttatgagagaggatggagggtgcaaactggtrgaaaggatgtgaaaattaacagagaaatttcaactgggccacttgaaaatatgtagccgttgtgagagtagaaagtcttcactmctcattctcagctctttcccttccctcaggctagtgagagataggagtcttggaacacaatctacaaggccaaggtggtaacaatccatgataacacagatttcttcacatggtatttatgatagtcttacaaagctctgcatgttagctcttagagacatggaatgagaataggaagaaatcttagtgataagccagtgtagtttcccatttkacagatgaagagacctagggaaaggttaaacagcagggcccaagccatagagctagtcaggctcaggatcacactccacattcctttacttgtagtccaggtgattccataaccttatgctccagcaggtagaattacygtaagagatccaacaccttgggcttttttctcagcatgtattgatgcgcacagcatttatccctaagaagctctaagttcctgtatcttacatacagatgattgctttaatttactttgccaggtgtattcataaaatggaatatcacatcaaaatttttaagcatattcaagtcttccccatgaatatattttaacacaaaaataatttttataagatttttcattcgaaaatatctccacatttgtagtcattttctttcttaggttttccttatgttaccaattataattttttattttctatatgacatttccccccatcgttagacatctgggttgccagtcagcctttattgttttgattacttcatcaaggatgaaaatgcttctctagtagaaactcactttcatttcttyggaagtatttggattcccttttcaattagaaccctgggatgtcctcttatctctttgaccaatgcctgctggcacagagatctttctmtttttggagtttgggttaaaaacaaaacagcccttagacaccgagtaggtgaccrtggtcttactcaggttatatatttttaaaacatatgcttttaatttgttttaggcacaagcagcatctcaagaaaacttagagcagttwagagagaataattttgcttcaatgaaaagtcagatggaactcagaattaaagatctggaatctgaactctccaaaataaaaacttctcaagaagactttaataaaaccgaactggaaaaatataagcaactctatctagaagaattaaaagttagaaaatctttgtcaagtaaactaaccaagtaagtcaaaatatagaatcataggaaataaattaagctcattaatttgccttgaaagcataattcttaggttcatgagattaatgggaagtgaaagctaaataggtaatataattttggaaaatgttagtaaattaacttacctttaaaatgtgagtccaggacagtttatgtctttcctctgtttttttttttttaattttatatggcttttccgttaatattcttaggtagttaactggatctatgtctttcagctatgtgcttttaaaactttgtaatttagacattgatattgtcatcagattgcttatcagcattgccataaatataattattaatgagttgggctgttttttggaaaattacaacttaaaccagaagggtcaagtatcactactactctgcacattctggcactccataaatgaactttccttgattgtgatatctggtattatcactacagggtgccatgagacaaactaccctgtatagtttttctactacttaaaggcatgctagtgaaatagggaatgattaacgtagggatgaagggaagtatawtttataaagtggttaaaaataacaccttggtcagcctgagggagtgtgtggaaaacaggtcaggccccacctctgatgccttgrggacaatgttaggagctaactgcctttgagactctttagttctttttgatcaccaactcagctatcttcttttcccctacaattttttgctctgaattattccttggkgccagatgcctaatatttttccagataatgggtgaaataaatgtaaaagggtggtgaaagcaaatgcttgcacatgtyttgaggaattttttaatctctaaactggtttactaaatacaagtatttttagctgggctttttcctttgttattagttttattaattgtatgtatcaaaacatgatgtttttgatatatttgtacatggtgaaatggttattatagtcaagcaaattaacatatttatcatgtcacatatttaccctttaaagacaagtatttttaatggcatcctcaggaatcttaccagtggagcattccagaaggcagcaggtgttacctgtgaagttatacatcattggtagccattttcttcccttccctactttgcttgaattacttgtttgttggaaactaccctagaaacatatgcacttctttagaacagtctaaaaattataattgcatacagtaggcatggtctgacacatttttcagtgttaaaatactggttaatgggaaatttcatttactcctatggtaactttttaaaaattgcaagtcttttaggaatcatttagggaaaagtaaaatactaagcatgtgtcttctgcaatcttcacagaactaatgagaggctagcagaggtcaacaccaaacttcttgtggaaaaacagcagagcagatctttgttcaccactctcactaccaggccagtcatggagccaccttgtgtgggaaatcttaataatagtttagatctcaacagaaaacttattccaagagaaaacttagtgatctctacctcaaatccacgggcttcaaataatagcatggagaactacttgagcaaggttagttatgttgtcttttttcctttgggtttcaaatttctcatgtaattctttttttgtttgtttttttgagacagcgttttactctgttgtccaggctggagtgcagtggtgccatcttggctcactgcaacctctatgtctaggttcaggcaattcttgtgtcttagcctctcagatagctgggattacaggtgtgtgccaccacacccagctaatttttatatttctagtagagactgggtttcacatattgccaggctggtctcaaacttctggtttcaaatgatctgcctgcctcaccctcccgaagtgctggggttacaggtgtgagccaccatgcccagcctcaaatttctgatataattmttgtttttaatttggtgaaataccgagttgtttaattgacttatgcttgataagtaaaggtcataattatctgtgctaataaagtgaggaaacagaaattttagttttttttttttttagtccctagagctctcattttcaagaggtaccatttgttaactttattcaataaatgtaactgaactgtcacattttaaatttctttaaaagctgaatttattagaaatggaatattattgcctattgcctgatagcaaaaggtatacgttgagatactttggctttccttctaatggatttgagtttggctgtggttgatagcactttgayagttttctggcaccatctcaagtgttccacccttaatcataagtgaatgaatgattggcatccaaacacttaaccacatatggaaatttattacttaaagaactccaagataaatacttcttatgaattaaacaaactctaacactgattaatttgtatttttaagttttgtcattttcttacttaggagtacattcttagttgctattgttacagcatttttctctcaatttttgtaaaatgtgtctattactgggcaattgcacagtggtttttaaatagttaaagcaagcaaatatgtgaatttaaaaaatgcacttgtgccattacttgaatgattgatgtctaagatggcagtgatatcaagagtgtttagtaagtatgatcaaacaattattttcttcctacccagaatttcatgttaagcttcacagggtcctcatctcccctggatcctagctttacagtwacaaggtcctagctagccaatattatgttcatattgttagcttagttttgtcttgctcttctagaacaatagaaaacccattgaagaggaaccttgcaatccagccttacgatttcactcatagtacgacttcatttctggggatctcaagatgaattcaacaatgacaagttttatcaattgtagacttggtagggaaaaaaaaaatcaactatgcttgatccagtttaagatacttgtctaacttttgaccatttttgactgggggaacaaattacaaaagctggttgcaatggtgaacacttgtaatcccagctacttgggaggctggggcaggaggattgcttgagcccaagagtttaaggttgtaatgtgtttttactgcaactgtgaatagcagccgcactccagcctgggcagcatagcaagaccctgtctcttaaaaaattacaagaagcataaaacatttgtttgaacaaaaataaataaatagcaactagtttttgttgtgtatcattatgaaaatatccattttaatcagtgcacgttagcttaagatttaatggtattttcatgatcttaatgcagagaaaaaaagtgtagactcatgttaaatgagacctcaaccttgtttctttaccaggcctcatgtcctaacaaatcatagaagaccaagtctaaggtttcttagacagcactgcagccaagtggcttaacaaggaacaaatcaaatgattgttttaatacataaattataagatctatccagctaatttttttcatcattttgttagcttagttttgtcttatttttctgacaatgagatgatcagggtctaaatgcttcagagtcatgaaattttcctactgggtacaaaaagaaaatgaatgtcaaatacttgtrtaggccgggtgcaatggttcatgcctataatcccaacactttgggaggccgaagcaggaagatcacctgagctcaggagttcaagaccaggctgggaaacatagtgaggcatagtgagatctcatttctacaaaaaattaaaaaaaattagctgggcatggtggtgcacgcttgtagtcccagcttcttgggaggctgaggcaggagaatcacttgagctcaggagctcaaggctacagtgagctatgatcgtgcttctgcactccagcctggatgacagagtgagaccctgtctcaaaaaatccaaaacaataacaaaaaaccttctgtaacttactaagcatgatgcaaatataaaattttctcattagttcctaccagaaaactcaggtaacaacattttataagatgatgaaagaatatgtagatacgcaatgtaagggaagatttttgaggaaatgtttttccttaattgrtttttttggggagcaaggaggtgtttatttttagtatttctagataagctgaaaaatattccattggtatacatggtttctttgtggggcactggtttgccaaaccatgttagatttaacaaaagagattaaaaagaaccattctgtcaggtcaagtgactttcatacattaaaaaaatttttttgaaagaatagaacttttaaaaaatggcatgaaactatattacataaaacagatagaagtagagctctctggctaaaggacaggtaggggctctgaagctgtgacttccttatcccttaatcctgcaatatcctctgtagaaccttagatttctgtgggacatagtttgaaaactactggttatgaaagaatccttctaattagccaaaacttgttggtacattgttcttttataattttctcctattcttatattttaaaatgaaaaagtatacatgaagttgcagatgtgctccctttattaatgttggacctcaggctgcctccgccacctgaagcataacccccacctggaaataaacaaagtccacagagaaaggaggagcatttttataaaacgtagtttatttattttactccataatagctttcgattttgtattatgcattaaattattagcgtaagagattagtaatttattaagctttttaatttcctctagcagtgttcagtttctcctaagctattgctctatacatttcaaaaaccatcgatggcaccttgtctacctcaataggacagttattaatgtcaccaagacatttttctctccttttttcttccatagtctgtatcaggcactgtgttaagttatttaactggagacaataattttaaatttgtattaagggaaatatgaggaaaatgtgtgatttaatgggaaattaggaataaaatgaaagggactttttcaaagtcatttaatgtttgccagttttcacttttaatataggtaaaaccatcccagtttcccaccaaccaggacaaaaccagacttgtcaacacagaagacccttttcctaagctttcaagtgtccctcccagagcacctccctcctgggttctgggtctgccccttttccctttgagcctttatgtctgacctggtgtccttttctcaaaagtagttgccctcagctgtcatttatgtggtaaaatattcaagggttggccaggcatggtggctcctgcctgtaatcccagcactttgggaggcccaggtgggcggatcacgaggtcaggagtttgagaccagcctgtscaatatggtgaaaccccgtctctactaaaaaatacaaaaattagctgggcgtggtgttgcgcgcctgtagtcccagctactcaggaggctgaggcaggagaattgcttgaacccaggaggcagaggttgcagtgagccgagattacgccactacactcaagcctgggcaacagagtgagactccacctcaaaagaaaaaaaataaattcaagggtcattgagaggctggaagagactttatgtagcgggaggccactccagggctggaatagaggcaacaactttataccatataccctttaagtgttaggcgagaaaaataacctgtatttaaatttgttatgcaggaagtttctctgtctagacagttaagatttcttcaatattagagtaagcaatttgttaagagtatttcatttttatctaagcaaaacgtacatattatggaagtatttgtaaatagagtataaagaaataataaaatttattacacgtaggaagtaaatatttaggagaagtgagaaactacattacmttagtagttccttaatacaagtcatgtaaaaatgtatattttacgtcatgtttattaatgaatagcaatataagattcgttcaataaagacttctccttttatttggtattgagttattacttttacaggacctgtctactaatgctattgtcacattattcattgtataaggcctatctataatgttattgtcacagaaatatatggaaaacagtcttacaaaatattggaaaacctgttagtcaaaaaatttaatcttcatacctaacatttttaaaggcattggatatcatattatcattatcaccacaaagtacctattatgctcactatatagtgtactatttcagaccatgttctgggtatttagtgagagaataccttttataaaaaagatttaaataagagcactctaaataggccacttgcaatatagtttgaaatattcccacacatttcataattaagtatataaatataattagatatttaaaaaattggtactaatttctgaaatcaaaattacaattaaagagctatatattttttgtttataattctaccaagttgtgaatcaaagaaactaagcttgaaaactagctccaacttatatttatcattttttgagcaaattttgtgtttacatgaataaagaaatgttatttataatatatagataggataatatttattttcacttttttgccagtagaattttcacatgacattataatagcatcactttcttcatgtatatattgatgattctgtaccaaaaaatagcatagaacatactttaaaattttaattctctaaaagtagacaatgraaagtggtttttttgtttgtttttttgagacggagtctcgctctgtcatccaggctggagtgcagtggtgcaatctcggctcactgcaacctccacctcctgtgttcaagcaattctcctgcctccgcctcccaagtagctgggactagaggtacaaggcaccatatctggctaattttttttgtattttaatagagacgggatttcactatgttgcccaggctggtctcgaactcctgagctcaggcaatctgcctgtcttggcctcccaaagtgctaggattataggcttgagccactgtgccccaccagaaagtttattttaaggaaaaatccactaaagtgaaaaaactgattaagctttataaaggtcagagttttgctaagaattacaaagtaatgcattcatttcaaactatgacttcagttgtttgaacttgtacaaataagagaaaatatcacctttctgacattatatatatgcagtagaccaatattaattgtactttttatcagattaaacaacattacacattttttaaatctaaacttaaaacaagtaggaattttatttatgtgattatttttatatttaagcaatcaagttaagtgtagtctttaagagtattacaggccacattttgtaagtgatacatcatttctatgttaatgtctcttgtctaacttaaacattataaataacatttgacttttttcagatgcagcaggagttggaaaaaaatataactagagaactcaaagaaggtatgttgccaaacttcatgaattaaatttagattaattaattgatttctgaaataaattgtaaatcgtgagtgggatccctttccattgtttggctaatagatactacattaaatgttctttcttacacacatctaatgaaagatgtgaaaacatgaatattcatagtgaagagtatacttactttgtctcattaattcatcatgttccatagctttaaaaaaactcaagaaatctttgcacctcttttttttccggctctacactttcttcacttctgccatccccatagaactgtagccagcatgcagaaattattcttagaaaacaaagacatcatcaacttctcaaggttatggtggtgatttaaggcccaaagaccccagactcactagtaatatctagtctggaattacagttcataagcagttgcttgacaggtgacatttgaaatctccagtcatttactttgtcattggtttccctttgccctcaggagaagttccaaattccttagcatggaataaaaatacccacatcaatgtggtccttgtgacgttattcaaccttatttctcaccccttgctgttcttcgggcccctttgctctggcatccagccaccctagaccacgtggaattccacagggagcttcctcagctccagctcttggcatttgcttcttccttccgtctggcatatgttttccttgtacttcaggtatcagtctacatattgcctccatcaaaaagcctacgttattgactcagaactgggataggtgtcccttctgtgtgttccagtagtgccctgtcttatacctgtcatgatatctgtgactttgtatggaaattgtatgtttgtctgtttttttcagattatagcatatgtttgttagaggtggatcatatcatcttcatcttgtaattctagtgcttactttgctcatggttgttgaataaatgaatgaagagtgagaaagccagaagctctgatatttaaccacaaggataattaattcagtgtgcaaccatgggcaaattatatttaatagtaatattgtataatagttgtgcatacatatttttctttcttattaatactgacaaaattctcaactcttttactgacttccacttagttaactatgaaatcttttaggtaaggaatataattctttctttttcattctagctgctgctgaattggaatctggatcaatagcttcccctctagggtctactgatgagtcaaatctaaatcaagatctagtttggaaagcatcaagagaatatgtacaggttttaaagaaaaattatatgatctgaaagataagattttattactgggctgtttatgtgacattttrtttctcattaaatattaatatatgacatgtaaaaatattaaaggaacgtatttttgtatcatatatgtcagatcaaaatttatatagtattttaaacaatgttacttggcttctttaacttttaagtggattttgccaatgaaaaccaggaatattgagttttacatactcaaactgcccaaatgtgagctgtttaaacagccaaaccactaagttgtcattaatactttagtgcagttaattgatggcttatttgtattttgtaatttttatcactatatgtagtggtagatgtctaattggacttagacatcattttgttgtgcaggaactgtggtcattgttcatgtttggatgtattacaattgttacagtgccatcaaatttacataattttaattttaagcactgatttatatagctgttctcagggagaaacaagatttgcctgattcaccttttctgtttgtttatttatttttaattaaccttttggaaatagccttcagtttagagaaaatttcgaagttttagtacaaagactttctcctccgaacaatttgagagtaaattgctgacattatgtcatcacccctgattactttagtgggcattcctacaagtcaggacattctacataactacagtgcaaaccttgcaatcagaaagtcaacattaayacattctagtttgttacttctctgtaatgtcctttatagcaaaaggatcccattctaatccatggcttgtatttagttgttgtatctgttagatctttcagtctggaacagttcctcagtctttccttgaccttcatgaccttgaatattttgaagagtaaagtctggtaatataagaatgtmcctcaattgggtttcatggtgattagatttagattatatgattttttggcaggagtatcacagaagtgacccagtgatcttctcattgcatcttacctgtgaccctacagttttgatttgccctgttactggtaatgttagcattgatcactaacagtggtatctgctgaatttctcctctgtaatgttattttttcaccttgtggttaattagtrttttacagggaggtaatttgagactatgtacatatctctactccccatcgaaccytcaatttattcatttgcttgtatcaaataaaccatggattcatggtttattttattcagtgagttataattcattaatattgttattaaaaatttgtttttcttttaagaaatgttatattttgacaacttcagacttacagaaagattataagaggtagtacaaataatttttggatattattccccaaatgttaacattttactgcatttactttatcctttctcccccttctcctcctgtctttctagatgaatatgaatataggtacttaatacagattttttttctaaactgtttgtaggttgcagacacgatgcctctttatttctaaataatgtgtatttcctaaataaaaggaattaccttacataactgtagtataatggtcaaaatcaggatattaacactggttcaatgttaatatctaatctatagaccttacgcagattttgccaattgtctccaaaatatccttgatagccgaggaaaattcaagatgggggattttcaccaggtgtgatgtgttggtccaattgttccgtttctatagtctccttttatctgggatagttcctgagtctttctttgattgtaatgacatttatgtttttggagagtataggtcagctgttttgtaggcgttctctccattttggtttgtacagtgtttcctcatgattagctttaggttgtgccattcgggcggggctttcacacaggctgagttctctgcaatgcagcatctggaggcatctgctgtcactcacttccattactggccaatgttgactttgattatttgatttgttgaaataatcaaagtcaacatcctgccatgtttgtccatggttaagctactatatactttgtatttcataaatatcttgtataaagatactttgaggctttgtaaatatctggctactactcagaacttcacccacaagataaagcatttcattggtgatttgtgcttgaatcaattattattatgatggttgccaaatgatgactttcttattccttcatcccttctatattgataaatagaacaaaatcagtgaacaaatagggggagaagggaaagcttactaatttggtgttcagatgccccctggacttggccagtagtagccatttcaagctgactttgtgtccttctgacctgtcccccttattctttgagcacttcaagggtcaactgtatttttaacttccttttctgacagcaacctggctcccttcatcctgaatatatattaagtactcatttaatgccgtcgataggctttggaatctgactgtaagtgaaatgacatataacagaaccaatttggcataggctaaatgatacaaataaaacataacgttcctatgacatattgttggtcacaaaaacatcactaatcttctaagtaaagaccccaaaacatgaatactaaacattgaaataaatgtgagctctacatatattaggaaagattaatttaaaaaattaagatactacccaattttgggtgcgtcagtgagtgatagtggttgtagtggtggtgctgtgttaaatcaaggaataaatgttgcaaagtgaaaaaattgtcaggagcacctgctgccatcatgcagctatttgaacactatttttgtgttcaaaaatagtcacaaatatggcaggctcatggagcactttcataccacataattgtgtaccacagcatttgtgttatgaccatagaccctacaacattttattttatagtaatttgcattcattcattcctttcttaacctgcttatcccagttcagggtcacacatggtcagagcctctcctgcacttaagggtgcagggtgggaaccagccctggacaggacatatcccattgcagggccactcacatacacccaccctcactctaactgggaccatgtcatgacgtcagcacatcagataacctaacatgcccagctttgggatgtaggaggaaaccagaatacctggaggaaacccacgcagacaaggggagaacgtgcaaactccacccagatggggccccagttgggaattctttctctcctcagcatgacaatgaaatgatgttgttcaagaatctgctgtatttactgatttgttcaatcctcttgtgtgtaaccagtctcttgtgtcccggcccctaagcagctgtgcttcccactcccccttggactccagcaccctttatcaggttgccttcaccactttcctcccaagctgatgctgtcttcaccccatcctttcccagacaccctgtgccaggccaccctcttatgctgatgcttctgcctcaggtgctgaaaacccacgtgggactatcctttcccccgtatggttgcctcctgactctgttcatctttgatacctcattctatcccatctacttttcaggagtgcccttacttgacctccaaccctgtagagggtgacactcctgatacaggagatagaaagaaattatttaggcagatagcaagggtaaaagagtccttggcaaaatttcccttttaacaaaaagcaggccccaaatcatttcttttctaacaaggagcagcctgaaaaatcgagctgctgacatagataagcaagctgaaaccttgcatgggtgaatgccggmaattgtgccaatagaaaagggctacctcagggctggggatgttcaacatggaggcttcatcttccctattctttgtacagtaaaggaacaggcaacatggcactggccaggcagagaacccatctgcataataaaagattagggtgggggcggccagattttctgcactatgcaaatggcacacctagccctaaccagttttttgcaccttatacaaatagcatacctggtctaaccaatcttttgtgccctatgtaaatcagacaccaccacctcaagttcatctataaaaccctgtgcatttcaccacggactggaagacccgcccaggaccctctctctgcaggggagagcttttctttctctcacctattaaacctctgctcttagcctcaccccttgtgtgtccgcatccttgatttctttggcatgagacaatgaacctcagatattactccatcagtgatgctgcttcactcccacgcttaggcccttctcattttatccagactccagcccctaactctgggccaccacaactctaattttgtttccaggcttagtccccatacttttgaaccgaaatgttcaggaagagaaaggagaataggactccatataccatttataatcaacatgccgagctctacaaagcaagcattttttattggaattgcattgaatctataatttggggagaaaagacatttagaatgttgagttattctgtcttttgtttgtttgtttgtttgtttttgagacagagtctcgctctgttgcccaggctgtagtgcagtggcgtgatcttggctcactgcaagctccgcctcctgggttcacgccatcctcctgcctcagcctccccagtagctgggattacaggtgccgccaccatgcctggctaattttgattttgcatttttagtagaaacgaggtttcatcacattagccaggatggtctcgatctcctgacctcaggtgatccacctgcctcggcctcccaaagtgctgggattacaggtgtgagccaccgtgcctggcctattctgtcttgttaacttatagagatcttgcatatatacatttttagatttattcccagttatttgatacttttgattctattatgttaccttccttacattttatttcctgtttcttatagaagtaaaatctgtattttatgtattaaacttggattcagctatcttgctaaattcatattttttatttgagtattttatctgtagagtcttggatttcccatatacacacaaaaaatatctgtaatagtgacagtattgtatcctttccaattcctggagtttttgtttttctttcctacttcaagaatgatgttgaataaaaggggaaacagtaggcatccacattttgttgaaattgcaaaggggaaacaatatttttcaataagtatgtagatggcaggcttttgtttttatgatgaatattcttcattattgtataggtttcctattgctgcataataggccatcacaaacttagcatcttaaaatcacacacacttatctctcggtttctgtgggtcaggagttcaggcatggtctatctgggtcctctgcccagggtctcacaaagcaattgtaagatctgaggtttattttgctgtaaaaaacttttttcctgtgagtttcagctggtttccatcagggaagctgagcttgtctgcttctgtgtgggcggagggtcatcttcaatctgggccccattgctaggtaaggagctgagttgggagtttgtcttgcaaattctctataatgactaaaagttttaacaaccagctggtcttaatttctacttacaattcgagttctcagaaattgtataatttgtgtgatcattgttttgcttagctggttttgcttgtttgtttctgtcttcttgggattttgttgggttttttttttttttttttttggttggttttggtctcaaacctatcagatttgatgaattctgaacccctctagcctatgagtgtggaattttcactccaaaggaaaaaagagcaccatgcttttctcagcctttcagggcattctcatgtgactgagaatcatgtgagggtgtctgggaggaatgcctcctaagagcagcagtggctccaatgaggtttctccttcaggagaacataactagggactattttcacctggcaggtgcatataaggagctgacccctcccacatcttaagcccctgacatattgtgccaggtagttgtgacacaggtggaccgaaccagttcagagagtaattgccctggaaagctaggtccacaagcagcacactttgggtctgacacactcactgacttaataatatctgaaggagaaccctaactataggaaacgaggcctctacattggctaaaatcccagcagctgcgcaacaaaaagttacaaccttagaaactctggctgggtatttgcaaaatgcttatggcgaattgtcatgcaaatatttagtcaaatggacaactataactgaagcagactctaagttacaatggcctagatggggatcttctgagatgcccatattagtgcacctgtgaactagaacagaaaaggcatgcacaaaaactaaacagccagaatgggagagttgctttgagtgatatctggagaggagcaaaatgggggaagattgcctcatctccttacaggaggccaagaaacaatttagagatgctgagaaccctctagtgctttatctcagagaaatcttcagaatcacttacttcctcttggtgcctcccccacctccacgtataccgctactttatcccgacctctttgaacttcctggaccagatctgttccctcctcctgcgtgctccattctccattctaccatcttcccctcctcgactgctactcactcaacagaaggcagctggggatctaacttccaagactctatctcctgctgattctctgacagccccaatggcaccctctcatctggaagatgggaaaagggggaccctatagggacatctctcatgattgccctggtttgaaaacaaccaataatagaggaaccccagcgtttgtctatcaattctggtcaaaggctgagctgcgaagcacagttatagaatttcctgacttccataaagatccaattgggtttgcccacgaatttgagctcattatcagaacctatgacccaggtcattcagacctttaccagctggtacacatacttgtttcagaggctaaagctaagagatggctagaaaaatcacagaggtcagacccgttagcagacttaatcctcaaaggcccaatagaatgacaacaatcagcccccaaaagtccagaagacaggcr

SEQ ID NO: 6844 - DNA, 775062 bp, Homo sapiens
  misc_feature (1)...(775062): n = A,T,C or G, or insertion/deletion polymorphism (see Tables 1-2)
agagcttttgcaaagattaaatcaggaatactctaagaaaaggattagaaagctttttggtctgtcagtcaggaagacaagttctgtagcactgaggaaaatctttttccttttggtgccttcttctcccactagcaaaaatgggtggactgatttttgccctgcctacctcccagaggcaaggcccacagtagtggtgttctgctggggggtgacactgatcacagagaggaaagggacacaggaatctgcagaatcgttattctggaaatcctgcagaatggtggtgaaaggtgaattctaggcagggcattgtgcctgagctgtgccttctttgacctagccatggatgtcctttggggaatgaagatgatgttcttgcaagtttgtatcttggcaggcaggtggcgcaatgattaaggaggatacgatgagaccacagcattattttcttccaatgcactggctttgatgtgttagaaaagaagagaattactttgcgggtaacatgccctggctcaaagcttcttcatcacaattggctgatctgaggccagtgacctggggcagggctgggaagtatcccacggccagactgactgccacaggcacctctttcctacacacacctgctctcccgaggcactggagacaggatggaagcatgtcagtggaaatcttctggacatcttttttgacaactagaagtcatttgcacacagttttataatttattttaaaacatattaaactttggaatcatctaaatgccaggagtatgccatctactgaaatgttatccaattatcattttttaaaatagtgttttccatgatatttaatgacttagagaaaatgctaacagtttcatgttaagggaaaataggataaaagttagatgtttaatctaaccctaattttgcagaaatacacacccaaggaaaaggtatgagataaatatataaaaatattaatagtggttattttggggtggtaagattctatgtgacatattcttttttcttgtcactgacttgaagcttatatgaaacttttatattccaaagtttataatacatatgaattattcttacaagcagaagtaaatataaaataaatatctataaaaatgtaagcatgtgaaagcttgttctgtaagtcccactctccagcattataaattacaaacagataaatcacttcagaggtaacagactttccttgtcgtgccaagtaacctggcagagctaagcctcagttttctcacctgtaaagtgggaaaatagctacagccttttttttttttttttgagacagagtctcgctctgttgccagttggagtacagtggtgcgatcttgactcactgcaacctccatctccccagttcaagcaattctcctgcctcagcctcctgagtagctgggcttacaggcatgcgccaccacatccagctattttttttttttttttttgagatggagtctcgctctgtcgcccaggctggagtgcagtggcgcaatctcggctcactgcaagctctgcctcccgggttcacaccattctcctgcctcagcctcccaagtagctgggactacaggcatccaccaccacgcccggctaattttttgtatttttagtagagacagggtttcactgtgttagccaggatggtcttgatctcctgacctcgtgatccacctgccttggcctcccaaagtgctgggattacaggcgtcagccaccgcgcccagccaatttttatatttttagtggagatggggttttgccatgttggccaggctggtctcgaactcctgacatcaggtgatctgcccgcctcagcctcccaaagtgttgggattacaggcgtgagccaccgcgcctggccactactgcacttttttacttcacaaagagactgtgaagaccaagggtggttagaaagagggatactgctgactttaaaagaaaacacagtggtgattcaaggaagggcagggttactggtggcagtaacagttgagatctgacatcaagtcatagtaataacatgaactttgttagctgcctttatccacaacagcttatatgctggtaggactggtaactagataattcatactgttgaagctgtagggttttgttgtttttttatcaatttttcttatttttttaagtgacaaaaagtgtgtttatggtgtacatgatgtttcaaaatacacatacattgtggaatggctaacttaagtaaattaacacatgtattacctcacatacttatcatttacctgtgatgagaagacttaaaatctctcagtggttttcaagtatacaaaaaaacattgtttatccacagtagtcaccatgttgcacaattagatctcttgaaattattcctcctgtataactgaatttttgtatccttggaccaacatcttcctgatccatgcctccttcctactccctgtagttttttttttccagcagggttttcctcttggaattttcatatctcaaatttcagactgttaaattaagtcccttttttgaacattcatgaaataatgtcatgtgccaggaaaatccaccagagggcgctagatcatttaaagagtcaccacctggcttctccatcgcaaaatcgcgaagattgatgtcagagtattggaactaggtccaggttggaggaaaagaaaatccattgcacattaattgcgatgctggccaacattttagcaaataatcttttttgttctccttttaccttagtcactctgcttttttagtatgtatgtttatgcacttccttttacttcttttaaatcagttaggactgttcagattagaatatttaagcttgaaacctctgatttgctttgagagctgccatagacacacatgcacatggtacagaggctgcccttctctctgggaagcttttgaatgaatttagaaataaaaataaggctcgtggtgttttcagaacagagggtgaagtttctacttctgttgagactttcagttcttgtgcaatggacctcaatttccagcctgcagacacacctacattaggggaagatgtgctgggcttagagtgcttctctatacctttcccatttccaaggctgtccagggactggcaagaaaaggagtggtgttgggtagtcagagagctcatttaggctggaggggctctgctgtgccctggagtctggccacagtctggctgtggacatgctgtggacagcatgacatgcaggcatgtgcacatacaattacgagctcaggggtcagaagatctggttagacttgcctgtccatttttggggtcacagtaattatagttaagatctgtataatatttccttccttcctttttcttttttctttcttttctttctttcttctttctgacagtttcactctgtcatccagactggagtgcagtggtgcaatttcggctcactgcaacctccgcctcccgagttcaagcgattcttatacctcagcctcccgagtagctgggattacagacatgtgccaccatgcccagttaatttttgtattattagtagagatggggtttcaccacgtttgccaggctggtcttgaactcctgacctcaggtgatcccaccgcctcagcctcccaaagtgctgggattacaggagtgagctaccatgcccagccttctttttcatcctcacatataacccttcgaggtaggcagggaagtttctggctttattttgattgtataaatgaagaaacacatcaaatcaaagatacctaaggttccttttaagtttgaggttctgtctgtgcagagccttttcctaaatttgtaatgccaggggccaagttttctggaagtggtgcaaaagtttgtgaacaatgtggaaatggccagagagaactgggcaaaggcctgggaatgtctatttctggtggatggtagcactctctcagtgcttaccagccaggccattcagggaggaggtgagagactggggattgtaggaaggaaaggatattgacatcaacactgagagtttctgatgattcctgactaagccgaggctttggacagcacagaagttgctaaaagcttcaatcagcagaggcaggggtgatgaagagagcaggagatggcatctgaggggcctccaagcaccctctccaaagatgctgaggtgatgaaggtgatgatggaggagaaaaagctatagatcctgcagttggggtgacagaagtcacagccatcggctgcttaccagtagaccccagactggcatttcaggggaatccaggctgtagggaatgtctaagaaggccccagaggggatttgctggtttgcaaaatttcaattttgtgggtgagggaatccattctggaggtttcatatcccactggggagacagtcctatcctttgctgccctttttatgttctgggtgttttatttttaaatttcaaatcttggccttgatttaaggaatgtccttaactttcttggcattgctgaggcacaaaagcagcaaactacagccattgagaggctaataaataaaggaacctcaatgccatagtcaccttcctgtgcatccccacagcacttctgggtcccgctcccccaacccagtaccagaaaaggcccagggcctttgcatgcttgggtctggtgtggcagggatgcattcagagtggctgaacacagaggccgaggttggaggtactatgggatggtatggagaggaggctcagacaattccattttctggagcacactttctgcagctcccttttacatacacttctttttgagaaccaaatactcaagaactcttacctcattccattttctcctttgactttggccttgactctttcttagtggatgtgtactctaaacccaatgaatgtattccgaatcaagcaagagagaagcttcaaacatcctcttcagcctctctgcccagctcagcctcccttgctcgctcttccttccagagacctccaaggacaagggcagggctgatctgactctcacggagacagcctcaggtgtaaagctaaggatgctaacttgggccttttccatgggaagagctgaaaggaacctgagaattccaattaggcttaaactaatgagctggaaactttggggaaaccactgcagcaatgagggaagagcgtgatcatcytcgatttaattagcgctggaaraacttggggtccagctggtagcacgaggacggacgctgttcagggggcgcaaagtttctgaaagtgtcagaagggggattcccctggtggtgtacggagacacgctacggaacaaacacggactccttcttcatcttaagtggggagaagggaagaccctaaatggggaacggtgagccagaatgaagtctggagtccctcttcccccatctgccctcctcacaggatggatggagtctgagactatatgagaggaaagcaacccttcagggaactctattgtctatcggggcctgcactatccccaggccaggtcgtccttgatcatttctgcctactctttgttgggcagcctctgttgctaataaggaaaaaggagagaaaccacctgctgctgtcagaggccacagaccacccgctggccttcctgactctaccctccagccacacgcgggaccctgggcacataggtagcaggaagagcgaagtaggggtgggtagctgtgtgtatcctggcgtggggtcctcctcactcccgaagcccgagggtcctggggagctcagcctgtggaatccagttgacagctggccactcctcccctccccactgggggctctttggggaaaaaaacggcctgaccggggcgccccgccgtcctcccagtgtaccccaccgctctcggctgggggcgcagcaccttggagagaggcgcctggccccgcgcctgggctgggggcgctctaccttgcgccctgggggtcaggggcgcttgccgggccgctgccgaggggccctgcccacccctgcccagcccggagcccaggcgagccagcgcggcgagcctcctcccctcccgcctgggtcgtcctgagtccgcgcccgctccagttgctgcagctgctgctgctggcggctgcggggagcgcggggcgcgcgccgaagaggcttgggcggcgaggacggggacgaggaggagtcggaggcggcaaggaggaagagcgagcggaggccgaggggctcagcggcgtggcgacaggactagggggtcccgagaacatgggctagcaggcggccacgggccggcggccggacgcggtgaacctgccgcggccgggcgcgcactggcgcggcgagccggagccgagcgcagccgggggaggagggctggcgcaggggcgcccgggcggagggggccgattatccattattaacgagttaccacctaataagcggagagcggctcgttagccgcgcgggaggcgctcggggaagggggtcaccggccgagcgcagcgcacacccgtggcgcacggcgggcggcgcggcgccgaggacacccgggaccgcgcgcggagccggggcgggcccgggggcggcgcagaccccgggcgcgggcggcccgcggcgccccctggctctcggcgctcggggccagcgcagcccggggcgagyggggcgcgggccggggagggggagctgcccgcgcactccatccccctcccccccgggcgggcggcggcggctcgctgtatatatctcggcgcaccccgccaggtcgcgcacagcgccccgagcccaggcgcctccccgcccccctcccgcgctccgcggcggcggcggcggcggcagcagtagcagcaatatggctgttgatgggtgtttggggtggcgctggcggcgggaggagctcccccgagcccctgcgccggctgcccgttgctagctatggcaaatggtggcggcggcggcggcggcagcagcggcggcggcggcggcggcggaggcagcagtcttagaatgagtagcaatatccacgcgaaccatctcagcctagacgcgtcctcctcctcctcctcctcctcttcctcttcttcttcttcctcctcctcttcctcctcgtcctcggtccacgagcccaagatggatgcgctcatcatcccggtgaccatggaggtgccgtgcgacagccggggccaacgcatgtggtgggctttcctggcctcctccatggtgactttcttcgggggcctcttcatcatcttgctctggcggacgctcaagtacctgtggaccgtgtgctgccactgcgggggcaagacgaaggtaacgcgcgccccgggcgcccgccctctgcgccagccccaccgcttctcggcgtcccctgcagcccacctcctcgctccgcgccgcgccgtgcctccctccatccccgcctgccttcccctcgccgccttcccttccctcggctctcccggtgctctcggatcggggcagcgggcggcgcgccgggggtgaggagttgcccccagccagtgcgctccgggacgcggacgctcaatcctgtcctcttgtttattgtagggttgttggcggctgcggctggggccggggtcggggactcacaggctcgggtgccgtggtgcggggtggggacagccaactcagcggggacggaggaagctgggggcagctgggtgcgtgttttgcaccgctcacctgccggggctcggctcctggcggtgggcgagagggagcacatccgcccatactttaggaacctgttggggagatgagttcgtggggtcagaaagaagggaaaaatcctttgggcaagggagagaataattttgcacaagggaatcccgggggaggagcatggcccgagataacagggggacttcgaggggcgagagaagttggggagatccatcccactattgggggtagcccacggggctgccacttttggaatgtgtcgaggtcgcatatctgatgtaacctcccactccgtcccttaggtgctctagtggaacataccccaagttcttcggcctctgttcctttgcccccaggccacccactttgggtccccggaaatgccaccagcagcgcggagctggagcgggagtccgcctgaggccgcggttttacgcggagcgtcttccctggcgctcgaggtggctagatgtcgtcggctttagctattcctggtgcagacgcccaccggcactgaggctggcgacaccttcgatgtatggttgctaggctcactgcctggtctgtagtcgtgtccctaragatgtcttcccttccccacagccactggctggagtgggggacccgacactgatagaaaactgcagaataaaaaagaaagaactggaaaaaagagagtgagccagctgccttctttctgagtaattcccatcctaggggacttcacgcgcgaaccgttttggagggaagggaaatccaggggaatagtgcagggtagatacacattgcagcctccacatgttcacatcttttctagtaaagttaaaccgaggacccctcaaacttctacagggcacagcaacttgtagcagcctccttggcggctgagagaagtagggaagcctggggctatgggtgaaggctggctatgaaaacaccaggggggaaggagcctgtctctcctgatcattaattatacatcctgttgggtgctggagctcagctgtgttttgtggcagcacatttgtgttttggaaaatactggtgtattggaacaaagggagaaatatgaaaaccatcattctcttcgtcattctctggcttctccggaggcctgcaggtgctggtcggagagttttctttggaattaccttctcagccgtagaggtttcttcttatttgttaaggaggcaaacctcccaccttccagagaagccctcaggttaagcaaagccctatacaccagatccctgactagccttcctgctgagaacagcttattcctggagccttcaaattcccacattccctctctccrtccttctcctccacctcccccaacagtctcgggaattttgttccccggtttactgagattcagcgactgtctttaggggaaagatagctcatagttgtgtgcctctgaaatgttccctagatagagtgatctgggtgaactttttaacagcttgctttctttcaggcagggggcaatttttatcataatgaaaactttttcmatgattgaaaataagttgtggtgtttttgtgaacctggggtcctaaacacagcttccaaagtctttttatgttagggrgtacataaatgcaattgcagtgtmtgtaatgaaatgctaatcccatcgcacacacaaaggatctcctaaatgatgagcaagcataacttctgtcagtttactcaagaaaataggtttttggcaacgattagaaaaaacaattcgtaaatatttggctatgttttgtagccccaagacctgctgagtggacataactggaagtgagttgctgtaagaaatctgccagggatgagaggtgatggtggtttgtttggaagatgtgaggccagtatagaatgagtgcaggttccttttgataccgtaagtccattttaaagcacacctagaatctcttgatacctgcccctagatttgctcacttaagccataggtagccagctcattatatgcagtaacggtaagttaggccttttaaaagcttttctttctatgcttgaggtctgtatttttattgcaattgtgtgtgtgtgtgtgtgtgtgtgtgtgtgtgtgtttgtctttttttcttttttctttccaagtatttggtagttttgtcaagactcgatacacaggcatgtatttggcttaagcttagaataataatttttgtgctagatttcccaagaaaacataggctgcctttccagaaaattctaccagccctcagatgggttcaccctcaccctccttcagccccaagatggtttgatcaagagctggagtccagaggaaagcaggtcttttgtagcatctgaaattctgtgggagataaaattcagcaaggagctccaatttcatgagcgtttggtctctgggatcgcaccaaacctttttgatcaaaggaacccaagactgtggacatgcatcgtgggacatctcttcattagtacctttggcctctgaatctcaaacagtgaatgactttagtcttttgaaaagagtggcatgtggactttttcagaaagtgaagaagaaaacattacaatttcctcctgttgggaacttggtcacagtcattccagtactgtgttctttgctgtactttttcacattattgtttttttccttgtgggatttcatcagagctctctattcacttgggtgtgacgttgtgaagttcaatcctgtcatagactatattgaatagggagctgctctggtagcctgaataaagccatgactttgaagaagttatttaacctctctggtgtctatctttccttgtgtataaaatgtggggattgaattctgtgagttctaatgtcccttcctgctctgtgattcgatataggagagagggaggagttgaggaatgagggttaaagtttctagctcagaatgtgttttgcagttccctagcaattcctttaggaattcagccttgggacagttacatatctttatttccatcttctgctcgtcttccagcatgtggtctacttctctttaaataactggggaaactgaggccaacttcctgwtggagctgtggtttgttgaggggcctgagtgtggctgggcatagagttatttccattctcagtttgagctgttggccttgtagaagcttgggcttgatcaaggatggtctgcgtgtaatgaattatygagatgttgtctccatggctgtgcctgagaaaacaacacgttttctctgtcargctcgtgactaatataaatatcagatcccattacagcttggtaattacccagggtctggyctgacgcaktcaatcagggctggagcttcagtgccgtggagctcttgattccagattggcccttgtgcctcatctcatcctgtcctggggattggctgcaccagatgaccttgagatactcctttttgagcagatcacttggggtggccttggaggagttcttgggtcctagtcacgggggagctccagctgacctgcccttgtccagagagctcgtgctcctcattccttgctctctctctctctccttttattaatttttttttttgagatggagtctcgctctgtcacccaggctggagtgcagcggcacgatcttggctcactgcagcctgcgcctcctgggttcaagcaattctcctgcctcagcctcccaagtagctgggactacaggcgcacgctgccacacctggctaatttttgtattttaagtagagacggggtttcaccacattggccaggattgtcttgatctcctgaccttgtgattcgcccaccttggcctcccaaagtgctgggattacaggcgtgaggcacggcgtccagcccctggccctctttatggaaatgcacactttagtacaagactctgcaatcaggcaaacccaagttcaaatcatggatctcacatttattagcagggcatctttgactgccaaccatgttgagctttggttacatcacctataccaagagcatactgatgcttactttgtagggttcttatagggagcaggaataatgggcacatagcaccctgcaaatgccagacacttagcaggcctcttgtaagtggtaactatcatagcttcatgaagtgctgagtttattttccctttgattcattgaacttatagcccctgaagggcgcagactataacaaataaagtttttgagccaaaaggaggctttagatcctgaagtatactgtcatagatcaaaaaaccatttagagtcagactgagacatgggcttatggctcttggctgttgcaaggctggaaagttagggcagggcagcagaggtaggcttcacggatggggtcctggcagratggttacagttttgatggtggggtatcagtggacgaacatcgacagtatgggggaccaggagctgctgggctggcagaagggaaacactgtggcmtttggtrggcaggtatggttgtccagcattgtacccttgaggagggacaaattccatccctgttrtcccaagtccagaactcatagacctgtctcccaagtgatgtcacggtctcttggccaggacactcactgtctacccagaccagcttttccaagacaccccctaggccaggtttccccaagtgtgttctgtggcacacctgccttttaaattaccttgtgaaaaaaaatcagcaggcatggcgtggctgagcttcccctttggagggccacatcacaggcttggcggcatcctgctggtagagaaagtggttaaaatgccctcaaatgtgctacctgtgagcagtcttgcttcagtgtcaggggtgctgtgcagtgcccaaggttcagcctgtgatcctgggcaaagacgtcatgcctttgtgcctcagtttcctcacctgcaaattgaggtctgtgatagagcacagcctcatggggtggtttttttcaccaaccccattttatagcatttcctaggaggacactgagaacctatggcctccctttgggagccttgggctagccctgcttctaggtgcccaggaaacttgaccaaacatacawcaggaggaaaagaagagctgcctgccccctgctgtttggcctgggggataaagcattccaatggtaagtccaaatggaccttctctttgcctcacagctattttgttccctggatggggacattcattggtggctgatagccaggagtaagtgcttgctttggggctgtctctctctttctctctctctcatcagggcatgagaggcctggtgcagaaacagttacattggcattcgattgcaatgccaggacctccttcccaaagtgggcgtcccggctcacactggcagtgaccatgctaatctgtgaatcacagcagccaataccaccttgccaagctgcagatcccctggaaggtcgcctttgtggttccagtgaaagggctgtttgtgctgtgatgccaggccctgggccgtgtggggaacactgggtcccttggagacatccctggggatcagacagggccaygcctttctgtgcacagtcagggagcagaccaaggatgtctcttttagaactgcttcttgggtgggtggaaccccacgcattaggcacctagaaaaggaaacccagggaccctcggaggcaagggtgtcctagcactttggacagaaaacctggggaatgttcagtgggratatcacatctttatctccaaggactggagagtgtctctaggcctgggcttctcaaactttttttttttttttttttttttkggacagggtctcactctgttgcccaggctggagtacagtggcatgatcactgctcactgcagcttcaacctcccaggctcaagtgatcctcttgcctcagctccccaagtagccaagacttatgggtgtgtgccaccacacctggctagkttttaaattttttacagagatggggtctccctatgttgcccaggcttgtcttgaactcctgggttcaagtgatcttcccatcttggtctcccaaagtgctcccacagtggtgtgagccactgtgcctggcttagtcaaamtttaatatgctcaggaatcaccgagagctgttaaaatgcaggctgtgattcagaagatccagtgtgggacctgagattatgctggtctggcgagacacaggctatactgatgctgtgcagaccacactttgagtatcaaggatctggtccatccctcagcctccgtgcagtccatccctgaagacaggcttatttttaaatgtggaaattcccagctcttgaagggggaagggatgagaagcagaaggtttgctctgccagatcgttgggtggagaaaactcctttcagaccagggtagctgtggttcgggctgggctcttatttgcraaaactgatggtccaggtgcctgctcctaaggaacccatcagcgttgtggatttagggttgggttgtggtggccagagcagtgtttacagggtgtggtctgtgtgttacccaccaatgtgtgggctcttcctcgtgccagttggtcattctgcaaagggtgtgacttcccgaagtccaggagggcaacccagccaaactacctccttgcaaaattaaaggctggtggtgtcaccagggctgcactgcggtgatgcyccaggctggctggggaccactccctctggagtgtttgaagtcagtgggcattaagactgccagcctgattttctgtaggggcctgggtgggccttcccaaatggagggttcaacctcaaagaattggctgaagagctgcccgtggagtgactgggggacacgcgtggcaccgtgctgtgtggccctccaatgcacttcttaagaattccagaagatgaaagtgaaagtagctccttttctcaccataccagggtttttcacagctcacactgtcagggactttttccatgagatgtgctttttatgttgtttcatcatcagaggggagcaccatgagtgtctgcagcaggcagaatgaagaaggacctagcatcgtggcggcctgcacacagtaggccctcaaagaagtcttctggttataattattgttgttgtttttgcttttgttgcatattaagtgtatacgatgtgccagaaaccaagctaggtgctgggggaaaaataattaagacccagttctgactccctgcttgttagggcttttattagtacttgacaggctgagcagaggaaaaaacagttatcttctcatggaatatgaacatctgatctctgaattgcctgcaaactccttgagggcaggaactgagtcatgcaaatgtaaacacacgtagatgttggaaggctctttccagtagttagctgggggctgaacgagaatgcattggttgggggtggcaaatatattttcctgcttttttgggtaatttgttagatgctatggagaaactcctggtgaaagagatgggcttggtttgttgacaacatggtgcttgaatcattcgtggattttaattattcatgccacctggtttctcttgatcagtagctaacaaggatttagttcataatgggcagttgtttgtgaggtggatgagtcaggcacgggagggaagggcagtttcaaaagaatggctgctttaagatggaacttgctttgtttttggcattatttggtgattgtcttgggacattgtgtctaattgccaatttggaaatgtaattggcactccaggcccagaatggatatacacttaacgttgtcaagccgagccttggaatcatctccctgtaagatcttgttacctgtatgactaatacttcttcacgtggccaaaatcaaaattatttaacacatctcctttattttctattctttatgctggttcactggcctctctaccagattttcttggggactcagatccagtggcctctaggcatttcaaagcgaattcacaggaaagcctgaattccagccttctccccctcctcctcttgctccatcctttcttttacatccttttttccttagtggctgtcattcctgagggtttctgtggaaagttggtgctgtttaattttggtttctagcacaatagggaggaatacttcaatttggggaagaagtaattaaggtaaacattatgtagatctccccattatcagagttgacttttacttggggaaggggtgtttttttaaaaaggaaaaataggattttagatttttttttttttttgagataccgtcttgctgtgttgcccaggctggcaggctggagtgcagtggcatgatctcggctcactgtaacctctccctccagggttctagtgcctcctgagtacctggcattccaggttctcatgccccatgcctggctaatttttgtatttttaatggagacgggatttcaccatgtcagtcaggctggtcttgaactcctgacctcaaatgatccacccgccttggcctcccaaagtgctgggattacaggcatgagccaccgcgcccggcgagattttaggtttttgacttgaagtgaagttaatttccatctgttaactgctgaagtctgggaccatgatgtcttttgcaaaagagtttttaaggcaagactgtcagtaatattctttccagggtcacttctaactgtacgaaactattcagccacgatgggtctgcatctttgcatatcattgtaaaccaaattatctacaggctgttgggctgcctgtatgtgcatttcaagttgggagtataagatgagtatttattttattttctggttccatgtcttgttcttgctccttcttcccttttagagactggacagtcctctctgtcttcatctttgggagtgaactggggctggggggtgggatcgagagtggcctctgctggctgggggcttcaggtttgtagattagtagacaacaaatagcgacctgatttaacaagtgcagaagcgcatggaactataaattcacagtggtggaaggaagctttggggcctcaggccctgtgcgattcctccccagtgctggaagcccaccctaccagtgtgtttatgatctcctgaggccactattccactggggacaaacccaccttacgatgaacttggaaagatctttctgtttgcactagtccttgtttgcttctagtctgtgtctgggacatgcagaacaagccttggtggatggtagatttcaaattctaaatccagttcaggaagggacagagctgggtggtgtttccatgtccgcagtgttgagacgtagaatgaccttaaccttaacttgtgtttcctccatgaaggccactttatttttctccctgatggcttccctgggttcttcgtcctcctgagacagtgtggtttccctttgcccctttgcccagagttcagaaaacgacccattctggttgtttcttgaagtttgccttctgaggtctcttcggtcttgtcagcagctgtgactggaggcttttgactgttgctgggccataaattcacctccttatcaatgtcacrtgccttgtatctccaaggtttagcccccttctcagtttcacgtgggggttgtaatttgggggccctgccaagaatttggatgtagggtacagagcctttgttaggaaactcgagttggattccattttctaggtgttgactctttttcacctagggagacagacagtgctcttgaacctctttttgcatcacttgaatacagccgcttcttagaataggaggctgtttctttcccacctgctcattgggtctcctttcctctggggctcctgtatgcctctgctgtcatctcccctattttgctgaacagaaagaaaccagaaaagaaaagagagcaaaacacacaaaggaagaaggtgagggagggcaggaggtagagggagaggttgacaccaaggaaaaaagaatttctcctctgagagttagaggttggataaatagctaattggatggattttggttttagttacctcacctttgtcttaatgaataaatcatgtcaaatgacttcacctccaaggagtaaagcattctaccagtgggtagaatgagttcacgtttggaaaattttagctcttcaaacgagacattctgtggaatgaactgatagcacgcggcctgtgtggctcagaggtgaagcgttggaagggtttgtgggagatgttctttgtgtgcttgttaaccaagagcagaattctgctcctctttgggagaagttgccacattgacgttgttttctctttatgtggttttggaaagtggaccctttgtggctctggaaggggaaaaatgggcctccagttattcaaatggagaactcagagataagtgttctaaggcttggaggaaagatttggaagatgaaaggccttacccaagtgctagggatttttatgaccaacattagctggcaacagcttaatatacattgttgttctccttcctgcatctgggaacactttcctcccagagcttagaggaattatttcagctgcccatgaattatggccgtttctcctgtggcttgtggcagccacagccgatcaggtggtagattcttgaagagtataggaatgatgtctctagctgagcccacaagagggctcaacagtttgcctcagtctaaaaaaaaaaaacccaatcatttcttaagttctttcacaaccctgttttctccataggatttactttttaacttcagtattttatattttgtccttaatcccaaatatactacatgttcattgtagaaaacgtaggccgtgcaggggcattaaacaaaaaggacacagtcacatctgttaggatggctactgtaaaaaaaaaaaatagaaaatcaccagtgttggtgaggatgtggagaaattggaacccttgtgcagtgtttgtgggaatgcaaagtggtacagatgcggtggaaagcagtatggcagtttctcaaaacaaattaatcattcaattatcatataatccagcaattccacttctggttagatatccaaaaaacttaaaagcagggtcttaaggagatatttgtacacccatgttcacagcagcattatttacaatggccaaaggtggaagcaattcaagggttcattcacagatgaatagattagcgaattgtggtaggtacatacaacagagtattattcaactttaaaaaggaaggcaagtctgacacgtgctaccacatagatgaacatcgaggacatcagccaaatgaaataagccagtcacaaaaggataacttccacttacatgaggtacatagagttgccaaactcatagaaacagaaagtagaagggtagtttccagggccagagggagggaagtgtttaatgggtatagggtttcagttttgtaagatgaaaaagttctggagatgggatgcacaacaatgtgaaacatgcacatttttaagtgtgaagtactacacacttaaaaatggttgagatggtacttttttttttggcagagtctcgctctgtcgcccaggctggagtgcagtggcatgatctcggctcactgcaagctccrcctcccaggttcaagccattctcctgcctcagcctccggagtagctgggactacaggcgcccaccaccacgcccagctaactttttgtatttttagtagagacgggktttcaccatggtctggatctcctgatctcgtgatccgcccgcctcagcctcccaaagtgctgggattacaggcgtgagccactgtgcccagcctaagatggtacatttttgtcttctgtgtatttcaccacaattataaataaacatttgagaaaagggaaaaacattcctccaaattccccctccaggagatgaccagcattatctttgggcacatttccttccctgacatgttctttacggtggcgttcttgttttctcggtgggcagctgatattcttcctctaaagattgcagcccctctagaagcacccaggctgactttgatgtaggccctgcccacattgagagcagacaaatgaagagaacaaccctctttctgcctgtggggtctggtttaatggtgtctactcttagagtgaagttaagggagcgccggatttttgattttgacatatgacaagtgactagctacagtgtcttagacaagtcataggctccaggccttagttttctcatgcatataacaaattctctgatttcatgatttcaatataaagccatttcttaagtcagattttaaaactatcatttttacctgataaagaaccaaagattaagttattgagggcagtgaatccagggagaagttcttgttctactataaaacacaagagtgaaatttgattgacttgtccccagaacttcartattgactttgatgacatatttaagaattacaatctagggacacaggccccattggaaataccatcaaacctgtcatttaaaaaaaaagtctcagaaataggtttttgtgactctactattacttctaatgatatagccacaccactattgaggttttaattttaatttttggtgtgggggaatggttcagaacatcttagattatagactataaatagtgtgctatgataggctggctttgttgaggttgaacataaaaagaaacatctgattaaagagaaggtcatgcaaatcaacttactttgatccttttccttaacttgccccaaaacgcagccttggagatagaacgttcatctcagccctgttccacggagcattccagctgccgaaagcagggataagataactgcagcttctgtggcaaaagagcaagtgtctgaagggatgattcctaaatactcagtaacctccgaaaaaaactccccctgaaccgtaagcagccagcacatcagaacttactggaatagttctcttaggttacataacatcgattcgattatgctaccggagccatgcattaaattttaacttgtcacagatacattacattaacacttcacaaatccacagagtaccaggtagctttggggtgttggtaattgtgtaggacttgctgcaatccaggcaaaaatacttacttgtacattttgtttcttctgtactatagtttaactcttttcaggggtgcaaacatcctgcaaatattctttctttctttttttttttttgagacggagtcttggtctgtcgtccaggctagggtgcagtgtcacgatctcggctcacctcaacctttgtctcctgggttcaagcaattctcctgcctcagcctcccacgtaactgggattacagacatgcaccatcatgaacagctaattttttttttttgtatttttagtagagayggggttttaccgtgttggccaggctggtcttgaactcctgatctcaagtactccacctgcctcggcctcccaragtgctgggattacaggtgtgagccactgcacccagctgttccaagtacttcttacaaaataaactaaaaakttagacaatagtgattgccaccgtagtactgaatacttgatttatgaccatggactagatatggcagaggtttttaaaactctgtgaaccttttcattttcccgtgacaggcaatgcaagtgctgtatttttaattggtccctttttaaagtcaggagatgaaatgttatcatgcaaatctctcctaagttgcatggaaactaataaaatcacgaaggtttctatttgtactctacgaacacagactgtaatgaaactaaaacagctatctccagggatgatgctatttaaattctaggcagggctttaaaatgattttcatggtgaaaacagaaactagcaactgagatgttcctgttctttcttcctcatctcaccagtgcctgttcacccatgttcctttttacttcctgacctcagaaaatgaatgtaaagcaagaacctccggtctctaagatagcctgtctatcactggttttagaaaacagcaatgattcctcctcaggtcttgcatttattttcagacttattggtacttttgttttgggaagtctttctgtgggaattggagttactattttcttaggggaaaaaaaatyagaacaaacttgtttgagtggcttctatgcattaagcattgttttaagctccttatgtttattctgttatttaatcctcaaaacaatcctgtgatgtagtccycttttaaattcccattttacaggttagaaaatggatgcatagagaatgagaatgtttttctttttttggataacaaactttgagtgattactgtgtgtctggttgtttttaaactatatgtattatataatcctcacaacaacccagtgaattcggtggtattattatcctcacttatggattagaaaactgaggcacagagaggttgagtaactgctcagggtcacacacaggtgaggagcagagccagtttaaatccaggcaggtgggctgtggatcccatgcacctaatcccacactgtacacctcatttatacctccttagctcttcctggccacagtgtgagggaaactctgatgacatagacaggactgaaaagaggagtggtgtgttgttcctggagagatgtgaggtcccttgacaagttcagagagttttgtactactgaattctcaggtatgtcaattcccaggatgagaaggaaccttaaatgttgtctagttctattacattccctgagtcttagtttttcttgctggaaaatgggataatcaccttttctctacctgacaggcagtgggctatatacagtcatgcaggttactcaatgtacaactccaggactgctatgagattcacatcagatgacatataaatgtattttatgaaccacagcacatgtgccacatctctgtgctggggggtatgtggaggcacagaatcaatattgggtcatttttctgagtgtcaacagtcttccatgaagttttggagaaaaacactatttttctctaaarcctccacctcctgggctcaagcaatctcccacstcagcctcctgagtagctgggacttgcaggcatgtgactacaggcatgyaccatcatgcctggctaattttttgtatttttggtggagatggagtttcgccatgttgcccaggctggtctctaactcttgagctcaagtggtycacctgcctcggcccccaaagtgctggaattacaggcgtgagccactgtgcccagcagaaaaacactatttttggtattaacacttacactgtacacagagtatattggaggtaggatgcagaatttaagtaggtttttaaaaacttgagagaggggtgtgtgtgtgtgtgtgtgtgtgtacatgtacgtatgtgtgagatgcacacagattcaagagagcatgggggaccagcaaagtttgcacccaccagcgaagtctcatcattaaaccatgggcctgtgcaacctggtgtggaatgatgccttattatcccacatgagatatgctcatatctcaaactctgaaactgtgttagtaaaagaatgggaattctgtgaaagagaaataaatatatccaaattccaggtctgttaaaatttagcgcacttggatgttggtgygacagagaatttaatctgcacactcagaagaaggtagtggttaactcattcagtggttatgaatcttccttgccttagaaagatcaattccttgtgcctctccacctccgtggcctggaaatacattattatatttcaatatggctctctttctaggccattgcgcattgtggccgtgtgcctgccaaaccccgtgcatggaatatttggaagcaggagacaaattggttagttagcaaatctttattagcatggctggccttttcccggggatatggggtcatgtaagacatcatttcctctctggcaataccggtaaccacattgcatgattccagggcgccactcacatcctggtcatgaatgaagccctctggwgttgtgcagtgcacagcctgcatgcccatatacattgtcttttctaggcatctagctgtgtttgtgtaaaacccttacacaacaaattaaaaacacagtgcaaagcccataattcttaatggcaatgtgaataacagaaacatcaagaatttgggtttccaaaaatggggagaaaacagaactggccgtagagggagtggccagagagaacccactggggatgtggggttatgacggcagccccagcatatcctccaaatccagcctctgcaacaggcgctctccctaacttctgatcactgtgcagctcctgacatgatacaagaggcctcccaggcctctgtgcctgttctaagcatgagccttggagaagagagaatgctcagtgccagctcatgtgtatcccatggacaaggactaataggaccctgaggacttagaaaagccttctctgttgccaactgtgctatttttacctccctcccacagctcctgctttccccaggtatttgtcagcagagygtcttgcacctgcatggaaagtggcagttggggcccaggatggccttgtgctgtgcaggccacagcagtctccttaccaggcctggcggccaggcccggcggccaggcccagcctctgaggctggcaggctgtggtgaggatggttgcataactggcctttctgccgctggttctgggtgagrtcgagccagagaaaacagttctgcagtcgacagcccctcctgggcactggtgcaacagacaggcttgtgggcctggtgctgacccctcacggtcaggagccacccttgctcttgagctgctgatcatcactgcagagtgcccaggtctgatcaacatccctgctgggaaaagcggagatgacctggcgtggtccatagtgatccaaatgtgatagaaggctgggggtggccccagtgatggcctactccttcccttccaaccctccacctcctccatcctccaagtcttagctcatcttgctgggaatgccgccttcctgggaagccttctctacctaccctagtcagctttctctgcctctcccttccctgatgcgtcctctctgtttgtscttccatcctgggtggggagcagccgtctgatgctgcagccctattttctatacaggcatcctgtctcctctgcagacagctccttgtggacagggctggtcctggtttctttctggatctgtgcctggcaggtggtcctagagggcagtgaccaggggtcgctcaatgyggtggctggtcatcaaagcaggccctcagtgaaccacgactcctcacgttcatcctcttgggttgtaccctttggggcagagctagcccctgtaatccatgggttgcttgtaacccatggattgtggtggaaatgatgctatgtgacttctgaggctatgttggaagaaccctggcagttcatttgttatctgggaatgctacttcttagggaagttggccactacagggggaagagcgagagtgagaggaagcatgtgcgtgggcatacgagaragagagagagagagagagagagacagacagacagagagacactactggggcaccacgcatatgtgtgaagatgccatcatggaagtggatcctccaaccccagttgacatagattggagatgaacccaccagctgatccctctatgaattccttacttaaaagtcataaacaaaatgaaatgattgttttaagccactacattttggggtaatttgttacatagccatggatgactggaacaaataattactatttagtgaagtcctttcacaaggtccagctcctgccctctttctaggttcctcttaacatcttcccaagctctccacacccagccacttaggacttccttcatttcgttaaaccttttgatttttacctctgggccttcacacatgctgttcacactgccggacttctcttttcttgtcctccttctccccttccacttagctgactcctgtttatccagggatgtgctggtaagtgattaacaacgggatttctagagaagaaagtccctatgtacggtgttcrtcaattcctatggtataaatattcctgccctggctggtttgaagataccartgtgatgtcacagaacatagggtattgttatccatgattggcagttgtggaaactgaagcccagagcagttcagtcacttttctgggtagatcccaggcagatatggcctctgatatgcttggcctttgagaccatgctctttcctgttctcctgaagaaccagtagctatgagcacaggtaatattgctgctgggccatcctgtttcttctagacgagtagtcttccctctgcatttcttgagttgctgcaggctttaccttatgcttaccatacctggccagttgccagttaccacaccacgctgctggtttctctcctggaccatatttatggtatctagactctggtgtgtgcagtggcgatggaatcattgaggcaacagggacctgtgagtccatcttgaggtttgataaactgtgtattagtcagctaggccacctctgtaacaagaggtcaacatgtcaatgacttaatacagcagaagtttacrtattgctcatacaaagtaccattgatggtgtgtgtggagggtgcagtgaagacacacttcagacagtcattaargaccccggctcctttcacttgtggacctgaaatcttctaggggcccctgaaggtctctgctggaccctctgcatctgtccggatgataggggatgagaagtaaggatcatgaggggtagttttgtaggggtagttatggaagtcattcacatcacgtctacccacacagttcattggccagaacttgatcacatggtattttaactgcaagggatcctgggaaatgtagcactgcacccaggagattgaaatagatttggagaayacctggactgctgaaggggctcccgagtcccacactgagggcttctgctgtccatagctggctctgccagaaccattatcatgaccyaatgagaaaactgaatgtttactgggtatttgctaggtgtcagacayggtgtcaagcactttatatgcattatctcaatcctctaaatcagcctatgatgtagatactatctgtatttttcccattttacagatgtacaaaaactggggcttgcaatggctatgtgatgtcacttgcccaagaggcatccttaataagtggcagtaccagcattagaacccagggttttctgtcttcagattgttaactcttaccctcttcctatgctgctctggagtgccttcagctctgcctcttcttatccctgtctgcagcttgaaagctactcagcttcttaaacaccttcaggataaagggactaaggggcataactgcctccctgcttcatgtttcaaagagattgtcactggtttacgttggccctaattcaggggtggtgaattgacagtagttacctgagcctgccctcatgatttgaatgcatcatctcccagtctgccctctcccactttgaatcttacctggcgtggctctttgcctggagcattgagagtggaaggctcatggatgacagaggctgcttcccgggtttcttgtctcactcctgtggtgatgtgcttcaccttggaaatgcacttcactgtagccccttctacccatgtccaattttatgtctcagcaaagtaagttcaacagttcactgctgagaaaacagggtctcaaacgtgagtagtaacataagtaatacggttgcctttctaaaatccaatggaccagaattgtaatgtctcaatgagcaacgtctctcattctagatagttcagtgtggtcatcagggacatgccctctggagccagcctactcaggcttaaatcatagttgtgttgcttgctgacctttggatcttgggcaagccacttcacctctscatgcctcagttcactcacttggaaagtgggaataaaataatactgaaaacgccctcaaacagttcctagtatcaaattggcttttttttttttttgagatggagcttcactctcgtgcccagactggagtgcagtggtgcagtctcggctcactgcaacctccacctatcaggttcaagtgattctcttgcctcagcctcccgagtagctgggattacaggtgcgcaccaccatgtccggctaatttctgtatttttagtagagacggggtttcaccatgttggccaggctggtctygaactcctgatctcaagtgatccacccgcctcagcctcccaaagtgctgggattacaggcatgtgccactgcacccggtcttcaaattgactttcaaatgctgggagatgtcaccccacattatcctcctgctgcctggggttgttgggaggatcatgtgttaaatgctgagggtagcacttgctacaaaccaagggctaggaaagtgttagttattactgttactttcatttggtcatctttgggagactgtgacattttcccctaatgtgggcattgacaataacctcctaggtcattggtcactctgtttctgrtaagtctccactctagtccatccaggttggattgcacgtctgtggaatgtccaccccctgctggaatgtagcatctctgaagcctaggactctgtgccttccatctttgcatccacagtgcaacattttgaatgttcattttggtctcttaaattcagtcttgtgaggctcttagcctagtttggaattggtcaaaggcgggtttgagtcctggctctaccttgcattagcttggtggttgtggccaatttacttaaccttgcaaagctcactttcttcattggtaaactgtgaatactaaaaataccagccacgtaaaggttttgtgagtataatagcatttagcatcttgtaagtsctcaataaatggccctgttatgatgaagttggcctttattttagatccctctcctttgtcaatataaccaggattgtgctgaactgagggacaggagaccactggaaggggcagggtagccaggggccaacagtgagcaccaagacggacagtgaggtagtgctaaagatggaggcagaaagtagggttggaggaaaatggggtgagaaatgctcccttccctctgcctctcatcacccacggcacacycctataccactataggaaggacgagggagaggggaatggagagagaggaaaggaagaattttgcagtacgagatgtcaggcattgaaagggttaactcaggggcgaggcctcagtttgccacctgtaaaacggaggattggatgaggccattctgagggtccctggtggctccagcagtcccttgcatttttataagaattgtgattgtgctcctgcctgttctgcccctacaccacccaccttctgcagcctcaggcagttggagatgatgtcaaaaggaacagaaggggtggaaagtgctggagggcatggaatggtttctcccagaaggctgagggtctgaaaagaggcttagaagcctggtagccagagcagracggacctggtggacccatctggtgatcctggggctgctctggggcctggtgaatggtgaatggaccagaggcaccttttgggctctgaacaaagaagaaaggccaggctccagacccagccctcctgcctggtgggctttttagttggcactttcccctatttaggaacctgtgctactctgataggctgaggcagcccaggcgcctgtgttaaggttgcttaacatctggtatttgtctccagactcttttctctatcagggattatgtgttctgaggcacccaaaacatctttctgtacaccragttccttcatgaagacttccgggtcttctttccacttcacactcccttttatctcaagcttattctgccacaggcatttggttaagcaaatatgttgctcattggcaacttgtcccatacctgggccaggttatgaagaggattccaagagtgtcagtcatgtggtgcttgcttgggggagcccaagctgagctggggctgggtgagggatggacaagggggctccttcctctgctcatgcagtgaggtggaaagggcatggggttggggtgcaaggacctgggttcctctcttgcctcccctgtgtggtcttgggcaagttgtctaccctcctcatgcctcagtttccattacatgtagggtgaagaccacagagaaagttccacctagcacatgaaaaatactcagtaggtaatggctcccatttttgtgatgtatccaggtagaataatggcatttagcagaagtcagtttattcaagctcacctttgagtctatcttacacaaagcactggttaggtgagggatggcgatgagccccggagaattccrcatgcttcccttctttagctttccagctagattgtaagctcctaactggatccttcaggatttggcacactctggtctgtgggccactgagacaggacatacatcttcttcatttctttctgtattcccagcaccaaacacgtggcatgtctctggtgggcatttggtagatggtgggcgaatgaatgaacaaacgagcattcagtaacctcttgctgatgaattgactaatactccacactggttacatttatattttgggcactgaatctctttgttttctggctctctcagggtatttaattttttctggaagctgaggttgagcctttcaggccacctttaccaggtcccaggctccaagtagactagacacccacccaggcctgggcagtggtagggagggtgtgacccaggcattggcctgcaaatttgccccagctccttcttgccaatgacttgtcacagggctcctgaagcctctcatgcctgactgcctcagaagaaagggtattttgtgagctctgtgggtgttaagtgttgaggagcagttcccaccagcagacagccttcacctgtgtttgataaaatgacaaattcatttttttcttctctaccccatccatctcctctttccttccctgtctgaaggggcctctgtcaggccagccaccagctatcgtgagaggagccaagttcctcattgccctgtgctgaaccgaactgcagcaagttggatagaggaggcagttttrgcttgaacgcaaacatcctgtcggagaacagagtgattatagttttagctgcacacggggaaataacagcacagaggtgaatcatggcatctgtttactgctaattaacccctccgtgtacaccagtgttgtatgtgagccggcctgcggtctgaaccgcctcctataaggagggctcccttggcagccaaaaccagttggcccaaatgccttgataggcttcctgcttcacttgttgcccatgtggtctgattttagataaaagcattgcttttgggccagataagctttgagttctttaatgaagcactgtgtgtattggagagaggcacagagcacccagagctgaagctggtcagtcctggtcggccacagtttatggggctcctgggaggttttaaactctgtgctgcaactggggaagkttgtgggggaaggttgggtccagggagctactatttattgagggcttacaatatatcacattctgagctggccactttacatcttagctggtaaaattctcacagtgatcctgaaggacaagtgtggttcaggagctgagactcatagaggttaagaaatcacctggtggtggggttttggggagggccacacaggcatcccaagaggtagaagacaagctcagacatccaggaacttacagacttattgtgtgtgagatagttccataccatttgtaatttattcccaaaataaacagttattgagcatctattgcatgcctgtgctcagtgggggtggggggagtagggagagagaatccagaaaggagtcagctccagctttgtcttccataagcaaatggcktagaggggattgttcattttcactgttttgttttggggcaaggaggtgtgtcagggaggtgaggaggtagagtagagaatcatcctccaccgtgaagtgaagagaggaaggtacccccacattggaaatatgccttgaggaccagaaggaattgaccagtcttttgactttcattttttaaaattgaagtctaacatacaygtagggcatgcacagacataaggtgtacaggttggtacaatgtatgcgcctgtgcagccgcctgttcttggaggcaagagccctatgagttgcatgtggtcttcaggcagaatgaggagatgccgaccacaagcgctcctaggaattcagaggaaatggagcgcaatgaacccctccaaatctagtttccaccagaagggagaggaagatgaatattcatggatcttgatctctttttgcatcatttacattttgctttctccagatttgaggctccccacctgcccctgagttctgaagaataattgtttcatgcatcacatttttactgcattgggagaaaaagagggaaaaagaaaataawttgggagaagaaaagatgataggacttcttgactagttcagccagtttcgtgaccatgacctagaatgtgcctgggtctttggccatgtccgtgaaatgtgcacattatctttgggatttgcaggagcaaggtctggtgctgggctctgatgtcctgtggcctccatatgttcttgggaggatgtttttggatctggttaggtccatgtgttgggagcattgggagccaggagaaaccagaatgccaccaggattcccatctctttcttctctggactcctttagcttgcactgttgcatttcttaaatcatgtcactagtcaaatatatactttactgttttgtggaccttgatcttgccttgctgattagattatraactcctctttggacttatgatcagagtgccttgtccttccctgatgtgctgtcccctgcgtacctagtcttgtctgagcacacagtacctcgccccatgaatgcttgctgtgtgcactgattttgcacacagcaagggtttttggtaaagttgtctgtggcttgccattacagggacataggattggatctagataaaccagtagaacagtttctgtatctagacatctgggtgaacactggccttggggaacagcagagaagcttggaaaaaaaaatgataataagtcacacttaatggagaactcgctatgtgccgggctgggtatgagggactttaygtmgctgaatcagtgataarcttttgattgcatgtagcagaaatgctcacttcaatgggcttaacattaaagggactccattgactcatrtagttggaaaggtggatgacttcagatgagccttgatccggtggctcaacgatgtctccatggacccagtttctttctgtcactctaatctgctctccttacrgttggccttgtcctgaggctggtttgcctctgggttcacacatggctgctgcagctctggagggcacatgctgatctgctcaaccttgtcaggaaataaatcacctttgcaccagcattcctagcacaggttctgagagttgctgtaactgaactggctgaagccagggattattgtcagtatcctcagaaccttatggatctcaaatggaaaacaaggtctgcaaggaatggggaaggtggaagtttggaaaggagttagccaaagtcccctacacatgggtggttgcatttaatcctcatagcatccctgtgaaattggcatgattatcacccccatttacagacaaggaagcagaggcacagagaggccaagtaatttggctcagttcacatagctcmtggcttaagccaggaattgagcctggacagttggactccagagctttgctctgctaaccactccatggcatttttcaataagtgcttttttgtttttttaattgagataaaattccttcttttaaagtgtacatacagttcggtagttttttagcttattckcaaagttgtgtaaccatcattattatctacattttcatcacyccaaaaggaagtccygtaccattaagcagtcactccctattccctctgctcccagtccctggctggtctactctktgtgggctctctggatgtgcctgatctggacacttcatataagtggaatcacacaatatgtggccttttgtgtctggcttctctcacttagccaatgggagtttctgactaggatctactgtgtctgacctcaaggaatctccattcctatctttcccagcagaaaagagacagcaccgctggcygactctggaagaaagagattctgtgctagagagagagagagcctccacccttgtactccgcttaccttttggggcagcccgaggctgcggctcagtgagggcagctatggatatgcacagtgagggtcawtctggattctccggcaccctctatgtgccaaggactgtctgaagccctgggaaactgcaacagaaagggstgggttgggtttcagtgtgtgtggtggggggtgcagataatcaacacttcagtaaatcaatgaatgagataatttacagtggcaccatgagaccactgaacaggggatgggattgtgtgtgtyagaggggctgctttggtgggtagccagagaagcctctttygaggaggagatggtcatatggcagaggcaggactgaggagaaagtgagggccacacaggatttgggccagaaagccgcaggcagaggagcagctggtgcagggtgggaacagggtgrcctggcctttgggcgaattggggatggtgggtgactggccgccttgtttctgttttcatcgccttgttactgctttttctaaatggttcctcccacacagacatcttttacttgcagcttctgctatggaaggttttgtccactgctgacaggctgtggggagttccatccttgagtatgtttggggctttattttcagtctgtgtttttgaaacttgagccctgacttcctcttgttcctgacgcaggcctgagagtgccaatyggctgtatttttttttttaaaatgaacacttattattaaaattttctctggataaataaaaattgtacttgtttattgtatacaacatgttgttttgaaatatgtatacattgtggaatggctgaattgagctaattatcgtatgcattatctcatatacctattttttgtggtgagaacactgaaaatctcttttcttagcagttttcaagaatacaatacattgttattaattgttatcaccatgatgtacartaatagatgtcttgaatttattcctcctgtttaactgaaagtttgtactctttgaccagcattcctctcccatcccagcccctggtaaccactgttctgctttctgctcctatgagctcaactttttaagagtccacatataaattagatcacgtagtatttgtcttcctatccctggcttatttcacttaacatactgtcctctaggttcatccatgttgttggaaatggcaggatatccttcttttttaaaggctgaatagtgttccactgtgtacatgtaccacaatttctttatccatcatccgttggtgggcacttagataggttcgatttcttggctattgtgaataatgctgctgtgaacattggaatgcagacatctctttgacgtactgatttcatttcctttggatatatamccagtagtgagattgctggatcatatggtagttctatttttgatttttctgaggaacctccatactgttttccataatgactttatcaatttacagtcccaccaacagtgtaacagggttctcttttctttatacccacaccagcacttgctctctctctctctctttttttgcttatagccattttaacaggtgtgaggttataactcatcgtggctttgattgtgtagccctgatgattagtgatgttgagcacctttttatatacctgtgggccatttgtatgccttccttggaaaaatgtctatgcaacggttctttttgatagagatgttaaataaagcagttctgggcagagggagatcaatgcaagtgtctataacaggctgagagttgattcactggtgaacaggacaaccaaggtccctgccctcagaggtctgagcaattccatcatcagtgactagattgaacagataatcccctcttacacacgtatatgcacacttcagyctggagtgtgatgagagactatggactataatgcgtgtgtgtgtgggggtgcatcctctccttggccggggctcrgggaaggcttccctgcagaaatgagacctacaggcccrgcatggtgactcatgactgtaaccccagcactttcagaggtcaaggcgggtggatcgcttgagcccaggagtttgagaccagcctgggcaacatggcaaaactccatctctacgaaaaatacaaaaaattagccaggcgtggtggcacatccccgtagtcccagctactcttgaggctgagatgggatgattgcttgagcctgggaggtggaggttgcagtgaaccaagattgtatcattgcactcctacctgggcaacagagtgagaccctgtctccaaaaaaaagaaatgagatctacaggatgaagaggcattagccaggggtgggtgcagggggacgtgcagaggaatggtgtctttgaagactctgaggctggaacaaagcttcatggaaggaatgagagctggaaggacggggaggacttaggcagaaagcagcatagtccaggccacagggaccctaggaaagaggatggaggaaagaggatgacaatatgttacgggaaggcagggatgggtctcttttgtgaattacttaacccctaatggctagcagtgttgagcaggagaagggacctctcgagtggctgagtgtgggtgtcagttttcccttgctgctgtaacgaccacaaacatagtgccttaagataacacaaatatactcctacagttctgaaggcgagaagtcggaaatcagtttccctgggcttttaaagtcaaagcgtctgcagggctggttccttctggaggctctgaggggcaagtcgtttttcttgccttttgcagcttccagtagccacctgcatccccagtcttgtggctttctgctccgtatccaaagcacattgctccatctcagtttccatcatcacatctcttactttctcttctgtgtcaaatctccctctacctccctctttgaaggacctttgtgattgcatttagggcccacctggatgatccaggctaatctcttcatctcaaggtccttaattaaattatgtctgtagagtcccttgtgccagttaaggtcgcagtcacagattccagggatgaggaygtggacatcttctagggccatgattcagcccacctcagcatatagatgaatgccatttttatgggaatcagtgaggcatgctaagcaggaagcaatgccttttgcaagcagaggtaggaagatcggtctagtccgtcagctggcactggccaggctccactgtccattatcctcctcacctgccctaatctttcctttattgctcctaagtgataccacgtarcttcttcagtctcaaatcatcctactcagacccttttctgacattcagagccttccttatcccacagttctttctgtccttttcccttcctatctgataaatccttgtgagtagttgacaaaagagtgcctgaagatgtcagggcagaggctcacttctggtctgtctrgttgggtgagtctgaacttgaggccccagggcttattggaggcaaactgrgtcatggagagggagartacagtaaggccactaccaagggctggctgcagarggtgcaagggttgcacgggttttggggttgttggcttccccagaggggttctttgtatggtgtcaaggtgcctgtgggcattaggtgactaaaaggactgaacacgataaactcttggtggctcttcctgctgcaggaagggaatactccaagttcccagaggagaccacccagtgatggagtgaagctgcatccttggctcccctcagctcaggaccctcagaaaggacttaggaagacgggcactgccagatacagacgtctttctggactctaggaaggggtgccttttttcttttctttaagagatagtctcactctgttgcccaggctagagtgcagtggcatggtcataacttactgcagccttgaactcctgagctcaagtgatcctcccacatcagcctcccaagtagctaggactacaggtgcgcactactgtgcccagctaattttttaattattttgtagagatggggtcttgaactcccagcctcaagcgatcgtcccctcttggcctcccaaagcactgggattacaggtgtgagccactgtgcctggccaaagatgcctttttgagggccatgaggggttgctgctctgggtctgggcatttctctggaggagctgcttgtacagcaatgattgtcccatccctccttttagtcccacaggtcagagtgggacttaggacagtgggacagtgggacccaaaacttaaagccagcctggtatttcagcagtattatctgttacctagagagaggctgatgcaggggtgtctgggaggctggagggctgcaccaagggtggatggcagagcctgagccatgggtcyaggccgcagcactgccatgcggctgggaagatggtagtgtgtgggtatagtcatgggtgttgcggcttatctgcacctgcttgcgttcaggcagaagcagggtagcgtggcatggtgaggaccatggattcagttccagctcrgctgctgatagctgcatgaccttgggsaagttgcacatcctccataagtcctagttttctataacatgggcatccctgatgtagagcatttgtgcagttgtgtgtaaaggatgtggcagttaggaagcacctaccaagtgtgagccatttctgttgtcattgccatgtatcagccagcctgagggcctgcagggcctggcctgggatgtgggaaagctttccagaaagggagcaggagatggcgccctgtcacctccctcaactgggccagagtgtggggaggctgctcggggcttgctccttctgaaacacccctgacgactgtcccagcagaggagggaggctgccttggaagcctggctgcactgtgtagggagggtacccagcagagggctgggaggtctccaggcccctttgagcactgrcagcccatcatctgacctstccaggaacccacgagaaagcatgagatgaacagacagacttggcttgaagctcacttcctagttgtgttactcctcagggcctcagttttgccgcctaaaagatgggaatcacgtcccacttgccgggtgctttgaagctcaggaaagatgaagcatctcttttagaggccctcagggctgcaggcaccatgccagctctttcctgtgttacctccttaaccctcttcaaggagggcatcygggacagtccctggcaactagcaagcacccaacacagggcccttcttaccaggtggcctctgakgacctttcagccatgtgcccctgggctgcggctgggcgcggtccttgggagggatgtccctctgtggttcctggaaagcccggcagctggctgctttgttctggccactgggtgtctgctgttaggactgcgggttttatggctgtttccttgtgctcaaccttttataggtgaccctgtgttttttggagccacacctgatgggggccaaggcctttgaaatgttccagagtctttatgggctgcagcggcatatggtgggtggcccaagctgcctgacaaggaaggggtgggggagggtggaggcagggaggccaggacctgcatttccaggtgagcctgagacctcagacggatgtgttgtttttctagttgyctacttaggtctactaatctttaggaaggaatgatagcctggtttatgggatatgacataagtttttctaaaagggacctgagatgaagaattaggcaactcttttttttggggggcgggggatggggttttgctctgttgtgcaggctggagtgcagtggtgcaatcatagctcactgtagcctccacctcctgagttcaagcgacataggtgcacaccaccatgcccagctaattttttttaattaagtaaattttttggggggtagaaatgaggtctcattctgttgcccaggctggtcttgaactgctggcctcaagtgatcctcctgcctcagcctcccaaagtactgggattatagaagtgagccactgtgcctggccaacaacttttaaaaactaaaataaatatcatgcctgctgattgttttttcttgagacttctttttttcttctctttcagtttctgttactatgtccctcactgtccttgacaaaagaggctttttatgcccactgtgggttttgcaggtgatagtttagtgtagaatggtagtgaaagccatgggcttagggtcagacaaagcttggtttgaatcctgtccctaccactgaactgacttgattgtcacctagactagaggagcaactcctascattcacttcctcggggccaggacaagttggcatcctgctgcacacagggcaacctggagaatcaagagaaggctgccagcctcagatgccagtggctccctaggaaagayagtgttagttggtccccagtaatatctggcctttatcacacacctttatgtgtcaggcaccgttgtgagcaattcacattagtcctggaggcaggaaatgtcattaacctcatgttgcaggtaggggaactgaggttaagtaacttgtctaaggccacacatgtagcaagtggcagaggcaggatttgaatcaggcagcccaatgccagtgtctgcacttagaatcactgagagccatattgsctttctgagggctgttcttgatctgagagactagagtcctctgtcaagagctagtactgggcagccctgggggctgggttgtggggtgtgggctgtggaaggagtaagggaggtgctttctgctgtgtaatggggcaggtggttgggtgtgaactcgcctgacttayggccccagctgtttcctcttctaactcctcctcccagaygcctgccaggatgccagaggttagagggaggtgtgtccaatcatggactggatctgaggtccctctccttccctgcttatgacacaaatgctcagaccctgttctcctgaagggacacagaacctgtctccctgtttggattgcaagctccagactgcatccttgaagtgggacaacagagggaaatctatctcagcctcatgatccatggacgcatctcattcagtcctgggctccttgctggcccctggtgctgcagaaatccatggctgagggggtggagatgggtgggggsgaccgaaggaagctgtgcaagcctgactctgcaggaagtcctgcgaacgctggcattaaaaacaccattgcctgttgctttatttttagtggtacaaggagccctgagggcaccaggggggatgtgggaatcctattttttgctctgtcttgctaatggaacctctagcagtttttatgcctgatttgtttccctctgaagtctgtcatgcctgcagccccagactgtactcttccttgcacacagctcagaggaacatagacgatggtgtcagctgttggacttgcagccccacttcctgccagccccggcttccctgagaaggaagagggccgcctctcttgtttcatacccttccccattcttggcttggttacattgtgcttgtcaaataagcactcagctcccctctgagatgaatgcatattcccggaggtgtcccctggacatgctctgagaatgttcccatgcttgctttggttactcagaaccccgaaatccacgggagggatgagggtggttggctggcaggaggggctgctggagggctgaacaaatgcccgtgtggggtgctggtctcctatggtaggattgcaagggctgctaggtaggactgatatgtgcccagtgcccaggtgacaaatgacagacagcttgtggggcagggaagcacctcctagtgtgctacctccatattcttctacaccatcaaattttaaaaaccgagctttattgaggtatcactcacatgctataaaatttactcatttgcagtggtttttagtatatacagagagttgtgcaatcattgctattatttaattccagaacattttcatcaacctaaaagaaacaaaccccatacccatgagcagtcactccccacacccctccttccccagcctcagacgctactgaactgctgtctgtctgtacggatttgccccttgtggccattccatctaaatgtgctcatacaataggtggcctttctgagcccgtgtcatgctacaatagtgaacccctatcctattctatgacagacatgagagtgctcagaacctgaagagttggcattatcacaagcgcatccccgtctcccccaaaccaggcttcagtgccagggcagacatgggagacctgggaagcctgcccccagattttgctgtcaggcattggtgagttttgtgtccctcacaagtgggaatacattcaaaagacccctcccaccaactgggatggtgaaaagtataaaggacagtctcattctcagtgccatttagaatagggcagttttgatgaggagcaaggtgagtttcttaggtggtgtggctcttctcgaaatcaagggagctggagctggactcctgctatatcccttgctcagaactctgtactgcctggatctgatcattagcagagtctgcgccacctgctttggctcttggtccaaaaaatttgctgtatccttggcttagctactctgtgtccttgagggccaggaggttgccttgaagtccatgtggttcctggttgagtcactgacaaataaagtggccttggtgcttaccagggcccggggagaggagacaccatggtaatgacctcagacaataaacagaccattgggattggactgtggcctccagtgtcttgctgactcctgtcttggaaccaaatgcagaagctactttgtcctgcagctgatgggaataagctgccagcagatattttggtgcctagattatgaaaggagagtcaatatgtaatccacgggtataaaggtcatcacatggtccgagtctaaggcgatggtgttatttgtgcttgattggcggaatcttatgctgactgcttcttcacttcaccatttagagagtggacatcacacattagtcaatggcacacatttgggtttgaagataggttcaattgtatctccgtgttttcatgacatcttagagatcgtccgtccttttcactcatgaggctttggggtggagatagtaaaggtggctgatgtccctggatgtgagtgtgctagttcagcatgggacctcaggcagaaccttccccacgtgagccccagtgaccttctctgccgagaccctgcctcttagaggtgtgaagctcaaaggagatcatgtttctgaatacattttgcaaaggtggcaagggctgaccgtaaaagccaggcagtcagaccttcctgcctgtgaagggccaagatgaagtctctcttttgcttcgcagatgagaaaattgactttgctcagtgggagggatgtctgaccatctgaatctggggagaatcattaagtgcccattatgtggctgtcactgtgttaggcagtttgacaagcataccctggagcctgggagggggagtggtggagtggagtgagcttaaggactggaacagaagcccttggtgcatgcctgggcgctgtcacctactgactatgtgaccttgaacaaggtgtgtctgtgtatgtgtgtgtgtgcatgtgcgcatatgtgtgtgtgcatgtgtgtgtgtgtgtgtgtttgagatggagtttcgctctgtcacccaggctgcagtgcaatggcgtgacctcagctcaccgcaacctctcctcctgggttcaagcgattctcctgcctcagcctcctgagtagctgggattacaggcatgtgccaccaagcccggctaattttgtatttttagtagagatggggtttctccatgttggtcaggctggtctcaaactgccgacctcaggtgatccacctgccttggcatcccaaagttctggaattataggcataagccactgtgcccggcctctgtgtgtgtgttttgtagcaacttctctgtgtcctgatagccacaggggctgctgtgaggactaagtgacgaggtgtatgtcaggtgcttggaatgtcagtccatcccacctcctgctctccccactaggctgccacctcctcctcctccattaccttttgataggtctgattaccttcattttacagatgactctgggtcactcttcatcttttgtagaaatacctctgtagcaaatgtcatggggacattctcatctttggtagcagggagctcactgcctcctaggtatgttgttccattttggaatagcttcatgtgaatcttagcatgtgccaaggtggatgtggagtctttgcatcagaatcctgaactgctcatcctgaaaaaaygatgcgatcagcctgcttcccacagcgtatgctcagggtgacttcttgtgacatggagatggttggcagtgagctttctcttgtgacttcacacagggacaagtctgtggcattttaaggactagtgagagttcaggatggaggtgaaggagattggcccagagagctacagagttgaggagaggaggggtggcacacaggaggacggaccatcaggggctcaggctggcggctgaggtgggagtggtgtcattatcttccgggtcccaggccttgttcctcctgacsctgaaaggcagtattgggtagaggcatccccttgtttygcagacctctattaaaacaaaggagaacaatcatgtaatgatctctctaattgctgaaatgacattcaatatgatccagtaggtgcttcatgatcacacatcgtcaactctgcgcagtgggaacttacttaatctgaagacagatagctactgaaatctctagcaaaccttattcctgatagatagacatgagatgcaatcccttcaggttaaaaagaagacaagaacgcccactatcacctctcttattcaaccttgcaccctaggtcagagccagcgcaataccacaagagaaaaccaatagagacataagtcttggaaaggaagagatgaaggcatcattattttctggtgcagccatcatctggctggaggaaatcgtagactccgaatstataaattattagaagcaacagagttgagccaggtggccaaaggtcagatattaaaatgcatattaaatgcatttttgatagaccaacagcaaataattggaaaacacaatagaggaaaccaaggctccgtgtggggcggggttttgcattatccagtgaggcatccacgctgctgattctctttctaatgatatttgtacagcatgataaagcagtatcgyatacatccagcccactggggcaaggcagatacctttattttgacttttagggaggaagaaccagaggctcagaggttagagcacccttgcccaagctgactcagtgactaggaggctgagctggggcctggccccctggaccaaccctcattcctttttgctgctttctacccaccccaccttcttcagaccttactttctccaccatttgtcttgttctgccagcttttcrttgtctgcctctagtaccagctgagctgggtgggagggagagtctgggagtgttyggatttgggttagcatctactctgtagtgtctttcatgagccacagcctgaccttcccaggacgcttgctgcactggatgcggggcagggatggsttcttctgagggaggagagagccaggcggttgtttggcgtggcctgggtccctctctctttgcgttgtctcccctcccctccacactgctcctctgagtctgacttacatctttgcttttttgttttatttaatgtgtgttcaaaagttataaaaatagcatatgttcacagcaactggtggaatcataatatggagaaaaagaaagtctttcttatttactgtttgatggctctcggatgccatgcactcctctcctgcagctttcctggccaagtgcttagggcctagggtggacccttccacttatttccccaggcccgggtcaagataggcaaacaggttttccattcattcagcaaaaatttgctggatatttactgtgtgctaggtgctggggatgccacagggaacaagacagggaaaaacccttgccctcttggagctgacagtccaggggattaaaatattttacagtgggccgggtgcagtggctcatgcctgtaatcccagcactttgggaggccaaggtgggcggatcacttgaggtcatgaattcaagaccagcctggccaacatggtgaaaccctgtctctactaaaaatacaaaaattagccaggtgtggtggcacacacctgtaatccagctactggggaggctgaggcaggagaatcacttgaacctgggaggcggaggttgcagtgaaccgagatcgcgccactgcactccagcctgggtggcaaagtgagactcagtctcaataaaaatgaaaacaaaacaaaacaaaaatatcttacagwgaagtgaatgcagccaatgataagtgctatggagaaaaataaaacaggataaagttcctccctgttttgtaattttaaaggagggatcagggtagaattcactgagaaggtcagttttgcacagagaccaaaaggaacttgggagaaagccatatggctttctggggaaggagcactgaggccaagggtaagtgcaaaggccctggggcaggatgtacctagaaatgtgtcctgtcaatgggacagagcagagcatgtgacaggaataaaggcaggaaatgaagtcacagaaggaggggaaggaattggaggagggcagattgggtagggccttgtgagccttgtatatggcttttcagttgtttaatgaaaatgggatcttaytacattcttgtmccctgcctcttgcttttctttttaaatttcaatttattattatttattgatacataatattttacctatttatggggtatgtgtgatatttgttacatgtgtggaatgtataatgatcaagtcagggaatttggggtatccatcaccttgagtatttatcatttctatgtgttggggacatctgaaattctttctcttctagctactttgaaatatgcattagaaatatacaatacattgttgataactacgtttttcatcctgaacatctctcctgaggcaggagagatgagatctatatcttcctgtagatatagatctcattttaaaatataattacagaattttcacggtatagaggtaccataattttttcaatcattctcttttgatggactttcaggttgttgtcagggtatggtttctttctccactacatctcatatatgttgcctttcatgctggtgttgagagagcggaattcctaagtcaaaaggtgtatgtctatatagaatattaatagacactgttagatttcgctccagaaaggttgtcgccaatttctctgatataattctgttcctaagtctcagttgcctggctttgccctctagttgctaaatagctactctgcaaagaggggaagtcacacctataaaaagagatgtccctggaatccttcatcccgtgggaaggtgtgtggccttttggcatgtgctgctgggaacaatatcattcgctcttttttggagcttgtatttgatggctgtgacgtcaaaatagccaagaagatgaaaacacagctgttgctgtgttatttgcattatggctaattttccatatgtttaaaataagcacaacaccaaggaactgcatggaaacagattcacaccttgtcgaacattggattgtgytccygtagcatcttaaggataatgcttccccatagcatcccttcttgtgcgcatgtaaatcctggtacaacctctgtgggtatgcgcttgattgccagttcccccaacccccaatctccggatgttatggagcaggatcgtgtaaactttggggtagacttttcatctgtttagtagmcaaatgtatttgtgtgatttgtactgttggacatttaggccatgtcccatctgttgcacttcaaacaatgaataatcttgtgtatgagtctttttatgcatgtatgaggatttcttttggatagatttctagaagtggaattgctgaattgaaagggacttgccatttacaagttgatagatattatgaaattgatctctggagaggaaccagtgtccctgtccacagatagtacaagtgagtgccttttccctgcttcttcggcaattcgagatcttgccaccctttttgatttttgccagtctaatgggtgagacgtgatttattttgtatgagtaagggtgaacattacatgtttgggggccatttgttttatgtttgtgaattgtctttcatgtcctttgtcccccactttttttctagtggcttattagtctcttatgtggcccagcatggcctgtccacattaggagggcatttgatactgtgattggataaactaacctatctgggctgggggcagtggctcacgcctgtaatcccagcactttgggaggtcgaggcggatggatcacgaggtcaggagttcgagaccagcctggccaatatgggtcagaaacccagtctctactaaaaatataaaaattagccgggcatgatggcgcgcacctgtagtcccagctacttgggaggctgaggagaagaatcgcttgaacctgggaggcaaagattgcgccactgcactccagcctgggcaacagagtgagagtccatctcaaaaaacaaaacaaaacaaaaactagcctgtctggctagttagaggttgatccgcgcttctttattgtcaggagtgtaaatctattaataggtgtttgagaaaaggaagagcacctcagcaacaatctagatgggagctgcattttggtgtgtgctgtactgactgttccacaaacaggttgaacacagacgtcacagaactatggggccccgaagtccatgtgccggggtacatcttttatatggtctcatttttatcctattactgggtggaagaattatgaggaaacttgactgtttgctactaaaaccttttttttttttttttttttttttgagacagagtcttgctctgtaacccaggctggagtgcagtggcgtgatcttggctcactgcaacctccacttcccaggttcaagtgattctctggccgcagtctccccagtagctgggaatacaggcgcccaccaccatgcccggctaatttttggattttttagtagagatggggtttcactatattggccaggctagtctcgaactcctcacctcacgtgatctgcccgccttggcctcccaaagtgctgggattacgggcgtgagctactgcgcccgaccactaaaacctttttttccactcacttgaatttacaacctcattgtgagattttctaggcagctactccactgggacattttgctagtccaggtggcctagctgctgtagcaagcaaccctcaactccagccatgtaacacaatcaaagggtgtgtctgtggctctgccctttctaggtacccagaatcctcctctgggtcttcagctggcagaggagaaaaagagggagcaggatcgtgtgtgaaggctttatagagcagatactctgcccacattctgctggccagaacttgatcttccagtccatctaactggagggaggctgggaaaggccagccatacgccattgtyatcagtcctgaccaggtgcttggtgaaccatggtctcttagtgccctgtgggacttgtaagtttttgaagtgtcttctcaagtgtgatctcactccatcctcatagcactgacaaccctatgaggaagtaagatgagtgcttctaactcccagttcagaaccgtggagactgaggtctagggagataagtgtcgtgggcaagggtaggcacttaggtagggacacaaatggtagggagacggggtttgaacaaagagctctcatgctgactggccccatccgacaggacacaagagcacccactctgggtgtgcctgggtcaccctctgcatgtagtgggcatgggagaaaagggctgcttagcgaggggaaattggtggctggctggagtgcttcttctatcctagagtgtggcaagaaaggaagttgtctcttgccttttgcaaattgcaaccgaatggtgaggggtgacagtattgctactggtaggaaagcttggatggcagggacagaacggctgtaaacctggcacctctgggggagctgccccctcaccttgactttgaccattgtccctttcttttcactttcatgggacactagcgttgaaaaattggggcctttttcttcacwctcccatttctctttatttaattattttaaaacatctgatgctgcagtgagatcagctgtgatacatcatctgttctattttgagctgcagggagacaaatggagaatactgctacctcccctcctggcgaggactgtgctcccaggagcccaatggatggaccgagccaaggcagctctgggcacaatttggatgctttcccctccaggggaatgcctgggtttccttattgtgcagatgccttgaactaacctggtcaaaaactagagagacaaaatcacagatggttgcacaggttgttggagtagcaaagacagcaccaagcagcagaaagaagatgaggcattgagtcctacgctcagggctgagcaccgtcactcctaattgaatggccactgaactttgtttcctcatctatgccaaagaaataacatttttcctaccactttcactgggttcttatgaggatcacacaagataatgtgtataaaaatgctttgtaaatggaaaagcactctgcaatttaagacattattatattaatagtaacaattaccatttccaattctggtgattcacttggggtaggagcccatagatctcatcactgctaccattactaccccacattgtacttcaaagctgcaattaccttgcacaatttcatttgatacattactgattatgcagtgttagaactggaaagcatcttgaggattaactaatccaamtgtatcgctttatagatggtgacctggcgcctggaagggagagacttatttgaggtccctagaactcaggactgtgggctgtcattcctagggagtaggctgttttactttggattatggttccctgtcctttctgaagggctagacatgggaactttgggtgggacgttgatccttagtcattaggtggagtctcagcctgactcatgtctgcttactcacgtcaaccctgctctgagctccactgctcaaggttctgggcgcatgtggacagtgcttagaggagaagctcacatgctgagaagcttgggcacagggtcaaagagaggagaaagtaggaactaaagtggtttgctggcaagaaaargagaccagggcaattccagaacaaagaaggtggaggtgctcctggtctcaaccttggtctttattggaccccactgcctttgtgcgctctctcttactgtccactccaggggctcaggctgccggggcacactcagtgggcacagctgcaggactgtgaggcctcctctaaagagaagactgagggkcctccagcattattgtaagtgttcaaagcgtggtcagaattcatctggatagaagaacaagcacaaacgggtaaacatcctggcaagactgagtttggcctcatgtcattcacagtgccactggttggcccctttcctgcctctgggtcttgcccaaatgtcatcttgcccacatgtcacttctctatttaaggatgccaactgcacctcacctcttatttggaccatctttcccaactggatttgccatcaaaatattatacagaaaatttgcaaattagtacagagaattcctgtctacctgttagccagtttcccgtaattgttcacatcttacatcactatagaawagaacaagkttcatgttggtctaaaactgcatgtcaaactttaagccttcctcaaatatcatcacttttcccactgatgctgtttttcttttccaggatccagtccagggtcccacattgcatgtacccaccatgtctccttagtgtgcttttgtgactcgtctttycttacctttcatgactttgacattggtgaagagtgctggttagttattttcataggcggkctgtatattttggtgtgtctgatgttttctaatggttaaagcatatgggtttttttttgttttatttatttattgctattgattgggtctctcctgccactggaatatctgctccctccgagcaaggattctcattggtctcgttcacttgtgtgcaggaacatctgtgtgtgcctcgcacccatgctcagtcaatatttgctgggygaacgaatgagactgaactcccaggcattagtggagcatctgacctgacctgagagaaacgtggagaagctgggtcctggcagagccttgatgggcagttgggctggatgggcactaaagcctctttcagcattcaggttctgtgattttgtaacctgatggtggtatctgaactcaagctaattaaattccacaggtgtttgctgaggaagtacttgctgtggcatcctgggctgggcaaggtgggggattgatgggcatgtgcgatccaggctctgaaatgcaaccacattcccagggaagccaggagcacagggattgcatgtaaaacacaggtgtccagttagtggtttagaatctagactttggattagtggctcccaaaccacagcctgctttagaatcactaggaggacattattaaaacaccaattgctgggtcccaccctcagagtttctaagttgcttggcctgggtggggcctgagaacttccaacagcagttccagcaacttcccaggtggtgcttattgatgatgctggtctcgcaaccctatgttgagaagtattactctagatgttaagagaacacacaatttactgctaattagcaagagccaggagggcttcctggaggaggtggtcaggcttgagtagggtaggattttcagaggtgggtctgaggcttgaatctatacacagctggcttgctgccaccacatgcgatctgtggtgccttttgcctgcctttgccctgctggcacctggcctcactcgtggccttgtccaatcctcttggtacatgagtgatcttggccaggggagtctgagcccccagaggaggaggctgactaagccttagaatggagttgaccttggctggctgagatgaagtccctctgaggcctggacgtggcctgcgctgcacagcctgccttaatgtgtttatctgcctgggccttgctcgctgyctgctggcaccatatgaggtgttgctgttgagctccgtggctctatttctgttttctcrcctggcaccagcacagcagggcagatgaggtgtgtggccacccttggtttcttcctggctccaggttcttcttgaggtgggcatttggtcaggaagaacatttgagtctcgctagagtgtctggtacagaagcagctggacctttttcaggagggagaggttctgggaaggagggagaaataaatttagacttagcatctggcggtggtagtgagaggtgacagcgtgctggcagtcctcacagccctcgctcgctctgggcgcctcttctgcctgggctcccactttggcggcacttgaggagcccttcagaccgctgctgcactgtgggagcccctttctggggtggccaaggccggagccggctccctcagcttgcggggagrtgtggagggagaggcgcgggcgggaacaggggctgccagcggtgcttgcgggccagcgcgagttccgggtgggtgtgggctcagcgggcttagcacttgggccagcagctgctgtgctcaatttctcaccgggccttagctgccttcccgcagggcagggctcaggacctgcagcccgccatgcctgagcctccctgcccctccgtgggctcctgtgctgcccgagcctccccgaggagcgccgccccctgctccacggcgcccagtcccatcgaccacccaagggctgaggagtgcgggcgcacggcgcgggactggcaggcagctccacctgcggccccggtgcgggatccactgggtgaagccagctgggctcctgagtctggtggggacttggaaaacctttatgtctagctaagagattgtaaatacaccagtcggcactctgtatctagctcaaggtttgtaaacacaccaatcagcaccctgtgtctagctcagggtttgtgaatgcaccagtggacactctgtatctagctactctggtggggacttagagaacctttgtgtctagctcagggattgtgaacgcaccaatcagcaccctgtcaaaagagaccacttggctctctgtaaaatggaccaatcagcaagatgtgggtggggccagataagagaatgaaagcaggctgccgcagccagcagtggcaacccgggtccccttccacactgtggaagctttgttctttccctctttgcgataaatcctgctgctgctcactctttgggcccacgctgcctttatgagctgtaacaccgcgaaggtctgcagcttcactcctgcctgagccagcgagaccatgaacccaccagaaggaagaaactccgaacacatccgaacatcagaaggaacaaactccagacgcgccaccttaagagctgtaacactcaccgcgagggtctgcggcttcattcttgaagtcagaccaagaacccaccaattccggacacagtaggatgtacacacactttgtgcgtgtgtgtgtgtgtgttcagccttccaggatcatttaggaatttttattccttaattgacattcaaawcttgatggtagaggtgaggagaggcccagggagcttgggagaggccacgttgtttgtgcagttggaagactctgggcaggaaaggagcaccacatccaagtcagagaacacgggaacaagaagggccgtccatgtgcttctgattcagccccatcgttttaactgagacctagaaaactaagtacttgtcctactccagtgctgcctccccagtcatccatggccagactaaattactctatctttcctttgggctgcaaagtcgttttatttataacacacctctcttgttttataagtagccatgaaggggtytgttttacccactagattagggattggtacattacaggtcgaatccggcccactgcatgttttgtaaataaagttttattggaacacagatatgctcatttgttcgtgtattgtgcatggccacttttgtgctatgtcagaggtgagcatttgctacagagactaactggcctgcacagtctgaagtattcactatccggttcttcacagaaaatgtttgccagctcctcccctgggaggtgagctccctgagggcaggaacggcactccgtttatcttgctgcttcttgtttcttgctggtagtaggcactcaataaatgtatgttgaataggcttgaaatgcagtggattgatttgtcaaagatgagcgccagccacatggctgttctggcttccccaggtttcctcttgctgtttggccactttgtgctccagttttctctctacagaaagaagataatattatctatcttgctgagttcgttgatctgtggtgagggtagaacaggatattaaaatatcttactagaaccttgggcccagcttccggtcttcctgatggtttcaatccaggcctagcacgggacctctgtctaaaattctctgctctcatggccctgccattcctgaggcaccctttgcctccaggctaaagtaaacacctgtcattcatgatcctccttactttgatatgataaaatatcagggcccagactgcagtcccacggccctggactccagacctacctgtctgtcttgatctctcaatcctctagggcagccttctcctacatccagaattttctgcattctgtcccctacatgaatattgcacttgttcttgggaccctatccccctctccctcctaacttcctaccttgcccctttctgcctttctgctctcagcctcctgtctgcccttgcaggtctcttttatgtctgaccttgctggagtcctttgacctcggccaacaggagtgactgtctcatttgccacttaggcactgycttaggttttaaatttttaatctttgtggctgcttgttaaaaatacagggacccaggcttcattcccatggaattagaatctccaaagatgtgatccaggcccctttgacttttaataagctcctaatgtggttgtgattatgatcaaagtttgaggaagactaacttaaaatagagtgctttgcagtattatttctctttctgtgggactctgcttatgtctccaaataaactataaacatcttgaaggcagatctgggccttattttcttttcagagtggcacatatatctgaagactggggccgtgagatgatctgtcggtgagataactccacctggggccctgcatctgataggcgctcagtaagtgtttgcttgttgatcaataaaagacatgaaagcacctgggaaagcaaaacagcctctgcaaagcagggcattattactgggagcagatctgatgtgtaccttccacagattccactgaaggtgtcctcagagcaccggacactcaggggcccgcagcccagacacagaaagtccrctctgctgagaaatgctcaccaagcagaatccctcacactctctagctttgttttctttgatctctctgagcttaggaggaaaggctcctgttccctccctcttggcttatcccaataatgcaaagccatagaagtgcaggctgctggggaaaagtttgtttggacacttaagaatgtagaaaagggtttagcttgtataaagagttttgctttctcattataatgcttggagagaagtgcaaatgtttcatctccgcctactgagttatactgcctgtttacataagcctatattcagtggcctgagaaaaggcttcttgccttcttcagggcgtgatggtgcaatcttggtgtagagtttccaagcagagatgatgctacggcctcacgtggtgggaaggctgtgtggcaggaagaataagttcaaactgtgctttgtttagaactgttgtgcaaagttgtttcttccatccaagtattaactgggccagaccctgcttagctgccaagatcagacaagatcaggtgtgtccagggtggtatggccgcagataccaagctatttctaacacaaggatgctctccttttattgagcagggagaagacagcacgtacagaccaaccatcctggttgtaaacttgtgtcctagtcagagctctttctagctggagtagaaaattcttaggctgtatgtaatggaaagagagtggagtccagcaataaaaacagatcaggtaaaaatagagctaggagtcaatagtgagggctgagttaggagagttctctgtacttccctagagatttccagccatctaagcatacgtgtgagttcttgctttgacaaataagtactccactggtatgcacatagaaacttctttcacctgtgggatcattattaacatgttttatgtggagggaaaaataaagattttagaacttctttcttccctcatgttttcactccattaatattaggcttaattattcaaatttattatattagagtcttattgcttaatttaaaaaattgaatggattattagctttttaataaacagtgacatwtactgtctactaatgagggctcaaatcatgtaatttawtgctgcatctctattwtgttcatgaaatgaaacagaaattactacctacttgaaactggacttgttttctgcgctcctatgaaactgaacagtggagggttgctcgtgaaggatctgggacatgtttcatatggagcacaagaaaaggacgtcgaacatgcaacggtctgcatccaggtgctagaaccattttgtttttcccttcatcatccctagaaccaagagtgtgggtgggaatagctcagtagagtgaccatgtgatcctgtgttacaactgaagacaaaatctggcacagagtctctccagtgatgactatgaaactgactggtgccccatcagattcagaagtggagagtgttacatactgatttcagaaaaatgttagataaacattgggaccctttattatataccgggaacagaaaatgcatgttgataaaagtttgggatgttccatttcactctgatataaagtgtgcgtggtcagattggtttctatttttgataaaaatgaggttctggaaagccattctggctcatgggcttatgagaaaaaggttttggaaaggagttttggagtgctcccctacagaaatagcactgctttttaattgttctgtcgctagagccttggccccaaataacaatgcatgaatctcagtatttgtcttcaaggagctgtggtctgataggagcatatagtatacctatatggatgggtataactgaaggtggtgaggacctgtttttagatgcctgagaaatccaaaaacaagacagggaagttgttcgtctgggaatcatgaagcatgtaaacctaattaggggaggtggcatctgatctcatccttgcagaatacataatttttatacaaacaatgttgaagaggtgatgagaacagaaaagctgggtaaagtgcagagcatgttcaaggaagggttacaaacatttcttgagggcctgccatgtgcacagggcaccaatctagtgaaagcaatctgataagagcttggtacaaaaccaagtaatatagcttgtgcattaccttcactcctcttactccagtaatttttgagtaaaataaatgttgtctttaattatattaattcatacaactgcgacaacggcctggtgaaatcagtaccatgcttgtcctcatatgagagaagaggaaacagacattttaagttaagcgacttgcttcaggtcacccggctagtgcgttgtggggctgagactcaccccagccagtctgactgtgcaggagttgcagccatttgttcctctgttcacctcccccgatagtctgagtggcctgagagcaggcatgtgttttcgtcctcttggtactcctgtcatccagcaaactgcccagcatgtggtcagagttcagtatgccaagtacaaaagatctgctatggagattcttaagtgatcaatgggttttgagggacagcttggagaagggtagggaggttgttctggggtcagagaagaacgtgagcaaagggctagagtggctgagaggactgtgcagggagtgcatgctccagtgtcccttggccaggtgtgtgggcttcccatagggagctggaggtgatgctggaacagcgtgctgtggaarccttaagtgcagccgagtgctgggttctctgtgagacttcttagggtctggaagactgggtcagacctcagcctcctaggtgatgtcagacagccaggccttctcccagctcactcttgagtgtctctgtcagagacagagtcagagactgaatggcgtatgggctggatttcagggagcatgttcttctttaaaaacatttatggaacaaggccaggcgtggtggcttatgcctgtaatcccagcactttgggaggctgaggcaggcagatcatgaagtcaagagatcgagaccaccctggctaacatggtgaaaccctccctgtctctactaaaaatacaaaaattagctgggcgtggtggcatgcacctgtagtcccagctactctggaggctgaggcaggagaattgcttgaacctgggaggcaggggttgcagtgagccgagattgcgccagtgcactccagcctggcaacagagygagacttagtctcaaaacaaaaacaaaaacatttatggaacaacttaaatgtaccacattctgtggctataaagacaaataagggcttcccacaagtcttacgtatatgttggattgttggtgcttgttgctaggggaggacgagtgggtagtgaataccaaggccccgtctaaggtggttgggtggttataaagcactgtggactgacggtgtttctctgaccctaaggagctgactggcagggtacccaagtcctgctcactgcgtttttgtaactgagctaagaactgaagaaatcaacaaattgccaccaaatcagatccttagtaatrcgtgataaagcatgacatatgaaagaggacacakaatttaatcatcttaccccataaatccagccccctgcaatctgtctcttgtgtgaataagacttcaatttacagaaatggaaagttccttttttatctacatatggttatacctcctttcctacctggaaggcatttccttgtatttccttcctgagtagtgatcaggacttggggttgggcaccaaagcctttaggaagtggagttgggtgtgttggcctctcctgttgagtcaggactgaggctaggcctgaaaggtaggtgacaaggttgaagccccaaaccactaagaatcaacacccacttcctcttcatctgctctgccccaggccagggaggcaaccctgagacccaggagtaagctcaatcctgctttacttgcctggaaagtcaagtcactcatcagaggaggaagagtcagtttccctcaaggatgggctcttggtcatgaagctgactgctgttgtattactcagatttcagatcttagaaaattatagcagcatgggctttgaaggccaaatacatgatcatcacctccttttgagatgagactctcctggtatgacatccagtactcagagatgccatatgccttctggacttgtgtccctatrtgagaaatattcaaccatgctctatcaagtctctatttgtcaggacctggattccagcagccatttgtgcccccgtccatctttctgtgaaactgggccagtgatgcattgacctcatttctgatgggcttcatagtgggactagttgtggtcagacctgcataagactgaccaggaagaagcccaacctgggagtccaaggagcagaagcaaggttyaggaccagggaagagcrggcagagctacaagggccaggctctgagcagtaagagattggcaagagcagccctgctgatgagcctgtcacagaggtaccatgataatcctggaccagtgagttatctttgtagcacaaagaaggttggaggcacagattgctgtggactgaagtaggaggggagggagatgctctcgtaatctcatgttgcctgagtcagctttgccttgctattggcggatggggctggtggcctgtcatgtgtgcagatgagtcagaggaagtgggccctccctggctggtggcttgccccatgccttggggcatagctaagcagttgcatgtctactaaacagtcttatctggaagcaaatatggaaccaaacacctgagcgtctgccaaggcctccaccaccaaggtcaagaagtcccccgaggggcatggctctgtgagctgcccttgtaggtgtcctggagaagcaggcacttccttgcagttggtcaagaagaggcaatacttcttgcttgtgttagggattttagagcagcggatttagggcatggcaaggttggggctacttccgggggaatgaacattttttaaaaattttactttaagttctgggatacaggtgcagaacatgcaggtttgttacataggtatacacgtgccatggtggtttgctgcacccatcaacccgtcatctaggttttaagccccgcttgcattaggtagggaatgagcatttcttcaggtccctaagcagagcttgaaaatgatgatatcaactttaatcactagcaattattaagctcctcttccacatatattaagttgtttatgcctcataataaccctgatgcaggcatcattatttctgttttacagaggaagaaacaaagatatgaagaggttaaataasttgccaaggccaatcagctagcgagcatcagagctaggattcaagcccaggcagaccagctccagagcctgagctagactcaatgtcagtgatgatgtcgttgaccttcggggacagattctgcttttgccctggtgggtctgggttgagatgcattgcatttgatcttgctggagaaatttccagtcttctcagccctgggaaaatatgtatattggaacctcagagctacaccctgagggtatgtctcctggtttgctgaatttttaaaaagaggttttactctrtggccagctttcttgccaggagatcagagaccgatgacagctggcagaatcsgcctctgttccagctgtctcctacccttcctaaaactcagatgctctttgaagctgtcttcctccattgaggagcatgtgcttcttcagtgacagccggagagtgggactgggctggcccctgtccttctaaggccaccacctgcagcactcctagtcaccgttccaaggtcactgtggaggaaacagaagtggccgagagaggaaaggtgcttctcaaggaggctgagagtggagggagtaaggcaactgagcacggcagttgggtgggcccaggccaccaactgtttgtcctgcctgagttaagagtccagaattggggctgggtgtggtggctcacgcctgtaatcccagcactttgggaggctgaggtgggtggatcactaggtcaggagatcgagaccatcctggctaacacggtgaaaccccatctctactaaaaatacaaaaaattaaacaggcgtggtggcgggcrcctgtagtcccagctactgaggctgaggcaggagaatgccgtgaacccgggaggcagaggttacagtgagccgagatcacgccactgcactctgcctgggtgacagagcgagactctgtctcaaaaaaaaaaaaagtgttgagaattgggtatcaaacagagcctggtgtctgtcctggytttggcttttagcagcctggaatcaaatagccacttacatgaaatttctaacactgtcatggatggcaggcaggtgctggagtcctactgcctgcattacccctgatgtcaccaccagtgagccgtgagacctgagtgagattggctatgtaacttgcagggtcctgtgcagaatgcgaatgtagggttcctataaaatgtatgaagaattttatgatggtgatagcagagcattaagccaagcatggattcttcccaggtgtggggacctgtatgatggcacaggttgtactctaagcctcagtttcctcatctgcaaagtggagaaaatagtatatttcccataggcttgttgtgaagtttaggaaagataataatgcatataaagtattgggccacatggtaagggcttgatggacaccagcatttatgagtgcagggtcagaaattcacagcttctttttgggtcattggcaaaagatcacggagagcaaaggtacctgcaacagtggtttagcttcaggaacaggtctggactttggtctctgcccttggctgctatggcttgggactctgacctcttttgcaaagcacagatggctcttctgcaggagcaagaggcccctcrtcacatgcacaggccacatggatccagagacacctacctcctagaagtgtgtgtgggatcctggggcaggctgaccctgccctgcatttcccaagtcatgggccaggaggaaggcagtagagattggagctgtttttgatgcgttcattttttatttgctgaaatatgttgaaagtcagttaccaatatcacaggatttcatccctagagattttagtttgcatttctgaaaataaagacatttcttttttttttttttttgagatggagtctccctctgttgtccaggctggagtgcagtggcgccatctcggctcactgcaagctccacctcctgggttcacaccattcttctgcctcagcctcccaagtagctgggactacaggcgcccgccaccacgcccggctaattttttgtatttttagtggagacggggtttcactatgttagccaagatggtctcgatctccagacctcgtgatctgcccgcctcggcctcccaaagtgctgggattacaggcatgagccacggtgctcggccagacatttcttatatatatactataatcttattgtagacattgaaggtttttgtttgttttctggatttattaaggatagcattttatggaaagttagctggatatgtgtggggagggaaagtgattagtattaatctggtttgctaggaygagaggctgttatccaaattcaaatttggcattcaattcaattgctgttcatggaagaaacatccggggacacctgcctcactgccccartgggtcagatggaaatcactttctaggggagcttctgtgactcatttcctttgctgggatcccttctgtcttccacctaaaccatcacaagggcctcctgagggtctcycagcctctggaataacaccttcactggtccgttctttactggccaccagagaggcctcttgaagacgtaacccagatcttgtctttctttttcttaaaacctcccaaaacttccccattgcccacagcaggagtctaccggccacttctttttgtatagtccatgagctaaggatgggttctatctctttaaatggttgaaaaaaacaatagacacattatattttcgacatatgaacatgataagatattcagattcaaatatctataaataaagttttattgggaaagagccatctgcattcactgatgtatcttttatggctgctttcaagcttaccgtggcagagttgagtaattgtgacagattgacagcttgttacagagaagtttgcccacacctgagctgtaggataaaattcaggcttcttcgcacacacctgtggccatttgtcactgacacccctgcctccctgatccctcctgctttgataaccttccatgctcttagcaactcccagctgccggcagatgccctgcatgggccatttccacctctgtgctttgccccttctcttctctccatccttgctgcttccttggctagacatcactgactcatccttgaagaaatccccttctccaagaaggcttcctgacctccsctctttccctttcatcctgtttggtttagtggctccctccctgtttggacaggaaaaacagaagcccaacgactccgggaggttggcagctgggcgctcagcacagagaaaggaggcctggggccaaaatggctcactgagtcagcagacccagtgcctggtatatgccaggtgctctagatgtgaagagcacagatgcaggccctgcctctgtggggctcacatcccagtgggagatacagacagttaatgcacattttaacaaatatataggggatgagagtccatgtcttgggagtgccctggccagtggctaggaagtggtggcaggtggattttctagataaggaacccaggaaggcctctgaggaggtgacatctgagtcccgagagaggcagagcccttggcggctggatactctggagcgagagggaagatgagatctctttctttgtcctcttcaggctccaggaggtggtgagaggttgtcacttctcttcttccaggctcacagcaccagcagcctaagagtttacaccagactttcaagtcagagtcctcctccctcgttgggggctgcaggcttccctcagacccttctctrgagggcatttgatccctaccacaggacttaactggaagcccctttttgagatctgtgagatgtctgggattttccggccaagaaggacttcagagataggcctgtcttcatctcaagaagcaaagctgaaacccagagcagttgagtcccttggccaccgggctgatcagcggcacagcygggaccagagttctggttttctgacccttagagcatgagatcactcatcttcttctgatttaattgggggatctcaggacagatcagccactagaattgggaggaggccattaaaggaaccccttgggtccacacaccactcaggagaaaggcccactggtgaggccaaactacttctttgaagaggcttctcttagtatcaccagtggtgtgttgctggaggtgtccagaggcactgtccgaagctgctggcctctaatcccaccagtttaatttagctccagtcctaggggagctttgctaattatagctagctggccatgctgggagctataaatagggcaggaggcacctgtttggtccttactggatgtttatcaaggtacctgcagaggatttggccactggactgggtgcaatgtgggcacagaaagcaccttgaactgtgctctttattcagtttaggcaccaaagccaatgtgaactgtggagggggcagggggatgtcaccagcacaacctggaaaccagactgtcagagttcaaattctggcttcaccaccaactagctgggagaccctagttacccwagctctttgtcctttagttttcccatctgcacaatggaaatctagatatttacaaagaaggctgttgtgaggatggaatgagtgtatgtttttatctatacataagttacgtatgtgtgtatatatgtgtatacacatgtartttagagttgcctggtgtattaagtgcaattatattgcttgatgttatttattaccatatgaaatggcctgaggacgggaccatcttgcatagaaacctggatcttggaaggaggctgagtctcggtctctcccggtccttgatgaggcaagttaagtgcctcatctttaggcagttaaggcaagttaactgcttyaactacatggcagttaagagagtgtgagccgggcgtggtggctcacgcctgcaatcccagcactttgggaggccgaggcgagtggatcacaaggtcaggagttcaagaccagcctggccaagatggtgaaacccccgtctctactaaaaatacaaaaaaattagccgggcatggtggtgggcgcctgtaatcccagccactcgggaggctgaggcagagaattgcttgaacccgggaggcagaggttgcagtgagccgaggaaaraaaaaaaaagagagtgtgtaggctcgtcaacatggggtcagttactgctgttacctcctgtttggcatgctacttcacatctgtaattctccattcttctccattctttcctgttaaactgtggtgccatagcaatgagcatttcatgggatttcagtgagaattgaatgaaataatacttgcagagcatttcacacagtgcctaacacatggtgcatgggaaacagtgtaagccattgtcgtccttcctcctcccgttaaatgacttggacrggttaccagcatctcgaggcttgatatcctgtagctctctaggctagagaatgggaccagtggcttagagggcagaaggctagcagtcctgagacccctggcctgcagatgggaactggatcttcttcctttgcagtcttcttgttccagctgttagcgtcactccttttagaatcccatggtgagctttcttgcacggctgtgtgcttcctgtgtttctgtcattgtgccccagctgggtcccaagccctgaggaccatatgcagcatgtggtggacacttaggaagcacgtctccatggaggggacttaaatgtcacgtagtactgccccatcaagtgctgggagaggccgagagtccgcctgcttccaagatccctgaggttttgtttgttgtgacatagcaagaggagttaaaggatgggggattgtttcgtagggagaaagagaggctaagaggtagaggtggggacaggatacctgggtgcctttctgggagaggaagtctttttctttgtcctgtggctcagagcaagtctctsagagtggaggtttcaaggaggcagatctctgttagggaagggcgagttgcctggccctagacctgcttgaagtgggaagaatgtagatttggcagtcaggcctgctagtctagggccttgttcctcagacggtggttagaggatcagcagcacaggttccacccaaacctcctgggcatgaatctagatgcgtccggatgtgcacacagaagactgaggagtgctattctagaacagagcttctcaagccaggagccattctccccaatccatggctgagaagcctaaggctagaaacatgggccttgagcactggatctcaaagctctagtttcctctctggaccagtagcatcagcctcacctgggagcttgttggaaatggaaattcagaggcccaacccccaagtcagggactcccctctgggggtggggcccagggctctattttaactggccttccagtggctctgaggcaccagtgagatcgataaccaagagccagagcacctgcacgttggaaactcctggggagataaagcaaatgcttggaacaaatccgaatagcctctgggtatggcagggactctgggaacttcagatgctccccgggtgatcctaatgtgcagccaatattgcgaaccagcattttaggcctgtgaactaaatctcagcgttctcagctatcagttgggtagactaacctctgtttgcctgccagtgatgggaaggtgccttggggagcattaagacttagctccctgggttctggaaggcacaccagaaagtgggcttccatctgtccagaaaggtgcagccaagattcccgttttggaggaggcaggattggatgcccgccatggcctcaggtggaattgcaatgtggtggctgtttggtccaagtactaagtgctgtaaagacgataacctgctctggaaaaggaaatcgctagtgccktgagagaacagttcatgcattctcctcctcttgtgcttcccagcctctgccaccactgcttaattctggggcttacctttagtgaggtcatttgccctgtattcagggagctgatgctgtcagcactgtcctagcattggaayggtggggctgttggggagctggccggctcgttctgggcactggtggaggcaagaatgaggtttagagaaatatttacccaaagtaatccctttgctatgccactgcccatctcccaggaggctgggcaacaaacacagggttctggtcatcatttattgaggggacaagctttgcctcccaagggctaggaggaggcaggaacaaagggtggtggtacgatctgtggtcccagcccctgcagtggtcaggccctggggcctcctgaaagccatcagctcccactccaagcaggctgcatgtgcaaaatgaatactggattcaaaagcatcatgaagcaccagacatggaaagcattcatagtcttgtcttagaggcaaaattatatggcacttacagtgtgttgggtgcaccattcaaagtatgacctcatgtgatcctcacgaccattctatgagctaggagtcgtcatttctccaattttatgtgagcrgttgctcttcagaggtctgtgatggtcagcctctgcatttcagaaataaggaactaaaggctcagagrttagataaatgccctagtggtcataatgagtgagtggcagagaccttagaagtcaggtcccagtggctaaagtacatcctgaaaaagagagaatttaacgagacttctttttgattttcagtctgggatgattttaatacagaatgcctggattcagtaacaccagaaaaaacaatccacaggatgtttgtgtkaaaaagattcagaggcagtcatctagcacagtaaatcctaaattttttagaccacatcccacagttaaagcacacattgtgtgtgcaaagcatacattgtgtatatacatgtgtattatatctatgtgttatatatacatgtggatacattctgctagattttatatatatatatataywcacacgcatagatattaatatatatatcttatagaaagaaaagttcctgaaacaatggctgtccttaccacatgagatgcagcttgacataatcttttcattataaagaatgttacaaaggataggtctgggtacagtggctcatgcctgtaatcccagcacttttggaggccaagatgggtggatcgcttcaggccaggagttcgagaccagcctggccaacatggtgaaaccctgtctctactaaaaatacaaaaattagcctggcattggcacacgcatgtagtcctaactactcgggaggctgacgtgggagaatcacttgagcctgggaggcggaagttgcagtgagctgagattgtgtcactgcactccagcctgggtgacagagtgagaccctgtctcagaaaaaaaaaaaaaaaaagagtattataaaggatataaatgaacaggcaggtggacaggtatacagggtgagtctggaagggtcctgagtacagaagcttctgtccctgttgagcgaggtacagacctattctattctattctattctattctattctattctattctattctattctattctattctattctattctattctattctattcyattccattccattccattccattccattcyattttcttaaaaaataattgcttataacctgttacatagatttcctggtcaaccagggggttgaggcctgccatctgaaattgctgttgtagtccagctctcctgctgtagaggaggatgctgaggttttgcctcatattatgcttctcttagtcacaaatctgaggccaaatgcaactgtactgagggccacccctgcccagcctgcccctgctgttacacctgaggctttgttaagagtcttcctgggtcatgtctgacctmtcctgtggttttatgcctacacatccccaccgcccatgcacacactacacatcatggctcccggggaggcccactgggctctctctggccatcaactgtttcatgctcctctcctcttctgatcactgttcttttctgccccttctgagaatcagagtgaagattttgagacttagtgggaaggacttttaagctgatggatttaaatataagatattttgagagatgacttatgtatccagttctacaccagctcattcccaacctgaagtcccccaaactctgaaaagtgagtgtttttacctaattcatggaggggctggtggtgagtggaagctgccctgaactgcgaggcagtttatggtcttcattcatccagcttagtctgaattgtcgtgtgtcattgaagaaatgttagtgtgtgtgactgtgatgtgcagcccaaacctcagagattcaccttaataatttcctaaaacccgaaacaattggaattctaaaacacatctggttttgaagattttgagtgaggaatcatagagctggagatatatttgcagtgtgtgcatgttattgatttttttttttttttgagacaagatctcactctgttgcccaggctggagcacagtggcatgatcatggctcactgcagccttgacctctcgagctcaagcgattatcctgcctcagcctcctgagtagctgggactataggcacatgccaccatgcccagctaatttatatatatatatatatatatatatatatatatggattttttttttttttggagcgacagagttttgccatgttgcccaggctgcctcgaacttctgggctcaagtgatccagacatatcagcctcccaaacgtattattgattaatcaatgaatttttttttgataagaagtagtgacagatgtgagaaagtacagtagactggttatcagaaggttggccattactggttataaaatgcacttttgagggcttttgtgaggacgaactgagtgatggctatgaagccttctggaaactacctggataagttgttgtgtgtggtctggtttctttttaaaattctgaattgtagtttctaatcctacactcattttcaacttttggcccacatcatgtgtgtatagggtaaaatatacctcttatgttgacatcctgtgaygaagaatgacccagaaagatacggagacagagagaaatgtctctacagtctttgtagattctttccccatccactctgctctgttctaatatttcccactttgttctaccttcttacagcatttcagatgctcctcaattggaactgctgactacacaggcgtgtgcgttttttcctcccttccattagccttataggtcattaaaaccttgttgctgctgctttccttttcctataaatacatctacatttcaaagttttgaaagcttattccttagaaggccctgggaactctgggctccaaagaccaaagaaaggtgtatctagctttaaattaggtacgggaaaaagcacagatctaggctctaagaaagacttcgctgtgtttacaataaatcagattgagggcgtgtcaggctttaagccaggattgaaagcatggcctttagaatacccagggagccagacctgggacccttgccaggtggggagttggaaatgagattyctgtctgaagctttcccctacaggagaaatatatccctaggggacagacaggtggtccagcagacatctgcaggggggcaaagggagaagacaggggcccttatctgttttggctttggcttgccaaaggatggaacaatgtttgctgtgagaatttgtaatcataagtctgccttcatgcaagtttggggtttgaatttgtactgcctgggtgacccaggagactccacgctgcaaaattaactggaggtagtttggggttggtcacaccagagttcctgtcagaatcaaatgcacattctctctggagggacatacttgtagctcaagccttgatggattcctgtaggtaaaacccagccattcaagcatgagctttcactctcaaaatccaaaacagatgaggaaaccagtcaccacgagtgaaagtcagcagaaacaacagacagaagaatcagattcccgagggtttcagatatagttccaatggaataggtaatgtattttaaatgtttgaaacaaatgaggargaaacaatagactaatttttaaaatccrtggagatttgaagaatacaaataggacttccagaaataaaaaatagaataactgaaaytgaagrtcttcagcaattggcacacatttgtgtaagttatttttatgagcaacattaagatagcaattctcataaagatatatcaaagaaagtattttttttttttttgagacagagtctggctctgttgcccaggttctagtgcagtggcgcaatcctgtctcactgcagcctccacctcccaggctcgagtgatcctcctgcctcagcttccagagtagctggtaccataggcatgtgccaccacacctggctaattttttttttcccattcaaaagtaatttctttttttttattattattagactttaagttttagggtacatgtgcacaatgttcaggttagttacatatgtatacatgtgccatgctggtgcgctgcacccactaactcgtcatctagcattaggtatatctcccaatgctatccctcccccctccccctaccccacaacagtccccagagtgtgatgttccccttcctgtgtccatgtgttctcattgttcaattcccacctgtgagtgagaatatgcggtgtttggttttttgttcttgagatagtttactgagaatgatgatttccaatttcatccatgtccctacaaaggacatgaactcatgattttttatggctgcgtagtattccatggtgtatatgtgccacattttcttaatccagtctatcattgttggacatttgggttggttccaagtctttgctattgtgaataatgccgcaataaacatacgtgtgcatgtgtctttatagcagcatgatttatagtcctttgggtatatacccagtaatgggatggctgggtcaaatggtatttctagttctagatccctgaggaatcgccacactgacttccgcaatggttgaactagtttacagtcccaccaacagtgtaaaagtgttcctatttctccacatcctctccagcacctgttgtttcctgactttttaatgattgccattcgaactggtgtgagatggtatctcattgtggttttgatttgcatttctctgatggccagtgatggtgagcattttttcgtgtgttttttggctgcataaatgtcttcttttgagaagtgtctgttcatgtcctttgcccactttttgatggggttgtttgtttttttcttgtaaatttgtttgagttcattgtagactctggatattagccctttgtcagatgagtaggttgtgaaaattttctcccattttgtaggttgcctgttcactctgatggtaatttcttttgctgtgcagaagctcttgagtttaattagatcccatctgtcaattttgacttttgttgctattgcttttggtgttttagacatgaagtccttgcccatgcctatgtcctgaatcgtaatgcctaggttttcttctacagtttttatggttttaggtctaacatttaagtctttaatccatcttgaattgatttttgtataaggtgtaaggaagggatccagtttcagctttctacatatggctagccagttttcccagcaccatttattaaatagggaatcgtttccccattgcttgtttttctcaggtttgtcaaagatcagatagttgtagatatgcagcgttatttctgagggctctgttctgttccattgatctatatctctgttttggtaacagtaccatgctgttttggttactgtagccttgtagtatagtttgaagtcaggtagtgtgatgcctccagctttgttcttttggcttaggattgacttggcaatgcgggctcttttttggttccatatgaactttaaagtagttttttccaattctgtgaagaaagtcattggtagcttgatggggatggcattgaatctgtaaattaccttgggcagtatggccattttcacgatattgattcttcctacccatgagcatggaatgttcttccatttgtttgtatcctcttttatttccttgagcagtggtttgtagttctccttgaagaggtccttcacatcccttgtaagttggattcctaggtattttattctctttgaagcaattgtgaatgggagttcactcatgatttggctctctgtttgtctgttgttggtgtatgagaatgcttgtgatttttgtacattgattttgtatcctgagactttgctgaacttgcttatcagcttaaggagattttgggctgagacaatggggttttctagatatacaatcatgtcatctgcaaacagggacaatttgacttcctctttttctaattgaataccctttatttccttctcctgcctaattgccctggccagaacttccaacactatgttgaataggagtggtgagagagggcatccctgtcttgtgccagttttcaaagggaatgcttccagtttttgcccattcagtatgatattggctgtgggtttgtcatagatagctcttattattttgagatacgtcccatcagtacctaatttattgagagtttttagcatgaagggttgttgaattttgtcaaaggccttttctgcatctattgagataatcatgtggtttttgtctttggttctgtttatatgctggattacatttattgatttgcatatgtggaaccagccttgcatcccagggatgaagccgacttgatcatggtggataagctttttgatgtgctgctggattcggtttkccagtattttattgaggatttttgcatcaatgttcatcaaggatattggtctaaaattctctctttttgttgtgtctctgccaggctttggtatcaggatgatgctggcctcataaaatgagttagggaggattccctctttttctattgattggaatagtttcagaaggaatggtaccagttcctccttgtacctctggtagaattcggctgtgaatgcatctggtcttggactctttttcattggtaagctattgattattgccacaatttcagctcctgttattggtctattcagagattcaacttcttcctggtttagtcttgggagagtgtatgtgtcgaggaatttatccatttcttctagattttctagtttatttgcgtagagcacacctggctaatttttgtactttttgtagagacagggtttcaccatgttggccaggctagtgttggactcctgagctcaagcagtccacttgccttggcctcccaaagtgctgggattataggtgtgagccatagcacctggcccaagacagtttttttaaaaaaaataatttacagttttacagattaaatgtgtcataatgcattggaaagggtgccctagctcagacctgagtgtttcacttaatggctgtgtcaccttgggttacactgcagccccttggatcctcttgtgtaatttgactgcatggttttgctcccaaggttcaattagatagtttttgaaaggatctggatttccctttagcctttactttccttggttctggatactaaatagtttctcccttaggaagggtccatagtttctcgtttaattaaatcagctcctgagatgaacaaagggactgtgttcataacygccggtagttcctccaggggctaggatttgctcaagagttacacacgcttatctggaagcccatggaggaggctggcggctaaaaggtaggctgccagccagaaggtcagtcttggactgcgaggctctggccgtgcctctccaccggggtggtgatggatggcggggttctgattttaagaggggcctgaatgtggttaacatggtgacagatatggatcttggttgggcacagcctgcaaattccaattaatctaatcccccgccttgggaaatctgaacattgcgttgagcttgaactctactgtagggctcagggcccaatctgttacatcgctctgcaggcatcccgtgctctgtctccttggtcagctcttctagaggacggtatctgccagggctcccccagggcctgagctccctgagcaagggagaggaggagagaggaactgggaaggtcttgagtagggaggttcaaggtaaaactagccacaggacaaaaacttcttccctccttttctccctccttccttcccttcccctctctctcttttcctcttttcatttccttcccaccttttccttcttttgctttttctccgtttctctctttcccttttttacttcccttattgtctctctgtagccgaagaatgcaagaccattttgttttcatgccacgaagtgagtacatgaacatttggaaagtaggtctcacctgggcttgcctccacccggaacaactctggacacatagtaagttttcagaagcagtcagatggaatcatcctggacattggtgcagcttctgaacctttcctggtgtgagtccaagttatggcaatggaattctacccaggaagggaagcagcaaacctgagtagtgcccacctttgcgggggaaatggcaggttcctccctctccagtgatgggggctcagcctgcagggaacctttcttcccagccagccttggaactcagtgctgtcaggcttgctgatgacatcactggccttccgtgggacagctgcagccagcatcaggacactccagaaatgccagcagtaattggaaacttcatgttcagatgctttccacagcattcacgcatggcgagaagtgcttctgccgagggacttttcaggtggtgccccgagcaggatccctgggagaccagggagatcagaagccaacttccatgtttcctggaccaaggatcctgggggatgggatggggggacattccccagagggctgcagctttctgtcaatgggatttcatttgggttggtctccagagagcccacagggtaaatttctaggcattaatttccaaagcctatttttgctattccacttaaagaatatttccatctttccttgcctatcactgctgcctratcttgtttgtgcagtrggtgaatagaagagaaataagaggagagaaaaacatgaagattttaggggagagaatattccgtggaggcacagcaactgcctttgcatttctgatggtctgtaaagcgaggaggcactggcttgttctgtgtgtccctggtgagagcgttagggctgtggggaggtgcattcatgtggggatctcagggggatggggtgggaggctcacatttgacacctcctgtgggayagctgcagtgctagggtttgcrtctccagatgttagaggcagtaactgctagcctggtgcccatcacagataccagttactaaccacttatcttgtgccaagtactaagcactgcaccagatcaactcatttccttcttacaactaccctcttgggtgggaactatctctgacatcattttacaggtggaagagagtgactgggaagagcacagctgcttaaggtcacacagtgcgttggtggcagggcctgccctggaaccgaggctgcccatcaccaggctcctgtccccagctcttcagcaccaggatctgtttctcaatcatgtctgagctgtgtgttgaatgcactggtcctgtcttccacatttttttcctctaccttctttttatcatcatcttaactgtcatattaacatactaccttataaaagtgttgaaaagatagcaatttgggaaaatgtgctcagaagtaaaagctctctccctgtttccccgcccgctgctgcatcactgtgcttcctttaagggagtgcttaccatccgcgttgtcctctaaaacgggaatgggagggaatccctggaatccctggaatccctgagcctggagggattcacaaggggaaggtaaccacttgcaggaggccagtgctgggtgcaaggcaggaggactaggggacacttaaggtccagcctaaagaggacagtcactgagagtggcccttgatggggcttccactgggacagagatgggtgctcccagagggcgatttggccgagaggcagtggcttcccttctcaccgtctgcctgactcattgcccttgcctcctggccactctgccagctttccttcaccccctgctgcatatcctgcatgcagctgcccaattaagctccccaaatactgatttcatgatgtcactgactcctctgaactccttttacctccctttgtgatcagaagcctgaacttctgaactcctctactcctaagccaaagagtccgccctctgaccccagcttgtcttccctctgctatctgggagtctctcctcttttccacttagttgagttcctggttagttcaaggctccattcattctttctttcacctagatgccaggaggaagctgcgaaggctgagacataaagacatgtcacctgccctcaaagagcgcttggtcttgggaaggggcatgcatgaaatcaccttttttacatttaaatttaaatttatttttgagacagagtcttgctctgttgcccaggctggagtacagtggtgtgatcttggttcacttcaatctttgcctcccaggttcaagtgattcttctgtctcagcctccagagtagttgggattacaggcatgtgccacctgtamaaaaaatacctggctaatttttgtatttttagtagagatggggtttcaccatrttgcccaggctggtcttgaactcctgacctcaagtgatctgtccgcctcggcctcccaaagtgctcgtgttacaggcatgagccaccatgcctggccatgaaatcacctttgatcagcgtggtgagagccacttcaggctgcatacaaagccttcctcttgcaggaagcctttattgattgcactgtcactgtgaattcactcttctctggaggctggtgaatcctcatctctgttcttctctttttgttccttgttttctgcccggtataattcactttcttttattgccaatatctcttggactttagccccaaggaacataccacactgcctggcactgtgccatgtgcctaataataaggaggtacatttatattgagctctgattctgaagcctgttcacatctgtgattccccttactttgcataacagctctctgggacaggtgggacaaatgtgataagccccagtctgcagagcaagagacgacttgcttatgggcacacagttcataagtggcagagccgggaccagggactggagtcttgccgtgggtgtgctacgcggccccacagaaggatggatgcatggagtcccattttgtggactccyccctgggcctgcaatgtgtagggatgtgttaggggaggatgagagggcaagagggggatctgtggctagaattccggaggttcgttggaaccagggaggtacatggggtgacttgaaccccaaatcttttcatctaggcatgacactccctttttcctctatggagactgggaatagcaggatggagggagggtagaaggagtagaggagtcagtgttggggctagggctgggagggacggggtagaagagagcaagttctggggacagagggcagtcaggagacctgtcagttctctctgggtagcctggactctcgagaggactgaaatgcatcaaaggatgggtaatgaaaaaatggtgatgaggacgggttgccttatcacccagaagggaggaaaagcttcaggcccaaccatcctgcttaaacatttgagaattctatgcggttcttttaagtatttagaggtactggggacaatgtgtccagaaagtggaatcccagctccttctcaccccggctattgatttttggccttgcaattactgcagaggtgctgcctctgtgaacactrttagtgctagttrgaaagcttgagcttttgaagcttagctgtttgagctacctacgggtttggaaaaaaaaagaatcttaccatgtgtttctttagcctgggcatgaatcaaaaatagttgaactttttttttttttgctcaagtctcaagtttaaaaataaaaaagtcacctttgggctgagatcaagaatggaaaatttcagggcatagcgtaattttttccccatctgttctgggcaagggatgataaagcattctgttggaagattgtgtgtaagcatcaaccatgagtctcactactttattgcgttgcaatgtctactttgttaagatgtcttgaaagaaagacttcttccatcctcctggcacaactgaatgtgcttggtatggggagacgtgtctaactgaatctaagmaactaattggaataggcaaaggaggaagtgatgaaagtgaagctgcagtttctgcaaaggtggctttattgtataaggtgcaggttaktaccccaaatgatcaattactaaagttctggattgggcagtgacaagtgtctagagggaatgctgggcckagggaattgcattgtcatgtgagaataaggctggggccacctttacattttcattaaaaaaagatctggacagtacttgactgtggtagtagactttgtaaaggttattatggttacagctttgtttgcttgagatcctctatttttatagttcaatattattaaggtatgaagaaactgttttatggatgtcarttttactgtttctgacaacagcttgcgaggaagtatacatttgtgcaacagaccgctttggatgttaattctaaatttagaagccrccttcaatgggtgtggaaatcagttacacaaaattcaggtgcttactaaaaaaaatctgaatatccatgaagcttgtatggtccctggtggaactttgagcagctgagcctctctgaagatcctgaggttgtcagggtgtggcacagcagctgggggctgggccccgtgcatgcacatcagcatctgtgtattgaatataatcagcacagatagggaagaaacaaaccaccaccaccaaacaccctaagtaccaatctgggcatctgggcaccctggattttcattttgactctgtcatttactagttctctgaccttgggcaccatgctttgcatagcagccttggtttcctcattggtaaaatgaggctgttgaattctatatggctcaagagttctttccagccccgaaacatgcaaaaattcagtttcgactaagagctttagcactstcttatcttggctgtttgcagtggccaaaattgataacatattggaaaacttccctgctgattaaaatagacattgccctaagtgctgtgagtgtccctgttaccttatcccttctctgaaaccctctgggtttccycttgaagcagcccctaaaatggctcagtttccagcatagcaggaggtctccagcctagccaatggtgccccttgtgaaggtcatggacctgccttacccattgttaaatgttttccatccctctggtgtacgtggagagcttctgggtggagtggacacaaatgatttaactttcccgagtctctgcttctgcgccagaaagtggaaggaatcataaccagtgtagtggaggtaattaggagggtccaaagcttggaccatctgggttcaaaccctggccccaccacttagtatctatgtgagtgtgggcatgtcaggtagcctttcttacctcaattcataatccgcaaagtggggatgagaatagcaccaactgtatcaagctgatgatgagatcaaataacacacaaaattcttagaatagaataagcactgtagaagtgatagctctgtgtatgtcattaatacattcactggtatcactgaactttattttatatcaagtgagataactactataccatccagggagataatgtgtgtgaagcccatagcacaatgcttgacaaatagttttcagggaatgttagcttctatytaagcaggtcccattggaaaaaaaaaaagttgtatttttatatagttctagttagtttctcatctgtgatctatgctatttttaattgaaaaaaaaaaagtgtttccatacattgtcaggaggagccgttcccctgtcccagcctctcacaaagcacaccctcactccctcatttttccagtagtcccagggctagaccacctgtagagacaggaagcctgcctaaagagcagaagcatctgctcagaaagatctagttgtttgctggagcctcagcttgaagaaggctccaagtttattntaaagtcccagccacacagtttgcttgagactttataaagagagaatgagatgtagaggctgggcccaaacccactaccaggctgtgggaatgggggatggggtgcttggctggcatctcttctcagggcctcctggtcagcctcaggagatctagtgctaagggttactctgctggggaaaatctcaatggcactagagaccacttgagcacagctcttaggaactgaggagccagctacttagcatcccagaatcccaatgcccatggccagagccagagctgcttagaagaaaagcaaagtccgcaggctgcatggactgagaaccacctcacctggctgcacattctctgagtggccttgaccatgctgttctctgagcctcagtttcctcatcaatgatagagtggagttagctagatcaggggctttcaaaagctttttcccctgaaacccagaatragaaataccttttctttctcaacccaatacttatgttcatgtatgtaattaaacaaaagttccatgcagcaacccttttaatatgcagtactctgttttctgtgctgttgtttcagttgaaaaatgctgattgtgaatgattcagttgattctgtgacctgctgatgggtcataacctgcagggtttttgttttattttgttttgtttttgttgacagagtctcgcactgtcacccaggctggagtgcagtagcgygatcttggctcactgcagcctccacctccagggttcaagtaattctcctgcctcagcctcctgagtagctgagattacaggcacccgccaccacgcctggctgattttttttttttgtatttttagtagagacagggtttcaccatgttggtcaggctgatcttaaactcctgacctcgtgatccacctgcttcagcctcccaaagtgctgggattayaggtgtgagccaccatgcctggccataacctgcagttttaaacatatcgggctgaatatagttgagggygcttaaatgctatgatgctgtgattcagctgggccaggaatatagagaacagtggcaccctactctgtgttgggccagagattgctgaaatgtctagcatattagatcaaccagatttttagttctaaaggtgaaaccagaagcatttttttttcctctcaaaaacacacatagactcagaggtatggatacaatacctgaagggctatagttctttttccaggattgtccctctcagcaggaatggaggatccctagctagagaggagagctgggggtgacaccttcttgcccagtggaggacagctggtggtgtggcctcaacaggttcttaggaaggtgagttccttagcctttctactagtgaggtgtttgggttaaggtgcagcaccattgactgggcccgtgtggggaggatattcaaagcatttcacaattacacagctgcctgggcaccgacagagtcctagagaagtgtcgactgtgccaggtccaacccttcagtcgctggatcatggggaggcatggagtcccattgtagaggctgggtggtggtagtaggcatgcaggaattcagggaagctgctacttaccaccatgtaaaaaggatttcaatattttcaccctggtagggatgcaccagtgtgtgcttctcagcctcagtcctggacgtatgccccattgccctaaggttgtcccaaagaggccaccattasacctcaccttttatggacaggtgggagatgtctgaacrcaaccacatgttgcccrgtgacaggggctgggctgaccaggacacggagagtgacttgccttctggggctgagccagtcactcatactcccagcgtagccctggagcttcactgcaactgctatgttacaggaagttgtaccagcagctctacactaaggtgtatagtcngtgaccactttaaagaaagactcattagaaagaggcattgtttggggaggccaacaggccagctgttggggaccatgccagaggtactgtgtcaaggtacctggcttgatgcttacttcccattgtctgtttcttgagtttattttgcgccatctgccttcttccacctgatttggaattccaggactgctgtgtaggcttctcttcagatgagatgcagcagtgttctcaactggcaggggcagctttcttgggggcagggactgggcatctgtgttatctatcctgggcccatctgtttctttccccttgacacccaccacaggggtctgtgtacaagagggttggttgataccagttttaatgagggaacctatcttcttggaaccatccagaagctgtggtctttttccctggaacaccccacccccgacatcccagtgctggattcaagctggtgaaccacaggtcaaaattttcagttgctgtcttccagggccttggttgttccattgtcccctctccctgtaccaggatcatcgtgatccaatggatttgatggagttgctacacccagcttggcgtgcagrggtgtttggcacatccctgcctgtggaattctacgctctaagggagatgctgccagggtattacctgattcacgaggcatgtcctaccatctgtgttatattttttttaagatcagaattatgaatatttcaggagtcatctgggatctgaagaagcaagaacccactttctgagtcttttccttaaccattcatagggggtaagaaatgtcacaggtttgttgtgaaggtcaaatgaaagagaacttgagaaaatttgcaaatccttcagttcaaggtgaaagaaggtaatttattattaattcatattgttattatgtagcatttcttagaatatgtataccaaatgccttttttgactggtgcaatctttctataattccattctgggatgttagcttatttgcttagagaatggtgtaaagaggggagcccgaggccggcagatcacctgaggtcaggagttcaagactagcctggctaacatggtgaaaccctgtctctactaaaaatacaaaaattagccaggtatggtggcgggcacctgtaatcctggctactagggaggctgaggcagaattgcttgaacccaggaggcggaggttgcattgagctgagatcatgccattgcattccactctagcctgggtgacaagaacgaaattccatgcaaaaaaaaaaaaaaaaaatcacttcctgggcagtctgaatttcttaacctgccccagagagcttaaaaactttagaaaatgtggaggatccactttttaaaaaaawatatatatcctctgttcatttctggaagccctaaggaggatgagagttacattctctgtcactgcccaagattctctcatgaactgtataaacagtgttgaactacatgcttgtctcataaacccagttgggcaaatattataggcctatttctgtcacctctggctggtggagtgtttgtatttgtccacacatcctttatgcccagggcacgccctggataggagaagcttgtgccctcccagatggaaaatgcccataactcatcagcccaacattggactgctaattgtaggcctggattcatagtgttcttgaaagcttcagggtgagattaaactgccttttgacagtgattgacagctttcaagattgaaataatgagcctggagcccccattccctgcaaaccactctggagttaatttccttgcattcttcctaccttccagaaacctgactcctgtgcagctctgtgttcaatggatgtcacatctatcttttgctcttttgccaaaattaattgccagcattayccaagggagtctcaaaccaatcaggtcttgcagctagaggatcatcaatataatacatgctctattgcctcagtgactttcagtctctgccctggcaggggtcctaggagattggtttgaggcattgcagtttgattgtgcttgtgattgatgggccggaggctggagctgaggaaatgccccaaggattacattttcttagggtgtttttgactcacaggtgtgcaccaccatggaatgactattgtgtgyggagggaagatggttccctggagttgggcatcaggcacttggttgggatgctcatgacccagggatccacgctcatcttgatcctcagttctgggtgtgtctgggccatatttccagagtcctggcttccaccagatgcagcataatcacggttttgaaagcataaagagtccttattgtactgtatcctggtcttcatcatcatcacttccatagactgcactttacagggcatagaattccctttttttttttttttttttttttttgagatagtcccactctgttgtccaggctggagtgcagtggtgtgatctcggcttaccacaacctctgcctaccaggctcaagcaattctcctgcctcagcctcccgagtaactaggattacaggcacrtgctactatgcctggctagtttttgtattttcagcagagatggggtttcaccatgttggccaggctggtctcgaactcctaaactcaaatgatccacctgcctcggcctcccaaagtgctgggattacagcatgagccaccgcgcctgaccctgaattgacttttaattcctcgcaattactttgagaactataataccatttttaaaggtgaagacacaggctcagagagattgggtaatttgcccatggttcctctgatggtaactggcagaaaggggwactgaccggaaatccaagcccaagctatttctctctgtccacaccatatgtcagctgtgtcgattcttatgccatcctctttgaaaagaactcagagtgcttttgaaaacccacattttgcaattgytgctttatagagtgtcartgtttgtctaagttaattctcaggtagtgacgatcaaagatgtaacagttcatccagggtttacctagttaattccagcacagaaccagaaacaagatttctggcctctctagcactaacctctccagatgccttccatgaggcatatgtgtgtgctagaggcatggaggagctaagtttgggtctctrtactgttcccttctcatctgtttaacctccaaagtattgtaccatgttctctgtgtccagtggaaaatgatgtttttacattgcatcatctgtcattcttaaccccagagtggggctggagtgttggaacacttcagcacaggactctgtttaaagctgtgagaagctctttttgtttttctaagtcggctgaactagtaaaacagttttacaactgtgttttcaagttctgttcagaaagrcaagcttgaaaaaataggtgatgctgaagtgtcattttagtaaattttttttccctgttagaagagaggttggctcttccttgattctaatctttaggttatttctccaagagctacctttctgttttttttctttctgccccatgaggtcttcagtcctggatactctcatcctataatagccagaaatgacccttgatccatggagtttgacttgggctgaaatcaagtttcaagaaataccacagggccttgtgactttgtcacatgtcaccctggcctgtgagggggccgtctgactcccgccctgaagtgtatcagtcacatgcccttgtttgtctgccccctccccagctccccagcccacctccctatgtcagtgtcctctttcttaaatctgcactggactggggaagttcttcatctgatgcgttttcctgtggtgtgcgtgcgtgtgtgtatgtggtaagagtgaagagatgatcaaggaagattgaggcagctcgaatttcattatgaacggttcttctgagaagagaagtcactttcatattatgagaaaagttaggaagaggtcaatgccaacctgcacccctctgtgattggctatccccttcacctgccttgtgtaatgttgccccctttccctaagacccccaggagggcctagtttgagaaaatgggccgtaatggttgactgtgcccragagatcaggctcttccatgtgcggaggagtctttggagatggcaccgtttccaggaacaggaaggccttggaaagtttgtgggctccttgggcagaggcaaagtttcttttggactcttccttagtcttcctcatttccaaatttcaaaagtgttttctctttctctttctttcttttcttttctttctttctttttttttttttttttttttgagatggagtattactcttgtcacccagactggagtgcagtggtgcaatctcggctcactgcaacctctgcgtcccaggttcaagtgattctcctgccttagcctcctgagtagctgggattataggtgcacactagcacgctcagctaatttttgtattttagtagagaggaggttttaccatgttggccaggctggtcttaaaactcctgacctcaagtgagctgcctgccttgttctcccaaagtgctgggattataggtgtgagccaccacacccagcccaaaagtaatttctttggactcttccttacctcatcagagaggagctgctactttgttgccacagactgtcctcagagagcctttgatcctgtctctgctgttccctgtgctgcaacctgggctttcagcaggcgaaagacacagcagacctgcccatagctgtgggcagtccggcttggcttgttaccaagagatttactcagcttgctttgaagagcttgtgtcgcccagtgaggaaccctgtgggcttctccttccactctgtgttgccagtggcctacatctgagctgcccatcgtrgccacagtatcatctgttggaaccttaaaaaaaaaaaaagtcratccctgctcaagacctacaaaactggaatatccaggagtggaatatcaaatctgtgttattgaacccagatccacagggagttctgatgctcttctaggttttagaaccatgtctgtttactcatttactagccaatggggaagctgggaggaggggcaagatgacacttgggtggggccttctgtccttttggttaccttgagcatagctcctggccttcctggtgaaacagcctgctgctgaccttgaacctggggtgggttcagcaggaccctctagtccctgatggggcatcccctgggagtaggcttgaagtagaagcagctttctgggtgtgggatgcccctgagacatagcaggtgggctcactgctgagtaactagaggtgcccaggccctgactgggtgtgcattatggaggaacagcttggtgcactgcctgcagggttgcctggtgactgcccagcaggagggaggcgagggcacttcttgggctggtgctcactgctgacccagtggagggaacattcatctcactagaggagtgtcaacggcgcctggttcctgccttctcagctcccaagtgcccctttccttgctgcagcaggagaggagacttggccaatgggggaagagtcatttatccatgagctccaattcaggaacatttgaaatattgacaggctgccttttaaaacatttacaacaaaaatagttttatggagtcccacgggggaaaaaaaagaagaaaaagttatatttctgatttcactcaataaaggaatgatactgagaatatcagctttgttatttcatcactaaaatgttaatgtctgtgctgtttgggaagttgcaatgcagaggcagctttctccccgcctccccaccccgccacccggcgtttttttgttttgttttgttttttgtttttttgagacagggtcttgctctggggtacagtggtgcaatctcagctcactgcaacctccacctcctgggttcaagcgattctcatgccccagcctccccagtagctgggactacaggtgtgcaccaccatgcctggctaatttttgtatttttagtggagacagggtttcaccatgttggccaggctggtcttcaactcctggcctcaagtgatyggcctgcctcagcctcccaaagtgctgagattacaggcgtgagccactgcgcctggctaacctttttggattcttaaatgtgttcatgggctgcatcaggaagccaggccaccgctggtccctaggtctggggtgttcacaagaaragaagatcataaacatcatgtcaaaggcaggaaaaacaaaactctgccctctgtggtattaagtcccagtacttgaaattccaaatgtccaaaggggagcagagagcagcacacacatgtatcagttgcttgtccacctggtagttgagtgccttcactgggtatgtgtggtagctacagcctagacagtactgctctatgctgggcactgtgctaagtgcttgccctatattaacccttttagtcttccctacatccctgaaatgtgtttatgcacttcttgttcctgttttcatatgaggaagcagacccagaggatgaartaatcttatcgaggtcacacagctgggaaatggagaaattaagattcaaaccagacaggcatcctccagagctaatggtttaatccaggcactgagttgccttttcccaaagtagaggataagtcagtcaggcagccacggccctcagggtacctccagcacacctcatgctgggcccctttgtagtggctgggctctccccttgaagagttttctccatctcttggtctacaatctagcttcccagccttctgcaaccaaatcctttccttactggtcagaaatgcctggaaattgcagattagttcagggagatttttcccaccatgggtcagagagatttttcccaccatggctcagagaggtctgagcctctctgtcactgacatttgacctcatcctcgtcacttctggccttccagtggggctggtctgttctaaccatctgtaagcttagaactgtacggtcccctttgtggaaatctgcttccaagagtggtccctggaaggagaaggtgacttctacatctgtcctctggttgatggcttgaatagatgtgctggccaggttggattggaaggtctcagtcttcccagcaagctccacacacaccatgcttaggggaaagaggctcttccttgatggctccaggctgcagcatcagtcgaatcctagctagaattttgaagcatcattgtgctcatcagaaatatttaattaaggctgcatattaacagtgtgtttttccaggccctaggcaggaccagtttagttggaaacggttcctggccacatggagagcagtgcctcagattggaggtggaaagagcatcaactgtggggcacagggatttgggatccagtctgtttctgctcttctttctrtaggtctgagttttctcatcagtaaaatgaagccattagaaagttggagcttttgagatttttgctgggtatacatttgtccagaagtatcttcccaccatggctcagggggtctgtgcctctgtctgtgacatatgatgaatttttaaaattggatacacagaattctctagggagagagaagaatgaaggtaaatgagcccttcctctgtccttcccctgtacatataagagcataatttaaagtcacccactttaagtacaatatttacttaaacttgcataggtttttcctgtcactccatgatacatgttttatttaatataaaaatagtggtagctgggtgtggtggcgtgttcctgtagttccagctactcgggaggatgaggtgggaggatcacttgagcctaggagtttgagagcaacctgggcaacatagcaagaccctgtttctacaaaaaaataaataggaatagcgttcttcccacatctctgaatcagttgaatactctatgagtgtgtcccctgagtgggctttgtatgcccctgactccaaaatcttggttggagtcttacatctgggaggtgaagcttgagggctagggcccatgtactgcttgggttgtggggggaaatgtataaaaatagccccccacctggacaacctcagagtcttattttcacactgcttctakcatctgccttcatggacctaacaattatgtcaacatcctaccttgaaaatgctccacttctgaagatgtgcttcgagggagtacacacaatccttgccactcccccaagccttgcttctgcccagacgcggcctggttccctggggagaggcatgcctgagtctgccgagacgcctgctccagaatgttttcagggcccgttccagctcttaggttctgtggatctacgtgagatcacaaagctgagacaggcacactgacaactgggtagatggcacaacagtaagttaatccaggagataaaagagaaagcgagacaggaaagaatagggtgaaatcccagagggagcgccagggcccctgggacttccagttgcttccagcggcagaaagaggacagctccagctgctacagcacctcccaggaccaaacatggggaagtctacccagcaggtgctgggagagaggcagccccaaccagagccaatatcagatgggagttcctaggggaagatgatcccactgggcttgggagtaggctgggatccctctcttctccaacccttcactctcccatccagtgcgctcctgtctcttccttctcttcttttctcctttgctctgacttggtcctggtggtgaaggaccagatgtgagcatcactgcctggcttgggagaatctcttgggtggctgggctggkggtgcrtgcacaatgctgaatcttactccatttgttttcaacttattcttgctcccttcttagcatcctgctcttctaaaaaggaaactgtgatttccctgaataaactagtgctttcattgtccagcattggcaaggaggaaaatgctctgagagggcaaaaagtagttggatgaccctgactctctccagcttcaccttcctttgggagaatttctcacgtatttagtacgaacacctacatactagttttaaggtggtgccattttcctctaactgtggtgggccaagcttgggtgcatgactttctaacctttcgctaattgtctatgttgcgttgagagtctggtgggatgtttagacaggacgttactgaaaatgtggagacagaaaaaaggaaatgaatggaggctgacagagctagataactgccctgtagggcatagctcatcttagctcacagaccctgccagagtcctcatttttttggccttcttcatgggctgggttcgctcttctcactgcagcccacaactggttatccacccttctaaaaatcccctgctaggagagttcagcccaaagaggcagataggaggatcacctcttccaaggagtttaaggcctctcttctgggtgctactttcctgttagatgctttccttttctgtgatgattgaactagggaaggagaacttcccttccccatctagggagagagacttcctctccatctgaagggtcctggccttactcctcaagataatggagaagaatttaatatagtaaattcaacatctccagccagtatgggagatatcataagggacaggacacatatttcctttttagctccagtgctccaggcctcagcttccttgtttgtggagtatgcatatttagagttcctacttcagtgttgaggactctctgtgatggtgaggttaatacatacaaggcatttagaatagttcccaatgaatgacttttatcagtgatgtgttcccagcaggtctgctcagtgtgtgagtctagtccatgaatggcccagagtgggaagatagcatcaccatccacgactcaagtgaagcacatcatgatttttcaaagtattcatctatgcatcccttattagtttccataccaaccccagagtgtaagctccacaaggcagggaatttgtccatcttgattgccactatatcccaagtgcttagcataatgtctgactcatagtagatgcccaataattacttgttgcatgactgagctctgtgagttagatggagtgggtagtattaatccatttgacagaagaagaaagtgagtcccagagacatgatatgactcttctaaggttgcatcaggagttagccacagagctggggcaagaccctgagtctcctyagtcctgatgcagtgctccatccccagtgtgctgttagatctatcaagagttgtgcctgctggtaggttggaagcagggaataaaccctgagctgccaccaggtcagcttcatggattccattgaccctgcttctctgggcctctgtgcacacctacatgtgtacatgctgggagtcagaggctgtagagactgtagactagtggcatctgctacatgaaatcctgccaagggacagctttggagaagccttctgtctgcccctgagctaagtgggggtggaacatctgaccacatgccctcttgcaccaggcgttgtccacgttaggcttccaagtgttgggcgtggttgcagggtaaggctgcatgattgcaccaggcatgttggtttggcctccctgaggtggtgcacagattgcctttctgtaaataggatgtctgtcacctgaggcatttgtaccaggcacctcattccttttttggcttcctgtggatttggaaggaaactcaggggccattttttttcatccttttccctccatataagactataccaaatatattccagagatattatttgctcttaaaaaggctcaagaaataggcctaactacatctgaaagtttttctaaatcaagggttggcaattttttttttttaatttgtaaaaggccagataatagagattttaggcttttctgggccatgctgttgcagccactcaactatgcctttgtagcatgaaatcagccacagacaccccagaacagatgagcatggctgtgtgccaataaaactttatttataaaaataggcatcgggctggattgggcccttaggctgttggtttgctgactcctgttgtaaatggttatctttgggtcagcccatctttggtcttgctagtcttgggtgctgcttgagtcagataatccaagagaaataaaattccatgttgactcctctccttagcctctgcttcaaaacctttttaagagaatatttactcaagaaagagcttggaaggtcctggaaacatgtgcctttcatgcagatgccttactgcatggagaaaagcaggctttcaccccaaatttctgttgatctggagaagccacacagaggtgggcccggttgggcagcctgtcttgggtgagtttgggttactgtaaaagctcagacacttgggttcttggctctgtatgccctccctccctgtcttcctaaagccaagaaaaatgaaaggcgagggctgtctgaactagggtgtgatatttaagtcttagtgggtaggttgaaatataacggagccgttctgttcattgagccaagcctgtggactccttaataatccatggtcgggattgcagccctgtggggaggcagtgggagccttcagcagcttgaaagtagatgtctggattccaggaggtacaagcttccaagaaggaaattttcgtagctcatctttgcacaggaaggttttaatggaaatttgaacactcctagtaaacacccttgctattagcatctttcattttgacagaggagttttcttcctctgttctgatgggttatccaggctgggctgggttcctgtgtggagttatgggctctctttagggaaacatttggtgtggtagaaagatcttggtttctggaatgagatttgtgtcttgaccatgtgccattaattgtaggtaagatcctcaggcaaagtctttgacttctctgagctttgggtctcactgttgctgggtgatggaatgagagtgggtttacaaagcaccaagcacagagcccgacacatagtaggtagcctagaagggaaaacagaactccagttgctaatgcccaggtctgccccgccatctttggggctgggttatctgtgtgctcccctgacagggagccacccaggattcactttcaaagatgggaaaggaggcctgaaggggacatgctaccacggagtgagcaggcattcctaagagtcggtctgtcctttcctctcccactggagatactcagccagtgtgggggccatgcagcaccggggaagggacacatgtctgggaatattggggataaccttgtgtgaaatttttcagaacaggccggcagtggcctgggacatggatagctcaggctgcctgctttgctcctgtgcttgtcctcgtgacttagattcttcaagatggaggggctccctggctggtcccctacacaaggcccctatatctgtgctgggtggtggttctgatccctttttccctgtggggtggatcagagcttcctgtggcttctcggtggggctggagggccctagcacactgtgaactagtgggaggcagtgagctgggaattcagtggaggagggagagggaataggaggaggatgaggaggaagaggaggaggcagttgagacagttctctcacttatgcagaaagtgtgtgatgaaagtgtgtgatcacagccagccccacacagactttcctccaaatgagaagggagtgagaaaatgtaattttagtgtctggcttttgactgactccctgtggaggttccttctgggctgtggtgttgggtgtctctccttccctccaagggacagccaggcctgggcctggaataagtgagttcagatggtaactggggaatggccatagggagggagtgaagagccgtgcctgtgccccagggggctggggggcttggatttcaggacatcagggaggtgacatcaaggacactgcaggggggatttagggacagggtagtggggtcagtgcctgactcagtccgagctgagctatattgggtctctgttcctacgctgaggcatgctttcccaggcgtgaggccatgttttccaggccacagtccacagcctcgctgccaacacaggtgtgcattttggtggaggcttgctaccctctgtgtgaaaccaagggagcagaatatttccctgaaatcggggctcctggaacatgaccctgccaggaagctcaaagtcctgggagaatatgttccaggcagggcccggggggcacctccatgccccactgccttgtggctcctggcacaggagatgctggacagtatatactctgctggctggacaggctctcatgtctgcatgtgaaaatcaggttctggggagtttataaaccaaagaaaacccctccacccagcccacagagtgccagcgattccctcagtgattcgtgtgtggaggattcacacttggtggaaaatctacttaacatttttatcctattttccctccactcactgtcagtcctcatgtgttaggggagtggaaactcatttaaatatgagtctatgaaaaaatttaattaggaagataaattgaaaaatgcatataatacatttccgtgtcagacataaattactttatccacaccactgcacccctccagttaacccagggagttgggagttgtctgtgggatgaaaccctcttaggagattttccggaggaacccaactattaggaactccttcaaagcagaacttaaatgatagcatatagttaagtacatattagaaacttcatgattccatttaaactaatcattcagtgacttcatcgtgggtcagaaaaaatatgctctcttctcggtacattttgcacctgcagaaggatcacttggggaggaagaagatggggtagatgagggtcacatgatttttgtcttcctatgttggaagacaatgcttatggaaggggattagactttttgctgtgtccccagggagcagagtcagtgccattggttagaagttatagaaaagtggatttggggtcaatatgatgcaatactttctagcaaagaattttggttaaaaacacaggctttgtattcaaccacaatgaaaagctgaagcccagctctgcaaactactagctgggggacctcaggaaaatttacttctctgggcttcagtctcttcaacaggaagacgggcaaaactatagtgaaacctcataccttcatagagttgctctgaagatttaaagaatacgcttagctcacagttagggaaattcagtgaaaggtggatattattactagaagatagggtagcagtagaaagaaaatttgtggtcctgtaaaattgaagttgccctgcagtgggatggggcatatgaggatagtgagtgcttcatcatcactggagattttgacagcagcttggtgtgtggcttcttctcaggagtgatttttggagattcaggaatcagattcctgggctagatgccgtgctcttcaagtttagctgtgaccctctcaaccacttgggaattttttcctttaaacaattataacaattgtttttgaaaatatcaaagttcagagaagaaatttaaaaattactcaaaaatctcacttcctagacataaccatcatgaacattaagaaaactcacgtaatctctctatcatcacacacacacacacacacacacacacacacacacacacacagctggaaagatatgtagatcacagattgacaggaataattttagaataatgggatcacactctacatcccaattttaacaaagagtattaacgtacatggcttaaatttctaagaggaaacaagtacatctaaaggaagttctgagttctggaaaaatatgtcttcattgaaatggatatcttttagaagagctcatcaaggttatgaaaaattttaagaagatggagtcattgctttctgttaatacctagtttcaattttagacttttgagcccatgttataaatgatgaaaaaattagcaatcacctgcttcttcctacctcctaccccctttcttattttaattatagcttatttttacattgttaaggctgataatatctaacaagtccctgagttgtttagtctcaagcatgtcccctacgtaggaattcaatttccagttgtattctttctgttctagtttactcgacaatctaaaatgggattattttggtctttgatttgttttctttgacctgctaacttttctgaattcattgaatatatgtttttgttaatttcttctatagcattaaacatttgcaggaattttctttgtttctttggttatgttttcttctagagaggttcttcatcatcataatagcacaatatgctattatgttccttattttcctcctgtagtgtgtgttcacaagtgccatattttttttatcttgcatatgtttaacttgggtagctctgtccacttcttctaatcactctgatattgagggcaaattctttaggactccttttgtgacttacctgaaacctctgccatggtgtcagctccagtttgagatgctttctgatgcctgggagcattataggggaacatgggagatgagggtggtcagactcagagctgtgtgctcctttgggtaggaccacatttaactcttgcatgactttgttaaatgtgctgttccagggctcattccactaatgaggggatataggaggggatgtccttgccatttagatgatcccctcaattaagcgttgagccctggaacctgtgtttctgtgagagaaagagagagagaatgagagagagagaaagagagagagaatgagagagagagaaagagagagagtcttgattgttcatgctgctgttttatagctctttttctaatagttctcaatctgtttccccaactctctccgtattaagtcagaaaagaggaagaaatgatgtcacactcacagtctgcttctctgcaaatatatagtaattagtgagaagtctaaagattttggcctcagcaataatacttctgaagcatggggtggggttaggaacctgacaacttctgccaaatcctgttcctgcccccaccctcaccccaggtcttttagatgttgatagtatgagtgtgtgccagttccttgtttgattgctgcttgcttttctccttcacttattggtttttgtttttttgttttgctttgtctgattatgtattgggacactctgccatctttctccaaaagcctccctgcgtatcttttwaaaaaatacaatttcctaggctcaacacagagctatagaattagattcccttaggggagggccacagaaatttatatttttataaaacttccaaggcgttctaacaatcagccaagtctgggatccattttaagtttcccctaagattctttccagtgctgagattctgtggttcattgtgttctctttaagaaacagggagggggtgttagcacagggattctgtcatattctcaggcatggcatcctctcactatgcagaagaagggcttatgtctctctttatgccaattcttccttttgtcttggtccatttgggttgatataataaaaatgccttgcactgggtgatttgcaaacagtagaaatttatttctcacaattctggaggatgggaagtccaagatcaaggtgcttgtggtttttggtaagagcccacttcctgcttcatacatggagccttctgtgtcctcacatgatggaagggaccaggcagctctctgggacctcttttatagagcagtaatcccacttataagggttaaaattgctacatataaatttttggggagggacacaaatattcaaaccattgcaaagggataaggttggaggatcttctcatttctctttgtcacaatgacctaaagataccctccatgttttagcaaacttgcccttgagttagtgaatggataagttgttctcaactctggctgcacattaaaatcactttggaagcttttaaaatattgatgcctgggcctcacccctaggcatgtggagttaattggtctagggtagggccaaatcactggccttttctttgagttccctaggtgttctatctagcgtgcttccaagactgagaaccagtagattgttctttcttatttttttagtgactcatgatccattctccattttccttactcctatctcaagccttgattttggaacatgtactttctacacactgaatagtttctaaggtaatgttacttagaacaatagagtcacgtagtttcaagaatgggctttggagtaatagaaatccaagtgtgggtcctttttctgcccctgctgcttgtgtgagcttgaacaagtaacctaacttctctatttcacagtctcatgcaaaatagggattttaattctaccttgcattgttttgaggaacaaaattagtttcatatcatattaattacatgttacactagttttcttgtgggtagagtttttctgacatattattttttgtctttttattgtcaatcttttaataaggcttttctatatgtttcttacaatcatcaaataattgaattttgtttaatgttttcatctggtttgataatctctgtcttttaataggtacgtttaattcgtttatacttaatatactcactgatacaatatgtgagttttttctgctgttttattttgggtttctttgctcctctttccccctttcctgtcttatattaaaggaattgttccatatttcttctttttttaaattttgttggttcataagctgtagatcatattctgttctcctagtgattactcttttttttttttgagaggaagtcttgctctattgcccaagctggagtgcagtggtgcgatcttggctcactgcgatctctgcctcctgggttcaagcgattctcctgcctcagcctcctgagtagttgggattacaggcgtgcaccaccacactcagctattttttttgtgtatttttagtagagttggggtttcgccctgttgaccaggctggtctccaactcctgacctcaggggatcagcccacctcggcctcccgaagtgctgggattacaggcatgagccaccatgcccagccttctcctagtgattactcttaaatttttgagatacattttcataattctgggaacattgaaagtgataacagtatttttactcaaataatgtattcaaaatattcagcacaatgcctgacagtcattaaaatgcataataaattccaattgctagtgctagtcttactactgccagcactacaattaatattaccatttttacccaaagagccactaagtattatttttatccataagtatggtatcaagaagatgaacattgtgaaagttatatgaacaaattatagtctgaacagtgccagtttttcccaaaggagtttgctcatttgtaaaatgttatactgattattcaatgaggtaagttctgcagagtgcttagcccacagtaggtgctcaatcactgttagcctttatatggataccaacctggacttcccttttaaaacaccccagctttgccttattgctctgcaagccagttctaggcatgtgtctctttggctgtgaccctggatccaaagcttttggggactgagtgtggatgtgactgctctgctccacctggctgggacatagcaggacaggcagcaacccaggtctgtgaaatcaatcatgatgattctgggaggaattattggtgaattagggggatgctccaagggatggtccagatggaggtaggtgtaaagtggagttttgctggaaggagttgtttttgcacaacatattgatttccttggggtgggagaaaaaagaaacagcagctcttcgctgctctcccagagtggtgggtaggagaggacaggtgggagtctgtgggcccctttagctggttatttttttagatgtaccatcaggtagctgcaactgtattcccactgcttccccagcaatgcaaagggcagattacgaagcagagctgggctggcagcaagttttgctttgctttctcccagcggccaacagcatttgcattggtgggtggtgcacacactctgcagagagagggcgatacccaagcccagggcccacagactgagcacagaacagaaaattagggctgggaattcacccgtggctcctcagtgtctgtgttgcccatctctgatagacttccaaaatagcaggggccaggaatttggtggggacacctggggatgaggggccctgccagagctgggttcattcttgagggaatgtctcccaaatctgccatttaagaggatagagtttcggtccccaagctcaattctgcctcacctccatgctccattatctgggtatccccaggccactcacttatcccacccatgtctattctcttacctgtaaaactagaattgcaggtattttagtggatacgttgttgggagatgactcataggttttgatcccatctccatctctgcattatcttggacaagcaacctgacttaggtgcttgcttgtctttaaaatgcagaaygttagtacctatcatgctagctcattgggaagttgggaatggcaaataagagaatggccttgcaggctcttgagggaacagaaaagagaaaagtgggttcctcagagacatatgctcttacctagggtgggggagctggtttatgaatggtgtaagtctcagagtctccagcttcttccctagggtcctcccggaccaaccagcctgtattggagtgtgttcagcctcttgggtagatgtaggaccgtgggtggtgacatgaaggagacaggttactgctcagcaggaggggggacctatgtacggagcctcctagcctcagaggcagctgttactatgcagagccttcatgctgagccctgtgctaaccactccacacacactgtcccctgaatcagtcttgacaaccagcccttcacaggcagggagcaatgggattagatgccttttgtggcacgagaacaggttcatagaggccctctgttgggtcagattttaactccatatccttaggttttaaggagatccatggagtctgtggcagagggaccaaggtgggggagggggtgccattgatggatcatagatgggactcaccatctagctgggctgttgaggactccatattagcctgggagtttagtactggcattctccaagacacacgtgaagaaattgaggttcagagaggtgaccttgccaaggccacacagctagtaagctgtggagctgggattctaactcagatctggttgactcagaagtccagctgggggtaatgatggcaatgaaagctctagagttggaagagacccagacaaagcgggtttggggctgcttcagcgaccaaggatcttggggagaatcctggcccacgagaccacagtggattcacctgggtgctgctggccaagagtttgagtgtgagtgtgtatgggtatgtgtagggtgtagggtatagcacatgtatgcagtgtgagtgtagagtatgtgagtgtgacagtatatgtgtgtttgtgagtgtgtagagtatgtgaatatgagagtatgtgtgagtatgagtgtgtctagtgtatgtgtgtgtgtttagagtatgtgtagagtgtgtatgtgaatgtagagtatgtgggtgtgtgtgagtgtgtgtagagtatgtgaatgtgagagtatgtggaygtgtgtgagtgtgtgtgtagagtatgtgaatatgagagtgtgtgtgagagtacgtgtagagtatacgaatgtgagagtatgtgagtgtgtgtgtatgtgcgtgtgtatacagtgcctccccaaaggccccactccaccagcagcctgcccatccatcatcataacgggcgtggaagcccattccattcctgctgagccctgccaaaaaatcagtgagggagagccaggaagaatgtgcgccgggaggagcaggcagcgtgttgcagtccgaacggcccactgtgatgatttgggtgacgatggggccagcggtgccaccgagactctgatggctccttaggagttgttatagtcacrataatagattgttctctgtttctcaatgctaggtccattctttaaaatttttttttcttcctttagaggcagaggaggagatggagagttggtgagattaggattttaggtgtcttcaagtcaattctgaaactctaagaagaaatagagaattctgagtgattttaatttttctgcagtcatggggggaatttccatagggaagatgctttccaaggaagctcatgtgtcttggactctgaaagagcccttctcaggcctggttctggcatttgtccatggtttggggaaggtgggccctgggtgggggcaaggatgtgacttttggagcaaggtgtgggcactgtaggctcaatgtggttctgctggggtggtgttcttgtggctgaagaatgtgtcccctgagttggcacagtgatgcatgacataggatggaccaaacggaaggcatttcctgtcactgaaattaaaggagcaggggggtggaggggaagcaatggagcagaagaggagtttggttctaggagcattcagaagtcttgggagtgttgggttaggtgacacagttcctgtctgtcctggggctctatgtactccccctggagatttcactggaactggtgatgtcccgtgtttagggctatctctggaaaataaatatgaacataaaataataagaggctgaacctacgaaggaaatgaactaaagtcaatacacatttttcccagacaccatacaaggtcctgcaaatcactgggaaatgaatgggacacaagacatcacactccatgcggtgagctttgtgtttggtttttcccagtcattggctgtggtgaatcatgtgttctccctgtgttcaaatggctgttgagagaaaggtgtggatgttggcagctctggggaggagaccagtgatgacaccaattgagggtgcactatggtgtttagatcattggcttttaaaatttagtcaatgacttctgaagtgggcctttttgcttccagctgacagacatatcagagtgcgggagacagagtacccaattccaaccccaacatcctgcccacaagctgtgggaacctgagtaagttactcacctctttgtgcctctacttcctcatctctacctgggggaggcagtcaacgtacctaatgttattttcatagtaaggctgttgcacagaatagatgagttcgtaggtatgaagcccttagctttgtatctagcacattctaaatgataaaaatattggcattactgtcactaatgaggatattgaagatcagtgaagtgagggaattctcccaacactgggaagaaagaccacagcaggaagtaagctctgggaaagcccatgctgtctgattctaacaagaaggatgctggcgtcctcctgctccgagatgccaggaactgtggcctcaaacctgagggacaattctaaactccatctctagacaaagagtagttgccaaaccaaataattccgcaaaatacacatgccagtgcattttcctttctttgtcttaatttttatggatacataatagttttatgtatttatgaggcccctgtgatagtttgctgtgagcacacaatgtgtaatgatcaactctgggcacctgggataccatcacctcaaacatttatcatttctttgtattgggagcatcccacatattctcttctagctattttgaaatgtagaataaattcttgttaactacagttgccctgttgtgctactgaacactagatcgtattccttctatctacctgtatgtttgcacctatcaaccaatccctcttaatatcccctccccactacccttcccagcttctggtaactaccattctactctcttgctccatgagatagttttttagcttccacatgagtaaggacatgtcatatttgtctttctgtgcctggcttatttcacttaacataatgtcctcctgttccatccatgttactgcaaaggacagaattccattcttttgtatggctgaataacatttcattgtgtatatgtaccacattttctttatccatttgttcattgatggacactcaggttgattccgtatcttggctattgtgaagagtgctgcaataaatacaggagtgaagagatctcttctgtgtgattgcttttcttttgggtatatacccagcagtggaattgctggatcatatggtaattctatttttagttttttgaggaaccttcatactgttttccatagtggctgtaccaatttacattcccaccaacagtgtatgaatgttccctgttctccacttccttgccagcatttgttattttcagactttttgataatagctgtcttttaaaaaactgaattataactacttccatccgtatttttcggaaggaggggaataaacttcttggaccaaatctgatgagtcctgagatatgtggggtagatgaacaggagtcaatggtgggaccttttgacttttgagccctggttggagtattttgggatgttagagcgtccttctggaattaagatgtgcttagtaactgatgtgtggttgctactggagtgtgtgcatgtgtgtagaatttaagaaattataattcatgcgccaccttcatataacatattcatgtaaagattggcacttggtgaatctccacgacccttatagcatccctgtagtttgtaggtgtggttgtagatataggttgtagattatgggttataggttgtaggtatatatggtatarattgcagttgtaggttgcagggtataagttggrggtacagggtgtaggttttagtttgtagttatatgctgtaggttatagctgtaaatggtaggtatgggttgtaggctgtgggttgtaggtatagattgtaggctggaaacagaaagaacattgatcaaacgtttgtcacttctttgttttgggaacatctcaaatattttcttttagctattttgaaatgtagagtaaattattattaactgtagtcgttctgttgtgctactgaacactagatcttattccttccatctacctgtatttttgtgcctattgtatagatagacctggaccttgaacccagaacttttgatgcccaaatccctgatcttcctgagtatattaggttccttcaggaaaaatgagatgcttttcagtggtaatgtttatgcttcgctataataaatacacataaacgtggatagagaaaggacctcgtatctagtttcttcctaggacaccagttggttatcgtttgatgcattttctttaagcctgcttgtaccaattttttaaattatttcaacttctttagctctgactgtaccctctgccaattttgtatgctgccttctgcctcccagttactataacaaacatctcctatgtaaaccctttttatgactacattctacttggtatggctgcaccataatttctctagtgtaggatatttaggctgtttctgctgtttggctattataaataacatagcaataatcatctctgagctagaagttttcctaatgattttatctttaggtttctgggatgagcatagggctggatgtttgccaggctagggagaagctggggaggagcctggtaacgccctgagggggaagcctggcctggagttacctggctgcctggctcaagtgtgcccttggcaggggctgctggcctagaggccagcaccaagcagcatagtgggccagctttggcatagatggagcaagagagggaagggttctccctctgtaatcaggagtagaacattcaggcatggagctaagacaaatgagtaccttttagagctttggctctatagagacagtacaggtggccatgaggtggtaaggaacagtcacacatttatagcctccccacagttcatccttctgatatttctgccctgagttaccaatgagcaacaggcagttctctcccacaaagcctaagcagggggagttcatcctcctttgttaggatttgattttatcagagggatatttggaggtcagtggctggaagaataatgctgtcagagtttggtgactcttgccgggcagtgatggaggtgggggaggggcagagcctggcacacaaatctggggaagagtggtgggatgcgggaagaaagactggtccctgtactcaaggagattaggatccttagggcttttacttccaacatttactgttcctcctcccgggatgcctgccttcctcttgtttggcttgtgtttgcaaatgaagcagacaagttctagagaagttaaatgatttgtcctaagtcatgtaatcattgactagggaagggaaactagacccggagctccagcttcacgggtgccctttctcctgtgtcatgcagccgcttctgtgtgttggctagtctgcccagtagactctgctccttggggctctggttgtgtctgaccttgttgaatcccctgcatgtgtagtatgaccttgttggggtgtctcaacactgggcatgttagcaacactgagggatgaaagcactgtcatgccctggatggtcagccctggtttgttgaatgcacgagtgttcatatgtcagaaatacatatgcattcactctacaaatattttcaaacatttattatgttcccagcataatagtagagcttctactattgcaggggagaaagtcttcaataaaagttatagaataattaattacagatggtagaggagctaaggaagagagtgatttcaggttgccaagagaacatactcagagaggcatgatagcttttggggaccctgtcagtatcatcaggatagcccggactcagaagttagtctctcatagagccaataggaaggttttggcaaatctggattttttcacttgcattctggttttggttctgctattgactatcagggttactttgaaaaaaccatttgcttctttatgtcttgcttgctttatctgtaaaatgaagaggttgtaaaattcttctgtaaatcatttaattaccaccctcttcccccatggaaacaaacctagaaaatcctaactttgctttaaaaatattcagtacatggaatattttagtgttcatgttttctcttttgagtggggtttggccattggctggttcttggataaaatttggagggaggtattctccaggcttaaatgagtgaaaaagtctgggaaaaaataaaccaaccctacctccttcccacccaaggagtgtcctttgcatctggcatcgctgtgttttcattcgctggtcagtccctcatctgctgccaacctcttcccttcctggcttggtcagaaggtccagagagcccactgtactggcggggagaatctgtcccttttgcgcacatcattgggaactcaaagtcatctcgtgttggagtcaaatgacgtgttagcacacgcctgcttgggggatcctcctgcagttggcatattgcgtgacacacggggggattctcatcgtgctggaatgcatggccagccccttctttctccaagcacagttcagtgcattttccccccagttgctgcttctcgtaggagattatttctgattcrtattgagttgttactggaaaacacttcagagagataatgagctgggtagttttcctcttcatttttctttgttgttgttgaattcatatgggtaactgggctctccacttacactttattgattcctgaatttagggcatagctctgtaattggcaatttcctcagtgccacgtgggcagagagaagtactgtgcctggggctgctgactctgcaggaagctgtaggggcacttccttttagccctggactgacacagctgagtgcccgtgggcaagtcccttgttgcctctttcttggctctggtttttccttgctgtcttgtgaggggtcagaccagatgactttgagcaccagcccttccagttcttgaattttccaggctaggttggaagcccttttctttggtgggtttatgcatgaagggccgggtgtttctgtgttcacggatgacactgctgatcccatgtgctcttgtcattgttttccttggagggctgagggatgtgtgctgagtcaygcacatgcacagccggagtcccttgtgactaagctgtgcatttgcaggagcgctggcagggtcggtggtacagcctctgaactgggacagcttgaacccagcgttgcctggagtgggaataaaccttgaccttgctggcgtgggtgaggggcacctgcccagggagctaactggtctggactcatacagtgctctccttctgtccatttcagtatgctggctgtcagctttgtttatgcatagatgaattactctcatttcagattatcgtggaaaatcttgctgtcaagttcttaggacaggattaagtagaataggtgataaaggtcattggcattatttacaatctcttgactttcattcacccccatctgctgtagacaagctggatgcttacaagagcggcaaagacttgggacttagaatcaggcacacccaagtttgaagccccgcgtggtgctttctggctgcgtcaccttgaacgcttgcttccccaagtctcggtttttctraaatggtaggaaacagctttgtttggcctaagaggtttgctggtggagactaagtgagctactgctgtgttttgccacacctcaatgctggtgggatgcaagatgctttgaggagggacacagacgaatttcttattatagttgtgtatttgaatacacttgtggaaaaatagaactagtacatcagagctcgtgatttcacagatattattgcccaggacaatgctaatttgaaaaaatcgagacaatttcaagttgatttcaaggataatatgcactgaatattagtgcaggcaggcaggcggggcagaaatcaggaagatgggagagaatgacagaatttggagtactactgagacctacactacaggtctcctatagaacatgtggtgggagcagaataaatgcatctttctctttgtgtctgtcctggtacaaggaatgtttggggcattggtataagaagctcccagagaaaaggtgatggtgacttagctttgtgcactgcatcaccctcacaggcaacgctgtctgctctaggcgtgacttgcactaagtgaatgtggacaagatggccactttttctagatccttctggggaagctgttagttgtaatagtgttagaacctaagagctagaagagactttggagatgatttactgcattttatgttagacttagacaatttttttacaaaagggaaaaattaaaaagccccagagagacctggacttactcaaagccacacaagtagttgagcacagtggctgagatgaatcattttgtgtctttccccaaggatctctctttccttgtccctctgtctatcctggtcaatagcatcattgtttgaagtgagtttttggaacaggacccagctgcattcggtgggttagtccagcaccacaaggatctgtcctttagcattgcctgtgtctctggccttctcgtgttagttagaagattgaggaggcaaccatgtagacactgctggaggaagaggaaacgaatttaaaagtcacaagttttggcctcagatgcctgtggtgttgaacattattagctttgttgtcggggcatgcgcctgacctcccggagtctcaatttcctcctctataaggtggcttttacctctgcaggtttgaatgaggtaagaggtggggagagcctagtacttggctcccttgaagaaagtagcggagactgaatccaaggccaggctgtccactccaaactgggattaggatgtcatggttcttcagcccctgactttcctgacaaaggcccacgtgggggctcttggttggcctggtcactctctgcttggggtgtcctcattcttttccctggagaggttctgggatcaggggtgagaatggggttaagttatctaggaattgagagtcccttcttcataactaatttttctttcctatctcatgacttctagataatagtctgtagttttaactcatttgttatttatataatttctctgtgctcggctctaagggtataagagtaaattagatctggcccttgcatggaagaagcttacagctgaggtggggagctctgtctagcatgcacagaacatggtgctttgacaaagggtaggtgccggggagtgaggtgggagccctgaggaggagatcttaacaagggaaagccttctacagcaggcaggggctgagctgggtttgaagggctgagaggagctaggctggctgaggtgggagggtgctggggtggcaggggctgcactcctggcagagggaatagcacaggaaaggcccagaggtgagctgggaaaccacaggcagagtggtgcrgggggaaaaagaggggagggcaggaacacagtgggggaacttagtgcataacaacaatgccctcaacccttttgcctggctcttcaccacgtgagaggactcaggggagaagagtctgagtgctgtgccctttctgaattctttttttttattattatggtaaaatatacacactataaaattgaccattgtgagattttaagtatacaaccagaattctgttcaaccatctgtgctacttacttccagaaccgtccagcactgcagatggaaaccctggaccaatggggagtcactgccgttctctcctccatccagcctgagaacctgtgatctgcttgctgcttcttgaggcctatttggatatttcctatgagtagaatgataggatatgtggccttttgtgtccggcttcttccacttagcataatgttcttgaggttcacctgtgttgtggcatgcagcagtactccgttcctttagttctgtgcatggccacaccacatttttcttattcatacatcagttgatggacatctgtgttgtttccgcctttggctattgtgaatagtgctgctatgaacacttgtgtacgagcttttgttggtatcttttcttttctttttttttttttttgagatgggctctcactctgtcacccaggctggagtgcagtgacacaatctcagctcactgcaacctctgcctcctggttcaagcgattctcctgcctcagcctcccgagttgctgggattacaggtatccgccatcacacccggctaattttttgtatttttagtagagacagggtttcaccatgttggccaggctggtctcaaactcctgacctcaggtgatctgcctgcctcggcctcccaaagtactgggattacaggcatgaaccactgtgccaggcctgtgtttgatttggggtatatgcctaggaatgggattgctagatcctatggtaatgctgtgtttaacttattgaggaaattgctggattcttgaggatgtgtttcaggtccaccctctgttgttgccttgaccttgttacttgctctgttgggtgcaagctctgaggcatgggctagacaccttgtgccaggtcctgttttccatcctcacaagcaaccccaggtggtgggcactcttcttggtcctggttttcagatgaggagatgcaggcacagagtggttaagcatcatacccaaggtcacacagcttgtgagtagagggtctgggaattgaacccagacaggctgtccagagtgcagtctctccccaacacaccccatggtgcctcagagacaggagtcccatagacaacatcctggatggagcctgtagcctcctgatggtggttggaggctgtgcgcacagcatggagcccgagccagcccctggggatgagggctgcaccagggcccactcagccaccctccaccctgtgttctttccttgccttgcctcccctctgcactccttccttgtgcctcctcctcactccccaccagcctcacctctctctcgctctctctctttctttctcttttaataaatggaaatggtttatgggctcttctagaaattgcacctgccttctggttataactggggagagagagaggaagagacacagagaagagacagagaggcctccttcagcagatctgggtatgcccatgggacctcctggcctggacatcctggtggtgctttcaggcctgccacagaagtgaccctgagttggctctggctctaatgtctgagagtgccttcttcccctctccccctgtgactgcctgcaggacagcgcaattcctctgccattgtgtaagcagcccccacagatgatactccatgctagggmattaactacttgttgaaaagcacttgtgtgttcccctggctgaggctgaaagtgggggatccctggggaagggggtggcctggctatggatggggagaaggccctctggggaaatgaagaggggagccccaagccagttcgtcctgtgggagctggcccagattatggttcataatgtaaatttgggagtatgccagggccatattaatactgcatgaggcagtaaggggaccttgggcttgaaacccgagctgtggcctagaatggaactgaacagtgggccttgtcttaaagggacatgacgagctcccagaagtatgtgtcggcattatttccctctaatgctgtttactatatttgtacacaatgcccccaaaggatttgaaaaggaaatggcaatgtaataagagaggtattttttgttgcacatgcgagcatgctcattgacttaattattgtttcttttgttaccttggtgaattagagagggggagatatggagagggaggatggraagttggagagggggaagagagagagagagagaggagaaggaaacccatgtctactgttattttgctgaaatctatctcagcgagtaggcagattgagaaatcaaggattcattcacaggtagaaaaaaatgaataacactttgaaagctcagaaaatcaacacaacagagaattcagtttcaaggtgccacttttgactcttctgctgctctttgaattgagttcatggctgtgctcatcgtctccatggagaagggcaagtcagtgccatttcttgtaggaatgatcgggccactaacatttgtctagaaaccaagcaaccgaaaagtgcaaatatctggatgctattggcttttgagaaagaaaggatgtcaggcatttatttgaaagggtaacctccatccagatagtgttgtagagcattttctcagacattagaaagattcaactgtgtacagtagttttagtgttgagtgtttcagaatattttcattctttccaaattgggggtccactacattagttagatgcttttgattactaatgatcaagaacactgactcaaattggcttagacagtaaggaaatgtatctcccataagagaacagagttgggggaggaaaggctccactatggatggatcagtggttcagtgatgtggatgaggccctgggccctttcttttcttcaccctactgtccttagtgacagctttataccaagtctgatttctctcatggccgcaagatagctgcagtggttctggacatcacatctggacatggcaatgtccagagtcaaggcagggaccatctcttctggtgaggactttatatatagagaaaatctttctccaaagcccccgatacttctcccatttttctcattgaccaaaaccaggccacttgcctggctccaaatcagtcagtgtcaatagaatgggaatgccctgatgtaaactagacaggacccaccagctggtgagggaatggggtcagtttatctgaggtgcaagacactgtggagaaggagtgggaacctggacaagatggggccatgttagtaacgaggaggagggtgacatcttttgcctccatgaatagcaaagggcagttctcacttaactggggtgcacatggcatcacagaatgctagaacttggaagggaaattagagacaatcttcttcaatcctttcattttacacatgaagaaactgagctccaggaatgaggaggagttgcccaaactcatggatccaccctgggccccaggcaccagctgtgtggggccagtgggccgttgaagcactctagtcaatgccacacagcctgggagcagtaccagaacccagggtgggaaaatgttggcagggcttccaraaactacttgtagggcctgtcattttcattcaataaatgtattgatcaaccattgagtctccaaccctgcactttctgggtggttatgagaaagagtaaagttaaagaagcctcaaggcatctggaagagaacgggttccaacctgtaaggacatattccaggctggatgtgctttctcttctggagataattctcattttggtctcttttttcatattcttactgcctgattccaaggacttacaacagtgtctagaacacaactggtatccataaatccatatggaattatattaattagaactgcatgaggtccagaaagtattgttttcatcttattttaatgtgtatacattggctacaaaattaagtcatggtagatatcgtccagataaaattgtccaaagaaaaatcgaacacggtaccttactgaaagtgagctcatttgaggactgtgatcttgatggttgggtattgactgggttagggggtcaggcagtgacagcggcttagcctgctggtgctgagggaggccggggatcatatccrtgcaggtgatccatgacagccctcgaccccagtgtttagaggaagtggatgggctcatattatttcctcctcttccctcccgcataaccctctgagtagtctttagagccttctcttaccagctaggtggctctcattgtgcatgatgtcaattgcagaaaatgtgagtggggaggtagctgatagataatgagacccaggtccctcagtcccgagctgccaccctaaataaagcaataaagcaacccacaagctgcatcagtgtgcctggtattttcatttctcctctagaaacaggtttctagggctgtcgagaatttggaactcataccacacataccaccatgctgaggtttctaaattcagkctgcggtttctgcatgtttttgagagtgtcagaaacttcaaaacatttgaagagtcccagaggagaagggaatattcttcttcttattattctgagagagcatagtttgcacattcttggcttcttcagcatttggatgctggagctctgttggtctgaggctgaagagcaaactctgccaaagcttctcttaccrtggggatggaaagttttctgtgtctgttttattacttaggcattccacgttctccttcgacatctcacatactcctgctgctttcctttgtgagtggagacctcgctttctttataggtggtaacagctgtgttctctagagagtgaatttttgcaccacaacccctattctcacaataacttcacttggacatcgaggataagtttccatgtgagaaatattgtttagtcatttattttaaaaaagcttttaaattatttaaaacaatttgtgggttacatagtaggtgtgtagatttatggagcccatgagatgttttgatacaggcatgcaatgtgaaataagcacatcatggagagtgaatattcatctcctcaagcatttatcctttgagttacaaacaatccagttacattctttaagttattttaaaatatacaattaagttattattgactatagtcaccctattatgttatcagatagtaggtgttattcattctttctatttttttgtatccattaaccatcctgcctcccctccaatccgccactccccttcccagcctctggtaactctctttctactctaatttgattttttagatcccacaaatatttttacttttcaagttgaactatataatatgatactaaaacttgaacacaccacaaagtatatgcatattcaaaactgaacacacccatggaactaacatccaaatcaagaaacatagctgctttacactttcttgaaataagcacttacctggagatgcaaaggcacttgcgtgctctttcagtagcatttctyttctccagcatcttcccttgacatcagccttgcctgcacattgcccagttgggcaaatttctctcccaggtagaggttaccaggcttgcattccctatgttttagcttctgtcttggtctttctgtgtgtttktatacctccatttgaagcaaacccaacacatgaaaagctatatttaccaatgggaccaactattggggcagtgtctacttactatacatatttttaaaaaactgtttctttaaattggagagctccaaggtgactgatgttaataatttataactatttattaagcacctactatgcggttctgtggtgtgattgcaaggggggggggcacgtccaaggttgagtaagacatagcttctgttcttaaggatgtcccagtctagaagtggagataagctatgcatgagcttgaccaagatcttgctacaatgaaagatagctgggaagagcatgagagagttcaggggaggaaaagaccactcccacctgtggcatggagggtcattcaggaggactacatagaggagggggcactttacattggcacttagaggaatctgccccttgatgggacccaaacttacatttatgatgtgaaaaatggaaaggagacttgttatgctttaacagtaggtgttgctatttaatgtatgaagcttactcaaatggaagagtttgggtttattaaaggaaattagaggtctctgtgttagcagttctgtatgttcaaaatgtgatacaatgggtttacttaaaccattggttgccccaagacccctttcttgaggaattggcagcttggcagagtttgcacctttgaaggctgccctgcaaggataaagacctccatccaaggggaaaggccagaagcaggctcagagctaggtcccacaactctgcttccctgtatccggcccccctgccagctcactcaagcaagccctgtttctgggcagcarcagctgtgaggtgtgggtgaggggctgttgctaggagcagggatccagcttgccttttctgacacgtgtgtttaaattagcatctttaaatgctgttcccgacagttattcaattttgaaactactggggattttggggcaggtggagagtgttaaggaggaggcgaggcaaatgaaaaggcaaaacatttgggggagtttttgaaaaagttaaataaggaaaagagtgtcagctgggggaaagcacatctcaggccccattgcaggaccccttccccagtggagtcatagagtcccctactctgccccaaggtgttggagatggctcatrgctcatgggaatgtgcaggaagtcccctgagtcttatttatttatttatttatttatttatttatttatttattttgagatggagtcttgctctgtcacccaggctggagtagtgcagtgacatgatcttggctcactgcaacctccgcctcctgggttcaagtgattctcctgcctcagcctcctgagcagctgggattacagggacctgccaccacgcctggctaatttttgtatttttagtagagataggttttgccatgttggccaggctggtctgaaactcctgacctcaggtgatctacctgcctcgacctcccaaagtgctgggattacaggcatgagccaccgtgcctggtccctgagtcctcttagggtctccagaaatcactatatcaagtgaggtttggggatgggcacatctaagtgataaccacccactaggcaaaaggatcctggtgttgggagatggggtgagaaactggggtgggtgtcattcattcaaccgagtcatcactctcaagggaccagatggagaaagggaatataataagaaaaatgatgatgcttaaaataaatattgataatgcccacattttcagggaacttctatgtgccttagatatttatttatccaagagcctcacttctttttacttgtccgatccttacagcagatctccaaagaggttctctgttatccatggtttacagatgaggaaactgaggcacagagaggcagttaaatcacttgccccaaaccactgaagccataattggcggatctgggattgaagcccaagcttccgggcactagtgtgtgggcctctaatcttgcactttgctgccaccagaaattaggcaccaggatggtaactgaggaaaccagacaagagtgagaatgtaggggtggaggatggaagatgggtatcagggaggttttctgagttgaagacagtctgtcctgtggcttcttaaaggttgctttcagatgagggtgacacaaaggtgtccccctgtcctggacatgatttagaaccctatccacagagaacatgccaaattttatgcacctcagggcctttgcacatgctgttttctttggctggaatcactgtkctccctgctttgtgtgttatggttctttctcatctgtcacacttagtttaaagctgcctcctgcagaggctgacacgtcgtagcagttgctccatgaaagtgttgagtaaatggatgaagaataaagctcttggcctttcagggaataactataatgagaaatttggaagatctttctgcagctgagcctttggaattttgatgtcttccaaaagctggggttgttaggagaagaggtaccaaagtggggcttcatctgtaaagacccagctggagctcttgttcacgcctttccctgaggctggaaggtctcttggatgtcacaggctgcctctttaaaatggagacagtggtggactttcctcyctgttgaggatgggaatgaggatgagggagcaggcttggggtgagcctaccatccaggggcagtgaactttatatggcgtgggatgaccagtggcctcccctggggtggctgctggatattggctgatggatggtagaggaaacactattctcatctcaattcctggattggtgtgggggccaaatgagatcccatcattcctaattaagatgtagttacattaatgataaagacaacaatggcagctaatacttagagagtgctgctacctgctggtcactgtgccaagccctttagtgtgccttatccttgagtcctcaccagcccctatgtgcaggaacctgctgagatgaagtgacttgcccgggccacacacctggtaaagttggaaaccaactggagccagccccagacctcacattgcataccccagacctcacactggataccctcacactgcacaccctcacactgcataccctcacaccacatatcccagacctcacactgcacaccccagacctcacactgcataccctcacactgcataccccagacctcacactgcacaccctcacactgcatacccgggacctcacactgcacaccctcacaccacataccccagacctcacactgcacatcctcacactgcacaccccagacctcacactgcataccctcacaccacataccccagaccgcacactgcacaccctcacactgcatacctcagacctcacactgcacaccctcacaccacacaccccagacctcacactgcacaccctcacactgcacacccgcacactgcataccccggacctcacaatgcacaccctcacactgcatactccagacctcacactgcacaccctcacactgcataccccagccctcacactgcatatgccagacctcacactgcacaccctcacactgcataccccggacctcacactgcacaccctcacactgcatactccagacctcacactgcacaccctcacactgcacaccctcacactgcataccccagccctcacactgcataygccagacctcacactgcacaccctcacactgcataccccagacctcacactgcataccctcacgctgcatactgcacacctcacactgcataccctcacactgcactgcatactgcagacctcatgtataccctcacactgcatactctcacactgcataccctcaaacaaggcccttttctgactgtcacttgcaccaaacagaatgcagaagttttctaacttgaacctttgaaaattttttctgttctgtgtttcacraagggatgtgttaattgttgaggtaattgcagagttccctggctttataatcactcatgttatttattgttcttgttattattagtaaaagccatagtaattcagcctttgggttggaatggcagcaggagccagctgagtgaccttggccgtgatattaatactctttacagtcttccctcrattatccaggctaatggaaagagaaccagtgcccgcaaataatcataaaacaaaaaaaaatcaattatcttctcagtggagtgttgactgacacgtgggtcctacgccttttatgaggctggccttcaaacacagctgcatctttggtgatatttcagaaagcgtgaggtgggaaataatccctgttttgcaagtcaaggatggagaaggagcctttcatctctggatagagatggtgtgtggatatcaccagctgccaatggaggggtcagtgctgttattctctttcctaaagcaactcgggggtgatggagaaggttgccttaatcccctctgagcatttcactggctgatgtggactcatggaaaatgtcagcgtgctggcccaggccaggcgggctgaagccagtgtgtcttacagctctgtggagcagacrtggtgtgtggcttgaatggaaaggtcataaaggcctgggacaagkgagtggacggagccaatggcactgtctggtaacactatatggaagatgaaattgtagtgtggagctgagaggtgcagggctggggaaagagacctcagcattttccatgattaactttctaatagtaaccatgcgtggacagtgggtgctgggcagcagggagacagtcttctccaagcgtgcattcatacagtgcaggcggcttcccactatctttgggttttctccattttgtctgaggcagggatcagaacatagacctattgtctttgatggcaaagtgaggaggcagccaacttcatgtcctcctaattgactcatttcctccccgctggagtccccaaagcataggtgaccaagagctccctctcagctctaagtcatgaagaaacggatgcttagagaggttacccagaagctggggacagagctggcaccacacccaggcctcctcccttccagtcctgtgcttgggcaggcagcctgtgggcttcttccttcggccctgtccccttccctcagtactaacacgtgctcctagatttctgagcagcccctagagagaagtgacggattcatactagagtgttcatgacttcatgtatcacttgcctgagagtatttttaaatggatgctgggggagggcattgcttaacccaaaggaacaagaagtggactatgaaatttcagtcccagggcctgccatgtgttggcctgttctgggtgctgaagatatagtggtcagcaagacacacatcctctctcctttgagacctcatatttcactgggggaggcagaaacatagtaaataaataataaactaacttcagataatgagaactggttttagaatatgaaacaggctaaggggatagtgatgtgagtgcaatggggaacctgttttatgtagttggccagggagggtctttctaaggaagtggccartgagtggaacaagatcaacttgcctggaaaaggaaactatgggggatctttgagggaacagtacttcaggtgtgtggaacagcagctgtgaagcctctggggagggaacgaggctggctgctggagagtttccttggctaccctgattaacggcccctcttcctgcctcccttccctattttattattttctctggggcatttgtcaccatcttatatttgtcttaacacaccttatatttctcttatcagtttggcttatcgcctgtttcctcaactacaatgtctgttgcatggaggcagtactttacctgtgtttttcagttctacaccctaggaatgtgcctgggaaatagtggtgcttgatacctccttgttgaatggggaaatgaacaaatgcatggactcagcaagcaaggcagacggtgggaggagatgtgaccaggaagatgggcaggagtyggagggggagaggctgagaacacgggcccttcagtgtctgtgtccttgtctcactgctgctgggaggggctggcagaaactggccttcttgccccatgagccccaactcagcagaaccacccagcaggtcttagcatccccagcctggctgctcccagtggatgcaatgctcattaaccatggagctggtaataacacgcccatgtcctgcactgcactggtgcctcaaatctatgtgttcagccttggtgtaaaatcactaggagccagggacagagggattccagggaccccacgcccagggggcctgagaggctcatccttcgtgtcagcttgtgttttccaggggtggttttgcctgcccggttactgctgtggaattgcctctggcccatttatggtggaggcctgggttccggtgacactgctttctttctgtacaccttgaatgaggtcaggcagctcttcatagagggaggaactcttcctggagtgccaagggtagggtctgcctagtcccagtctctccagcctgagtttgcatcagggagaaaaagcaccagcacctttttcaycaatgcgcccttccccacattcacacacgcatgttcacatgcatgcacatgtatgcaggccggcttyccctcaccttttkktttttttttttttgtaaaaaacacacatccctatgtccacaaacaccctcaccctcacttcctccctcatccacagacacctgttccccagtgatgcacatttgctcacacacctgcagctgctcacacatgcctgcatgagaggccctctccacccttcagtctcccgtacaccggcaggtgcccaccccacaccagccgctcacacaggcacccccgttttagcctcttacacttgcacagggggcccttcacctgctttgcagcaccggagccggagcccagacacatgatgaggcatgagaagtggaaagttctgcaggtgctctgcccaccgtgcaaaggaggaggcagaggtccagctgcctctcagcatatagaggctcagaggcctttgcagcatgcagagcttttggaacgtatcttactttctcattcttaaattcattcgggtaaccactgtttactgtgcacctaccatgggtcaggcgctgtcctctgcaccgggcatactgcagaaaacgaagcagatgcaggccctgccctcattgggttaggtctagtagtggagacagaccacagacaggacaaatagggaaacaggagaagccaggtggccataagtgcacaagcayaaatgaaacagggaatgggaaaaaatagtgctatggagggtgcatggagagaaagctctttgttaaggggagtttggagcagatttcaggaaagggccatgttgcaggcagaaggaagagcaagtgtggccaagacccaggaaggatgggaggagggtggctgtggcggggcggagtaggggggtgggctgtgggtactctacatgatggggatttcttaaacatctgtcagacccaagagactgtgatcctctgaagcccctggatatgtcaaattcatctcagtggccttatgcacccttcgcatgcacctggtataggccagtgctcagaaaacatttgctcctggagaagttgctggttcagttctgtgtggagctgctctgtgttccaagatctgcgctggctgcagggataacagggatggaagagaaccagcccttctcttgaggagctccctgctagtgagggtcaatcaagtgcctggaagttgtgtgtgggcatgcagagtgcatgatatgccaggtgccgggaagcctcccagcccaggggctggagggaggggcactgcttagtgggcagctctttggaggagctgatgcttgaacagagtcttcaggaaggagaggagttagccctgggtggggaggcagagaaggaaagagacactgaaagccgaggggtgaaccacaaatatttgggaaatggcaccagcaaggtgtacagcaggggtttccaaagagttcctgattccctcctcaaagtgatgggagccacacttcctggcttatcagttggtccttkccctctggctggtgctgtgtgtctgagaggcagcctaggaagacctctctggggagaagcagagaaagatagcgacctctgaacgtgctccccagaattcagtcaccccatcctacctatgagaggggacaaactggcagtctacaggtgtgtttggtttagcccatgtggcttcattgttttttaattttttttttcatcaattgcctatatttacaaaggagattttggataaaaatctggattgctagctgtttttgaaaaaataaaagattgaaaatgtacctttgtgtgcctgtgtcccctcatggtgatgattggtttgggcagagccattgcacgctctcctttcccccccatcccccggtgctgaatgcagcacccctcactcaccgtaacaggctggctcctgtagacacatgaccttggatccttttttggattaaggaagcaaacatgtaggattgtgcttctgcaaattctcagagatggcttttgagcccttaagctcttctggggcattctcatttctcaactagagctagcgggtgagagccctctctctgttttcatctgctgcaggacagctggacttcactgtatctcataaagaaaaggaggtggggtgggcagggccctaggctgtattactggaaaaaaaacaaaaaaaaacaaaacaggcagtagctcctggtttctgtaaaaatggtgtctagacgtgagtgaagaggcagaaggtcagaggggatttggaaatctcaaaggctgagcacagagcgcccacaggtgcaaggagaaagtacagggccagggccagagatttcctttctcttgttcctcagcttattcttaccctatyccacccaccctgccactgccaggtgctcagcgagtctttattgaaagagagattattaatatggtgaaatgtctgagatggttctctctccgcatacccagtaatacagggtccctttggcttgtgggagtcacatgtggccattttcagtagktgggaagcctgggggccagctgggagttgtcactgcrttgggaatctgcctcctgggcctttttattaaggcgtggagttgtgtgctgttctcttacctctggtccctgcttggaggaagaggctgaacttgtaccacctgggcaagccagtttgctgtgaccacacatggattaggtgccagatgaccacctggggaatgtgccagtcaggcagccrggatgcaaagtgattcgcttcccccttgccagtattttctagggcgtggtgtttgcccgcatcttctggtgaggcctggctatctctgaggggcagaccagcacacctgtgggtgcagcagctcacaggagtctgtygggcggcactgccaggccctcgggaccctgagtaaggtctgacgcatcagggcaggcagaggggaggccacatttcgcctgccactgatgttagcggggaggccccagacccaggtgccaggcgggcaaattgatttttcagcctgcgaaacttctaaagataggcacgggtggtgctctgtgctggcactgggagtgacaggccatctgtgagtcacagtcccgcccgctggaggagtgcaggtcctgggcaggcagcactgcggtgagaggggcccagatgcaggaggggagggctaatgcaatgagcttgagtcagccctgcttgccaggccaggatcctcctcccaggccggcaccaaggagagtgttctactgcctggctccaggaaaactgctgctgcctgtaatttatgcagtttctatggctgagtggagcagacatggcctgaatggatcattggagtggtttgtgcttccctcgccctgtggcctcacatatttaacaaaattggttgcttggtttatttcttgaatcatcacttgaaatctctcagcttcattctgaattcctcatccctcttctccccttgtttcctattttctttgaattatttggctggctctttttgatatttgtgacattatcttacatttatgcagcactttacagtttgcaaagctctttcacatacattatccaggcaacacatatttactaagctccaaggccttggaataagtgctaggctcccgggaggcagcagtgcattcgatagctacggtggctgctctcagggagacagtgataagctactgctaacttgtaggaagacaatagcgtgagatgatgctgagggtttctttgtgatggatgggaaaagcctctccgaggagaagacatttgaactcagaggaagccagccaggaggaaatttgggggaagagcgttccacgtagtagcaccagctagtgcaaaggcctggtggcaaggattagcttgcttgtttctgaaacagcaaaaacgccactctgagtggagtttagggcatgaggtggtgatggtgggggtgggggaaatgctgggtagggggaggctggcaggggccrtttttcagggctttgttggccatggtgaggagcttggatttccttctcagtattaggtgacatattggaggaatttaggcagccacrcgtgtgatctggttaacactggtgaagttcactcttgtaacagtaaggccagggagtaagggcaggagtggaagcagaagggcccctcaggccactgcacttgtcctggtgggagttaatagtggaacggtggcttggacttaaggctcaagtcggatataccgtctcagtccttactatctggaagtccaagatcatggtgttgacagggttggtttcatcacaggcctctctgcctagcttgtaggtggctgtcttctccccatgtcttcacactgtcttctcagtgtaagtctgtgccctaatctccttttcttataagggctccagttatattggatgagggcccaccctaatgacctcattttaacttaattacttctttaaagaccctgtctccaaatacagtagatgcccttatctttaggggttacattccaagaccccagtggatgcctggaactgcagatggatagtaccgatacctgtatatactgtgttttctcctacacaggcatatctgcaataaagtttaatttataaattaggtacagtgacagatgagcaacagtaatgaataataaaattgtgcaattataacaatatactgtaataaaagtcatgtgactgtgctctgtctcattacagagcacaaaaattcctcattgtactgtactgtgggtaactgaaaaaatgaaaagtgaaactatggataaggggggactgtggagtcctaattagggaaaaggagtcaggctggtgggaccaggggaaagcaagagataaagcagataagctataaatctgcctttcttcacgtccagagaatttaaacaaaagagaaaccagataagttacaggtctgcctttctttgtggcccagggcatatggcccaggatatatgacccaagacatttggccttcatgcccggataacatacataactcccgggcttcctgctcaccatcaaacacctcaatttatcaaacatccaggctgacagaggaatgcaagttaagctccctgctgccttggcattatcaatcagcccaagttccattctctaaaatctgmagcaagcttttgtcttctggaagttagcttctctcaggctaacttgcccattgtctctcrggcaacatatttccccactttctctaataaatctgcctttcttgacctatgattttcttggtaaattcttttacccctgtgccatcagcctgcattcgcccatgacagggacgactgtatagtcacatcctgaggtcagctgacagtacgcagatgagctatttaccagataagatgattaaataacagtcattaaaaagaataaccaatctttattgagcacttactagatgccaggcattccccaagcatcctgcttgctttatttctgcatcacagaaattctatgaactaggcattgccatgattttctctcccttagagataaagaggctgtggcttgggaagttttaataacttgctgtgttcacacagccaggcactgggagatctgggacttgcaaacgtgctcttttctgactccagagtccattttcttaactactatgaaatgcttcctttaagaacttgtcccagaagagaatggatgtttcaagttctgaattatacttgatttctttggcattgcagaaagtagacagatttcctgtatggtcctgtattaaacttgtatgtgaggggtttttgactgtctgcatcagtggttctcaaaatggggtccctgggtcaacagcatcagcatcacctgggaatttgttagaaatgcacattcttgggtcccagcccagagctgctgaatcagaaactgaggctggggcccaggacgctggtttaacaagccttcctggtgattctcatgctctatgaattttgagactgctgatctgcagcagccccaacatactcacaggtgtttgcatgtggaaattcaaggctcgatgtccttgaggaaccagacttccaggtttcaggtcggatgaggagtggagcagcactgctcactccatgtgttgttaatcggcgttatctccatgtgttggagatatgttatttccatgtgtttccacatggaaagtcatctccatgtgttgttaattggcgttatgccaaaaaggtgttcagtggtcaatatgtttcagaaacataggtttctccttttttatttttctaaagaagcagggccttkcttgttgctcaggctggagtgcagtggcgctgtcatagctcgctgcagccttgaattcctgggctcaagtgatcctcctgcctcaggctcccaagtagctgggactacaggcgtgtgcccccatgcccagctaattttttcttttttttttttgtagagacagggtcttgccagagaaacataggtttcttggttacagacctttcatatgttaattattattcttttgctgtttttgaagataacaatctttgtgcttcccaggcttatttgatcctgagatcctttgtttgaggagaagagaacaggactatgtttgagaaacctgcactccatagaggcttccaggagaggacataaataattgaattgggatcctcacagtgacgggtttctttcaatcagtcaattaagtggtatttactagtaggtatgctgtatttcttcctgtggcagaagctatgcacaattccagaaatgaatagggatccttatttgtcaaacactgactctatggcaagtggagtgcaagaccctacaaacttatgaacctgataccatcacccaattagcagatgagcaatctgaggtccaggaaggtgacattgcttatcttatcactgagcaactgtggagctgcgattgtaccccaggactgtgtgaatccccaaatctcttttctttcctttctrtactcctgtcatcgcttggagcttgaagtggggggtaggagtggggagaaaggagcaacactcatggaaggagaaccaggcctccaagcagcagcagtgggattgtgctaattgggtkatgatatcagccccataaggttgtagggtcttgcactccacttgccatagagttggtgtttgacaactaatgatccccagaatttagctgtgccttgctgagggtgggaggaggactgttagcccagcagcattgaggagtaaagtggataacatccagtgagccattccctagcacagttttaaaacataacgttaatttttgtttttcttattataaacataccacatgcttcccgaaggagattctgaaaatacataaaagcataaaaatgcatatccattaggatggctattatcaaaaaagttggaaaacaacaagtgttgacaggatgtggagaaattggaacccttgtccattgctggcgggaatgtaaaatgatgcattcactgtggaaaacagtatggcagttcctcaaaatatgacacatagaattaccatgatccagcagttccactttggggtatataaccaaaagatatgaatgcaggaaatcaaaacgatatttgcaaacccatcttcataacagcattattcacaataaccaagaggtagggccgggcatggtggctcacgcctrtaatccgagaactttgagaggctgagtcaggcagatcactgaggtcacgagttcgagactagcctggtcaacatggtcaaaccccgtctctactaaaaagacaaaaattagccaggcatggtggtgtgcacctgtaatcccagctactggaggctgaggcaggagaatcactggaagctgggaggcggaggttgcagtgagccgagattgcatcactgcactccagcctgggtgacagagtgatactctgtcaaacaacaacaacaacaacaacaacaacaacaacaacaaaacccaacaaaatgacaacaacaaaaaacagtaaccaagaggtagaatcaactgaaatgtccgttcaatgtggcatagacatacagtgattattctaccttgaaaaggaaggtaatcctgccacatgctacaacatgggtgaacacaccttgaggacattatgctaagtggaataagccagtcgcaaaaagacaaaacacaatactgtgtgattycacttatatgagatacctggagtaggcaaattcacagagacaaaaagcgaatggtggtggccagaggctggaggtggagggaatagggagatgtttttggttacagggtttcaccatgggttgatgaaaaaattctggacgtggatggtgatgatagttgcaccacaatgtgaatgtacttcgtgctatagaactagacacttagttcaataccagcctaggcaacgtagtgagatcatgcctttacaaaaagaaaaaaagagagagagagggagagagcacctctacaaaaaaaaaaaaaaagaaaagaaaaaaaaaagaaaaaggaaaagtggttccaatggtaaattttatgtgatatttattttgccacaataaaaagagcataaaagtcaaagcaggctgagtggggggactcgcgcctctaatcctggaactttgggaggccgaggcaggcagaytgcttgagcctaggagtttgaaaccaccctgggtaacatgatgaaaccccatctctrcaaaaattacaaaaaaaaaaaaaaaatagccaggcatggtgatgcgtatctgtagtcccagctacttaggaggttgaggtgggaggattgcttgagcccagggggttgcggttcagtgagctgagatcgtgccactgcattgccggctgggtgatacagtgataccctgtctcaaaataaaatcaaataaaaatgaaagcagcagttaaatcctagagatgattgctgttcatatttgaatgttttatgtcactcttttctctatgcatttagatgcatacataaatatcttcctgttttatcaataattctttgaagctatgcttttaaatgatgcatattagtttcccaagtagatacactgcagtttacttaaccatctccctattgttggtcctctgagttattttcagtttttcagtgtttcaggttgcactgcagtcaagaactgaatatgtccatttttatttacatcacagacttgtttctttaggacagattcctagaagcagaattgctgggccaaaggatgcacatgttttttaagattctctatacattgccaagttgctttccagaaaggtcatgcagctttcatgaaatctcaccaaaagtgtgtgagaaagtggcttttctgttagctttccttcccttttcaagagggagctcaggggatgcagagaaaaacaggaaggcagtctggtcccttcagatcttggagctgggtcatagcttgggcatgttgtctcttgggcagtraatgggcacctcgttagagcactgggacagggctgattggcactctggccacccaggagcgtggagcctgcctgcaggaaagaacagtcagttcatggataatcccttgatattggtgctctggttctagtccagagatttttatcagggctgactgcaagttcagctctgggatggggcagtgggggtagtctgctgagctggtcagactgagcttcctgattcggtcctcaggtcatttcaagggaacacattggaaagtcatctccacgttgctcttctccattgtacgcaatacaacattttaaggaacaaacaaacagtaccttcttcctcatgaacattattctgtttaacagggagccaaacgaagttgcaagagtcctcrttttcccatggtgttccatagagctgtttgtatttttaataaaaaactaataattcagaggctgcaaagcatttgtttttaaatttaaaaatgttttatagactatggaaacaaaagtttgcttcccctgcccatttgggaaacagagcactgctctcattcttaggggacagcatacacatgggtctgggatgcatggcctgctcctctggaaggaagttttgccatgggcggctggaggggcttcaaacactgagccagagagagggttaggagctgagggcttcataggaacatctgtcttttactctctctcttcatatttcaaagctctctctctctccctctctaacacacacacacacacacacacacacachctctctctctctctctctttctctctctctcggaacatctttctctctctttcttcatatttcaaagctctctctctctctctctctccctctctaacaaacacacacacacacactctctctctctctctctyggaacatctctctttccctctctctcttcatatttcaaagctctctctctctctctctctcyccctctctgtctctctccctctctaacacacacacacacacacacacwcacacwctctctctctctctctctctctctaggaacatctctctttccctctctccatgtttcaaaactctgtctctctctaactctctctctctctttctctctctgtctctctgatagatgcatacagatttggtatttaaaaacatcaactctgactgtgttcttggtttctctctaagtataagaagccaacaaggctccttgaagattccctcttttgatattagaatgatcttgaaaggagctctaaccatacccagagtaggggggctcccttaggttgaacccctagatgtgctgcagccagtggggagatgctggaagaaacagattgaatcatggacctgcccatcagggtcatctgaggagtctcactgttggtggtttcagatcttccagaagaaactctaattagctctacacaagagccagaggggttagtcaccaaagagtgattcaccccatcactctttggtgaatttaaccaaatttaaatggtgatagggaattccttttacaattccctaagaggaaatgagagaaagagttggtctttcccaagcagcatggttttcagggacttgcttctcctggtgccttctctagtcagttgccaaatcctcgtggctcaactcttctccactgctgctgtctcttttctagttcaggcttccattgctgcttgcttggactcttgcagtactcttccagctggtctcgtgactctgtcatttctgattagtcatacatcttactacccacttaaactttctaaatgttagctaattacttcvctttcctccacaaatactctttcatggctcctcattaaccaaaggaaaacaaaaagtccaaacttctcttcttggtgctcaaagatctccatcattcctccctgtgttcctgggctgcaacccacataactagtcacccctatctcctgccttatgtgggagttcattttatcttttctgctttcttgtctgtgtatcctgaaattccactcattcttcatggcctggggctaaagccaggaagcttctgtttttgatgttctaagttagaagtaacatctctctcctctaactaatgagcttccccccaaccaaagcttctaccccatttcctctctaatggcactaatcttttgtatcttctgttagggtttttggaatactagtgacatctcctagagccttgtaaagctcttatttgccttcaagtgccccccattgccagggcatggagccttgcacagggcaaatattcagcaatgttggatgaataaatgaagagtgaccaagggttgccagtggtagtcagtctttattttcaccccgcactgctatttgccctgtactcacttggactggttcctgctggtgagaaacttgctacccaggtaccacttattttaagcacatttatgcatttccaggcacgtagcaagggggcagcaggttagtgattcatgagtaggtggaaaaggtgattgccttgagagctgctgactcagccgccagccgttaaccctggtgctcctctgggccctgaatcagtgagtggatggcatgaatgaacagatggccaaggaatctcaggagacccgagtctcctggatttggactttccagcattagaggtgcacagcccagagcctcacagggaatgctagaagctgcagtataatcatggcacattttcctggagaaccagttcttcttgaaggtttgggaatgaatattattttgtattcaatcacatttgtcatgaggaggaataaaatatgcatacatattttaaaagataaaatgcaacaatttaaagaagcttcctggctggacatggtgactcatgcctgtaatacctagtgatttgggaggctgaggcaggagaattgcttgagcccaggagttcattgcatcatagtgcaatgagctatgattgcactrctgcagtccagcatgggcaacagagtgagaccctgtctctaaaaawataacaaaaataaaaagataaaatttaaaatatatataaagaaactgtctgcttgtggaaggcttgcttcaaattctaatccagactccctgaggtaggaggtaaaagtttcttcttttctgccttcagggctgtcatgggaaagtttgcaaggatctgggctagtctggcacccctctcggttgctcggttccccatcactgccttcccactccatggcttctcctctgcagggtgtagactatgatgaaggttacacttgaagagcagtgaaacagaactgggttccaatcctgccagctgcacagacaccatatctggagggtgatggggcaagggacatgctcactctccctttccagaagagataaagccatatgggcaacctgctatcactgtgaaaagtgagtggaataaattgtatagtgagtgaagtgtaagctcatggcggcagtgtaagaaacacattcttgccaggcaggcagataaccaagaaaggacaattgggaacacgtcagctgatggagatgctacccaattgtatccctatgtggagagaccctccagcaccatatcccagccacctgcgccctgccccccattggaccccctcttcactgtttgccaagctgaacattggacatgtcacatgttccctccctcagtgcctgacttactaaacagaaaatgcccagtgaaaacttaggtaagatgtcgcacagtgtttggcacttgataccttgttgctaatatggtgggraccccttccagcactgaaaaatcccgcagcacttgtggcagctcaaacagagaatgtaccagtcactggctcccctgagtttcttcagaaattgtttaaggagtgctggatccatgagggcagaggcttgtcccagtcactacactgtctctamctgctggaacaggtgcttagtatgtacgcctgctctgtgctgggcccatgactgcacaaggacagctgacttcagaggattgctcaggatcactgagaaattcatttggcaaaatattgtgaatttaatggcctcttcaatttgaaataaagccacccggctttttgaaatagagcttcctttgggagcttagaactaaattcttggcttcatagaatgccctagctgggtggacggagaatcccaacatatagatgtatctagaatgtcagaagtgaagtgatctgtctctccaaatcattggtgctagggagaaagaggtgagcatgctgtctttttaaaggattcaactaactctcagagctttggaagaaagaaaaaaaatccaaaatgtgtactaggtcagtttttatttggaagatggattttattgttatatttttaaactaggaagtctcttaccactcccattctccttccctggcctagaggggtgggagttcagatccctgcaacattttaacccaaaaagctcttacctgtttacctttctttgatagagttgccaagtggtcttggttttgttttgtttttcttttagaagagaggatctagctatgttgcctaggcttgtctcaaactcctgggctcaagcggtcctccagcttcagcctctcaagcagctaggattacaggcatgtgccgccacactcagctcaccgagcggtcttgaacaaaaaacccaaattggtccaagtatggattatacactaatgatatttatcaccatcactatcgttgtcattatcagttttattatagtgacttccagttcggtatctattgtgggtgcttggagcttttgcacatgtaatcttatttaatcctcacaccaacctaggaggaaggtattattattattgcccttttccaggtgggaaaattgaggctcggagagttgtaagtggcttgcctgatgacaaagggtgggtgagtggtagaggcaaatttgaactcagtgaagaaagagktcaggctttgctgtcagatggactgaagttcttctcttggtgtccatgggggtgccagagatgtgggggttcttctttctccttccaaatcagacgcaactgaaagtctgaggactcagcttcaatctgagctctgatttctctagagtatccaggatggaaaaggggatggtaagatgaagtttgcagggagggcttcctggaggagagggctctgaaacatgagagcattcgggcaaataggaagggcaggtattttggtggatccagaggcaggtggattcagaggtgggtggctcaagagtacgggcctccgtctcctcgtcttcctaagcatatttaactgtgaatgaagcaagacaagaggtgtatttctccatgtaagggaaatgctaygaagaaaaggcatttctggtgtcagaatcacgattgtcagtgggagtgtcaggaagaaacttcgtgactttttctctcttcccaggcgcccccagctgttaggtttcatggcaacccaatgtggtagaaggcagtttcttttccattcttgctgttagatttttatgttgtgtgaccttggggctgcmttagggcctctctgtccttcatgggtctcacctggcagaggagggggatacacagggtgatttccatagggacttacagctctaaaatgctcgagtgtatgatctaatcatgatgacacacagtcagccacagtgaaatccctgacacatctcaaatttgaactgcatctttatgagtggaaaaactgtttcctgccccacaggacattttgatttaactaggacacacctgaccctggtctgctcacagacagagagaatttgttctgtggcccaaggcctctgcctgcccctgctcccaccccaccatgggtagcagtggccacgtggtacttgaggacagcatcctggaacttgcccaggagtccgctgcatgctggctttctctcttctgcagagacgaggggcccagatcgggtcagcctctgctcagctctgcagtcttgccagggggaggaggaatcaggctggggggcagggatagagggccgtgtgcatcagggaaggaggccctgagatgacaagctccatgagtcactcaactggccgctccagccagagagcatcaaggaggggtttatgacactgcctcatgcagcagtgatcagccatgaggtggcatccatccattgtcaggggacagtccatcctcctcaggcacatgcacagaggattgggtgcagaggagttcaccctcaacacctctgggtgttgggaggcaggagagcagtggggctggaggcacagctctgccaagcattcctgaaccaaagcaagccatcaatgagtgctcacaccgtgcaggcactgtgagcctgtgtccacatgatctcatcttgtcctcagggccatgccaagaggaggcactattcttcttcttctcagtttatggatratgataatggaggcatagagaggttaagcaacttgtttgatgtcacccaacaatgctgaaatggggcaggatttggccctggccctccagagcctatgggcttaattgttgccttggtgggtcttagccttgagcctgcattagaacaacctggagggcttggccccactccagagtttctgatttcggtcaggtctgcgataggtctgagaatgtgtgtttttaataagtttccatttgaggtaaagcccagggaccacactagtctgtgctgtactgactcatcatcccgtctcagtttccaacctccraaaccagagggttgagctttctaccagttctctccagttgaccagttaacgcagaaattccagccttctaatcacccataattatgtttagttttggacaacttaatatatgagagagcaatagtacttcagtaaactcctctactgctactgggtttctgtcacttgtctcctcttatttttgacaatttgatgttttgtgttgtgaggcttcctttgtgcctaaaagtcattgacttttagatactcactttggattatctccatcaatgtgaaacctcctgtgttgccttatttaatgtcttttgccttgaatttcacttgcttggataccattgcctttaacttggcatcactccttagcttgctttttacagtttggtagagatggtgtctcactatattgccctggctggtttcaaactcctggcctcaagtgatcctgccacctcggcctcccaaagcagtgggattacaggtgtgagcctcacttgatttttgcctggcatattctggtttattcttttacttttaaccttattttgtcacttggtttagggtatatttcttataaacagtgtataattttatatatttatttattatatattattgcatatagttaatactatatataatgtgtaccacacattttgattgtaataactaatatgttttggcctttctgttttttaaaaaatgctttttgcagtcttttttgtctatctgtaatagatatttaaattttttattttatacttttctttattaaattggaatgtctacccatgctgcctctcaagtatttaaaactattgttcaaccatattttgccaatggttaatgtatagagtgaaatagcctcttactccttgccacgtaagataaataatttttcttcttttcattcccccattccataatattacactcatgcttttatggtataatctgatatttaaaacttctacttattattattatatttttcacattttatcttctcttccaataaattttagttttcattttcattttgatttgtaatcacagttgtaacaattatttaaacctaatagatcttagggttcattgccagatctttattaccatggacatctcctgttgttgaattccttgttttgattaatgtcttaattacaaatatgaaaaatttaacacctgtttaatcttcttgaacaacgtattctgctttatcgcactttgcactttgtttcttttaatatgaatgacaacttggccctgctgttgggttttgcagaggagacatcagatatcagcttgatttttctctttttttttcatagataatctgatatcttctgtttggatgctgataattcttcaccatgaaattaaaatatatgtatgtatgtgtrtatatatatgtgtgtgtgtgtgtgtgtgtrtgtgtgtgtgtgtatatatatatatatrtatacatgcctactgagcattttgactttcagacttgggtctgtcttctgtgttaagaaacttttttttgttttcgtcttttcagttaggtttattctgaattggctgcctgtcctctatatctgtcatctttttgtataatctgtcttagacctcacagtatttctgcttctgtatttttttcctcttcattttgagagtgctttctaaatgtgcccttcataacacatcttgtttcagaaataagttctcttgacttttactgcagacatagaatagatggtttctccaagttcaattatcacaatatcacacgagttgtttactgagcacagactgtcctctgtgcactgtgctaagcactttgtgtgcattacctcagaacaactccaaggggcatgtgctttgtttgtcctcattatatagattggggaaacgcatgtccagagggttgagccctactcagcctcatcygggtactgactgggggccaggactcaggtccagccagtttcacagcagagcctgtgctcttggccatgatgataatggcactttcccacccagtccttttttttttcaaatttatttattttgagtgctgcattctctaccttttatagttaagaatgttttcaaggtctggtgggaggttttcgtgttttgcatccatgaatgcagtcagtgtttgcctgtaaatagggagggtcaattctcttgggctcctctgctgtgcacctcattgcccatagaatgctactctcggatcttgcactagagcactggatgatgaagtgaagccttgcagagacctgtgagtctgggtgagtgagctggaaccatgaatagttccagaaggggaacttaatcctgtgatatttcttctctgtgtttggtaaagccactgcaccttgtgccaactgtttgcatctggcttgctgtttaacctggccaacatgccaggtacaaactgtgcttggacttgtcctccttcctggagctgccacctgctgtgtcagggacaagcccctgccctggccagttttcttctggatgtatctgccatgtgattcccagggcttctcagagctgctgctgctgctgaacactgctgtgatccatagtgaccagggagtcccggtgcctgatacttggctcacctccctgttcagccctactgatgtaggcagctctgatgtgaggttcttcaagggcctcactccttgtttcacaaccatcctgccgcttctcagggagcaaagctgcccaaggggcctccctgccttctctttttctgcataactgatttttttttttcagattcctttaggtttttggcacattgatggcacctgttcctagtttgctgagctgtggcaggttttccaggcatactggatttgttttgattttgaagcaggaatctgggcaggagggcattgcatgcctgagctcttgttgccatggtatttgtaaatggacaaatgtaaatgaagccagtggcagcatccttctccctccactgcccatgctcctgagtgtgggaattgggggacaagtcactacttcttcctgacttctcctttactcacctgcaagttagccacatcttccactttctcccttattccccacctcaaatacaaagtcctaggagaagaggactgggagcactggatttgatattgaattggagaagaccattacaacctcagattctaagattctgtgatagcatctgtcctggtgatctaagtcgggttaaactcagctctcttttaggagatcaagaggttttataatataggttgggtcccctgccagttcttcttacatatcacacagtcttagtttggggacacagtttttggaagcctgtctgcgggggttctggaactcaggggtggatgcaagaaagcagcattggttctttgtcacgaggtgagagcaacagtgtcaggaatagactctgtgagctcacccaccctcaaggggcatcgacttccagtgcatcactttcaagttcatctgtgtctggccataggcttggtcacatgctgaggtttagtgcatgaaccatcatgtctactgaggtacctgacactccagaggcattcaatatgttatgcaaatggccttcatgcccaggctaattagggagtccccattggactttgattattcataaaagacagttgataataaagccctggctgcttttgaaaattcatcaagtaagaatgcagggtttttccagtgggagctcagacaaaaagccagtggaaggacacaataggatcagtgctgaactcccatggttagttcgctctctgagatgcatgcacagacctctgcagaggccttgggcaacactggtccttttgttcgcctgggtccttttgtttgcctggtcagcagagtagagggtggtgtcctagtgaggacaaaggattcaggaagagcaaggtagtgtgggtaggggctggtaaggatggcgagtgggaagacaatgagcagagctttggagagcagagtttgaagtacttgtgggacaccaggtgaagacagccaggtgacagcaggagccaggtgtcctcaggctcttgctagtgctgtgtcctggtcaacacacttaatctagctgaacttcagttaccttacctgtatgtaaaatgaggatgttcatagctccctcacagtgatgttgagaaatcaagtaggtaaacaaacatggtatatagctttgggggcccactggtctgacagggcgctcaacctgtcctctttttttttttttttttttttttttttgagacagtgtctcgctctgtcacccaggctgcagtgcagtggcgcaatcttggctcactgcaagctttgcctccygggttcacgccattctcctgcctcagtctcccaagtagatgggactacaggcrcccgccaccacacctggctaatttttttgtatttttagtagagacggggtttcaccatgttagccagtatggtctcgatctcctgaccttgtgatatgcccatctcggcctcccaaagtgctgggattacaggcgtgagccaccgtgcccggccctgtcctctctttcttgaatggtgctccttctagagcattccttgtaacatgcatgaggtggtctcttatcttgaagacccgcacctggtgaggagggtgacagacaggattctgttgtcaaggaggtggtaggaatggagtccagggtgctgctaagggagggccaggctgtatggtcaggtgggcacagctgcatggaggatgcttcaggggctctggagaagaaatgagtgacagagctttcaaggaccaccttctaggggtggggcttccaggcctccaaggagggctctgtgtctttatcagaccgatggctgcccagaacctttggcagaggggctcagcctgccttggtgccagtgagcttccacacaggaagacttcctgaggctggtggctttccatgagcaactacagggaggaaccgcgggggtactggtggctcagtagcctctgcttcctctgagggaatggaggggtcagtccctggtgtgggggtctcttccctgtcctctgctcatcatgaggctggctttcctcttttgcccaccccttgggctgggaccagagcacagccagtcaccagtrtggtggcccagcacggcaggctgtgcctgtctgtgtacacgccagctccatgaggtggaagctttggcaatgggctcccagggagcttccccgcaggcttctcaggggaatgtrttgggagtagatgcatggagagttcgttttttctccctttcatgaatgagaaaacgggcagagaaatcacggcactcattggccgatgtttctgttggtgcagattaccaagggtgctgaagtcaaaaggagtgagccacagtcagccctctgggtggttgactgccactggggcctttagaccaggaaggtgtcgtgaccgaggtggacctggtggtgagatgcaaggtgtggcagcctgatgcggaggtagcagaagggagacaggccaagtcagggcagccggcaaggggcccatcacagagcagtgcaggcgggaggccacaaaggcctgggctggggtaacgtsggggctggaaccgggaagctccttcacacattgagcctacttcttgggactctgttccagtatattagtaatgttaggaatttcagtttggctttttaaaaagctgtttttcctttgaggaactcaaatattattggttgaattgtgtctccccaacagataatgaagtcctagccctccgtacctgtgaatgtgaccttatttggaaataaggtctttgcagatgatcaagttaagatgagatcattagcgtgggctctaacccaaaataactggtgtcatatttataaaaaggggaactttggacacagagacagacatgcacacagggagaatgcctataaagatgaaggcagagattgcggtgatgaatctgtaagccaaggaaggacaagaaaactaggagagaggcctggaacacatgtgccctcacagccctcagaaggaactgaccccaacgacatctccatgtcagacttctggcctccagacctgtgagacaatgcatttctattatttaatccaactcagtttttgatactttatgatggcagccccagcagacgaattcaccaagcttcccggatcccatttcttcactctctggaaaactgctccctctggtgtctgagaatcacacgtatgacctccctgaggggctcagggttggcaaggcctccccatctgggtggtgaaaggtgctctctgggctgcaaagaatccagacagctctgtgagcagcggctgccaattcactgacattgactgactctggggactctacccttttcatccccatgtgcccgtttgtccagcccctgcagaaacccctgtggggtctggcagtaagcgaggctgctgttccagggaatgtgtgtgctgaggctagccaggcagctgggctagcctcctcctgcacagtccttcttaggaatgtcctaagtacctattcagccctggcctgaagcaaaggaggcactgggtaatgaggactgggaccccattgctcatggtccaattggcgaaatgccagaytaagcacagatcacttttcaaagtcaaaggcaacgtggtgagtttctttggcattaaaagtcctctcccatggttatcccattctgagtagccagttgtgtatttattcacccagccctgtgttgcggttattgtcttttgagtgtttgattctatcccctttatatgactcatcagcccccagaaagcaaaggccctgtcttgttcagcctggcacaggggcagcygaaattcccacagggctcacctccttcgcctctgcctgagatgtcttatcagcgtcactctcattctgcaggggaggaaaccaagactccagggtggagtgattggctgtatgtttcacctgcagccamgcgaggcccagaagtcttccagtgctttggaggttcacaagaaatatggtgactcaactggaaccacattagaggtcagcatttaacaggtcccctcaattttcccacaagggccagtcttgtgtcctcggctatgaccatgagccactggggaaagagatgctctcttccctgcagctgcacggctcccygtgctgggttggccacacactccccacccagtgcacctccgttgattgattgacgtggtgttaaacatgtggccttttgcaggcaactctaggagggtgatgagctttgcaaatctgcccagtgcctaaaactgaaccacacacataattcactcacacgcactcgctcagttgggcktgcattctcactgccatcctgcctccaactcacgcttgacgcctcacagttctggacttctcttctaccacacrgcagtgcctgccctggctggccagtactacattcctgacctttgggttttgggtccctgggggcagcttgctgccatccgaaccaccaggccctggccctcagcgaggcttctccaagtgttctgctgccttacttctgctttcgaagcaccatgcctgtcctggggtggagtcagaagtcagaagaagaggctgattagccggggtgcccttggaggggccagggtctcctgatctgcagccagggctctgcatttaggaagccttgtcagaagcctgcaattggcattgaatctgtttagagtgctcaacctagtgccaggaactgtgggaaatctgaagacatgatcagtttccagagagtcaagacaaccagcagaggattcaggttaataaacttagacttgtgttcagctacctggttcaaatccccattcactggctttgaccacaggagaatgatttcacttctctaagcttaatttctttgtaaaatttcacaaggtattatgagcattaaatatgataatacatgcagaatgctttagtacattgcataacacattgtaggcactaatacatcttaccttacaatactctggcctctcctctccactcccatacaagcgaggactcttagacagtgcctgtcatgtgccagacatctgtaaagggatcatataagcattaactcatttaatctttacaggaactcagggaaagactgaggcacagactgasgaacttgtccatggttccaaggtgcagaaccagggttagacctagaccgtgaggctcttgcatctgtagtcttgcttagagcactacttgcaaagaagccttgggtaacttccctatacctccatttcatcatctcgaaaatctagatgatgatgataccagctaggatcctcaggaaagttccctgaacttcattaagggcttagaatgatgcctggtgcatcctcagtacagagtaaatgcagtggcttcaatargaaatacaagtacacaggtggccaacaattcaagctattagatgcagaaggccaaggaggtgatccagctctttcattatggggaatcagagcatgcagatcagcaggggctgggttatgagagatgaggagtgggctgatccaaatgagaggtcagcttgagcagaggggaggatgtgggaaggcagagagtgtggaagccatgtgttgggagcagggtctgagaacatsaggttggggacagcccacgagggaccttcattagcagtgtggattttcacctgsactctgtcrgcaagcactgaaggttgtcattagcacactggctgtcacagaccagaggggcttcccattcagtcaaatcttgctgcccatccccagtgaacggagcagtaggcagtgaggcgggaccggcagggcgtacaagatgctcgcccattccctccatttgaattgggcttgggacatcccaaggggctgctgcctgggccctgaacacatctaagggctatgggtttatggtctttcagctgctgtttatgtcacaaatgcctgtcacagaaggggcattaaaaataaccgaatggctaataccatttctcaaaataactacttgcaaagtgctttgctggggcraatggctactaaaattagactccctggtggtatatgtagggtgtgtgtgtgtgtgtgtgtgtgtgtatgacttctaaacccatttccccccagggtgaggcccacagtttgcacccttttgttctgtggccccttctgtcatagctgggtgtcccagaacagtgttcacccagtcaccccaagatgccctctttcatcctgcagtcctcagcaaattggagccactgccctacattgccctgttgtcctgctctaaggagcagaattttgaagaatcttggagggcggggtggcctcattgtagcagtggcctaattccttggtgtgccaggtaataatagcacgccgtggggggaatctcactcagcatgctgtccgaggggaaactgggccatggaacaatgtggcagccccactcaaggtgacctagtaactgagggcacggacacacgattttccaggccccagttccagatccaggctctagaactcttcagtggtctcctgggccagtcctttgggccaccaggcaaccaggtcactcaaatccaatcaactctccatccactaataatacaaaaggaaatgtgggatcttaagagcaagttaagaaaacaaagtgaatcagcactgtgggggattttggattcaggacaaacaaaacctgagagccagcgttggttttcttttagataatgacttgcacggaaagaggtggacctcagtgtctccatctttgaaatgggggaacactgagttatttagcaaccatttattgagggagtgcctgatgtgggcctggctcctacagtagggctgattagggctcctacagtaggccctggagttacaaagagtggttcaaggtaaaagcaaggtcaagatacatttacaagccagtgtgttgtctgtacgtggcagccctataaggactggggttctgtgtggtcctagagatttcsgtcctggagatgaaagactgtgagtatttacctggaatggaggcccagggaggaatgaatttccctactcctgtgagagctgtatgtaaatagactgtttctgtgttggaaagagcacaggcagagtctgtgactttaggcaaactgcctaatttcttttcaactgctaaatgtgaataagcacagcaccaacctcctaggtctattgtgaagattaaatgacataacctagtgtggtcttagcgtgttgtaggcactctacacactctatcgttagtagtagtcatattaatattaaactagcaaaaactgtttgcccaagaagttccagtaaatcattcccttcaatcagggtgatgataattttattttttagtattattaagtcattgctgtctgtaaggccatcaaagagctggagccacttgctggaatcaggctaggtcaatttctgaatgctggaatgaggttgaggggagtgaggtagaggatacatttttaaaaagtttacatgtaatcaaaccctggtcattcacatctcctgttagattcattatgggagttggatatttaagaggaatctttgccacaaattcatgtgtaaacccaataattctcgactgttaaaagtggtgggagccctagatattaggatatagggtcatttaaccccgtggttctcaaccaggcatgattttgcctcccatgagacattggcaaattggggtgggtgctgctggcatccggtgcgtagcggccagggacactgctcrtcttataatacacaggataaccctcctcaataaagagtaatctggaccaaaatgtcaacagtgccggggttgagaaactctgtcctaacctgaagatgagacaactgaccaccaggaagggggagtgacttgctgaggttaggcagcacagctgcaccagagctgggatccaaagtttgaatcaattgaccagaggccagaggccagacagaaccttgatactgtcatctcacctgtgaagtaaattatcaacctcacccatgtgaatgaggccttactctrtagtattttcaaggctctttctcttgtgatattaagctctgctttggaaaaaccaggttttcctattctgggcttgctgatagagtaaggatggtagattcagcaaatgaaaataaggttgtccaggccaggcgcggtggctcacgcctgtaatcccagcactttgggaggctgaggcaggcggatcacctgaggtcaggagttcgaggtcaacctggtcaatgtggtgaaaccctgtctctactaaaaatacaaacaaaattagccgggtatggtagcgggtgcctgtaattccagctaccagggagactaaggcaggagaattgcttgaacctgggaggcagaggttgcagtcagccaagatcgtgccactccactccagcctgggcgacaagagtgagactccatctcaaaaaaaataaataaataataaaaaataaataaataaaaagaaaataaggttgtccagttacatttgaatttcagataagcaagataggtttttggtttttagtttttagtttaagtatgccctatgcaatatttgagacatacttatgctaaaaaattatttcttgtttattctgaatttcaaatgtaactggcaccctatcttttgtctgtcagccctgtgagctctacccatcgccctgagatcacaggtaggccctggggtcatctacccctgtctgaggctcctgcaacccttatgaccccctctgcctagagggggaagatgggaaggggcaggtgggccttgagtggagcaggcattcctagctcctggcctgtgggtgcctgggaagagccggctagccacactgggctaaagggcctgtaagttgagaggttggccaaactgtccctttttataacaggagaatggtttaaatgaagtgtcagcaggtgacctatggccctggaaaaccaagtctggagaagttgtggcaactttgcccctgattggggaacagagtgtcctctgcacttctactggtttccagagaacatggctgccctggctgaggagcacttggacatggtaccttccagggctgaggtgctgtctcctcgtcaccccygggctctgggcctgccccaggggccagagttgggcggttgttcctaatacagggggaaatgatgggcagggctgtgcacccacagagctgctgctgagccggcagctcagcctttttgtttagaagaggcctagatgtggagcctatcaacagatcagaaggggatgctggctcagctgctccctcaccttgccttatcccacacccctttcacctttgcttccttaccagcccagacaccaggctccaaaccagtcagtgctcagggtccggcagccaatggcacaaggtgggtggcccactgccctgccccattccctccgcctcccaatccatggtccaggctgttgctcccaggtgtcaggatgccatcccccttccccagagcagcttcctgctagraaatctcatcctcacagctcctcctaaagggcagtcagctggccacagccacaacttggtggcctttcttcctgttggctcagaacagcctttgagggtctttgggagtaactgcttagggactcaccatgttgtctgccatcttgtcgacatcgttgggccacctaatgaccagggctggctccacctggcctttgctgcatgggtgcttattaataggcatatattgaatgaatatatgcctatattcacagagttgaggacagttaacccatattgcagaaggtgtctgatgataaaggctgaatgaagtcattggttctcaaacttgagtgggcattagcatcacctggatggccttgttaaaacrcacagtaccagcccaacctggggactcctgactttgtagttctggggtagggacaactttgcatttcttacacatccccaggtgatgttgcaggtccagggccatctctgaggaccactggcttaagctggtgcccttctcaaaatgtcttgcatttccattttacttttattaaaatattccttaattaacaatttttaaaaatcttcattgactacttactctgtcccatgcacgaaattttggggataaaaagagaaaaattgcctcaaggaactcacagtacagtgagagaattgcccatgacaaacaatgaccatttaatctaattacttttattgggatattgtgttgaaggtgcaatgggggtgtggtaaggggaatgtgcagtgttgttgggggtatccctttgagggcaagtgtgatagtgtctctctctctcttttgtattgcacttctctctctttctgtgtattgcaccaaaagtatatactttttgaagaagtatacacttctttttgtgtattacacttctgtgtggcttgttttccccagttgacttgygagatttctaaggggagaggctgaggtgaatcttggtcttcttcatttaagtgtgttccagttgacataccaggcaaccaaaaaaaaatgtattacctacagaaaagaagttcatatcaaagaagtgaatgcctaatggtggaatttcagggccaagtctgtgtgggggtttactcwtctagattctactatatgtgttgagttctagggctgagctggatggagagaaagttaggcaggacggtacctttcctggttcctaccatcaacatcgctgactgagtttatggggaacactgctggtatttcatcctgcagggattcttgaaacctgccatgagctaagacagctcattttcaagagctttaagtggtcctgagcggatgcttagctggggacttgtcatggcctgaggtgacataccctttctgcagagggagaaggcctctgaacctttctttcttcagaacctgggggactagggaggaagggaaacccctccatgacttgcctgcttggggctaggagctggaaatggagacagaggaagctgcttcttrttatgcacagggccaggagaaacccttgggctttgcccggggccagggctggcttccctgtgactttctctccacacaccctctcatcctccctggcttcaggagtgacagatagaagcagaactaagccggctgtacccatcattaataacagaaatattcaggatagctcattctcatggagagctcactgttctttgaaaataccttagattcacgaacagattgaaaagggtcaagagaggttaagaacagccaatatttatagagcttgtgctctcagccacaatttcaaagtgttctgtgtgcattacttcattgaatctttagaacaaccctggraagtggggtataattggctccattttaaagaaaacaatacctcagctatgcagtttgagtaatggtcccgagatcactccaaaaggaaaagtgtagcaccagatttggaatcaaacaggaagactccagagcctaagttcattctctgyggtcctgctctacttggtggtggggaaggggagggaggagatgaggtgaggttgaggaaagaatacttcagtgtgtgcttaatctgcctcctcctgcaccctgccctcctcctgaaggtctgtcctggccacggcagcctacattatgtcctctttccagcttctgttttgacctggtattgacatttgacttggcatggcttatcattatctctatcttgttaggattgcaacaccctagtgagcagggaatggcctccagctccctcaggctctcctaggataccttacagcagaggtcagggtagggctgataaacacttatagttgcccagagcccggtacctggtccacagctagggtgaccaaacattctagtgtgtttcagttttggcactaaactctggcattctgggaggccccacaatactggttggtcaccctatatctcatttgacaagcaaggacattggtccttgggggacacagtgtggtcccagtctcacccatggttattggtggaggctgatcccaaggcctgctctctgaccctgatccagttccctctcctcctgctgctttagaagtgagggctcagtctcctgctcttgcttgttaggtcaaaagcttttagagacagccactgtcttctctatgggctctgagatgcttcttattctcttttggagaaaagacccccacagtcaagaagctttggctgagccatccttacttacagagcttgtgctgggcaagtcttggagggtcagcctgtgttctctaggggcttgctaacagaaaggaaacggcttttcctcgaaccacagagcacagcaactcttcagacacgctcggtcagcctgcaggggcagggggtggttgccaaattctaatgatcagaaattagaaacgggaacagtgaattctagaccagcagcctccaaagtgggatgcacaaaactatcctttggaataggggaagaaaatgttaagacatctatttctatttacrtttatcactctttaaaatgattacatctgtgtgcactttattgcgtatgtaatatgagcaccatatggtgcatgatgggcatacaaatacacacgtgggagtggacactgatgggggttgctcattcagaagtgctccctatgtctccacagctgtattttaatgatcatgaggtgggctggctggaagatggtcactttcagcagaggaggttcagaagaaggagagagtgagtcttagagtaaattggcttagaacatcccttagttgatgtttaatgcagatgatgcttaagtgtttctggatggtgtgtgatttcttggagcgattttgtgcatcaggaagtgaacttcctgcagccacattttgcacatcttgttccattacttgtctaacaggatgctcacattagcttgtgggtgacaagaggcaggctagacagagcagaggttctcaaagtggagttttcatatcagcagtaagagcctcacttgggaasttgttggcgatgcagattcttaggcttgctttcagccccactgacttagcgactctttgggtggggcccagcatgtcttgtttggaccatttgtccaggtgatgctgatgataggcaagattgagaaccatggagatacacaggcaggggcacacagtttgaatcctggttctgctcctgctgcttctgtggcctgggacaagtgactgatggcccagagccttgatttccccatctgacaaatgagagtgataacacctctctcctggcattagtatgaggattaaaataggagacaactgatgtaaagtgcttagcactgtgcagagcacaaggagttactgcatatctagcctcagttgtgatttttaccattaattggattatgatgggggacggcaacttctataaggaggtggcacagaaatgtctgatttctccttccttctttcagtagctctgtgaccttgggcacatcattttccttgcctataagatgtagataacgacacccacgtaacgggataagtgaatggaggtgcctgcagtgctttgcactttgtaaaacaccaactgaataggagaagtttctagagagctctttactgaggctgcttctactttgtcctttctggaaaatacttcccctctgcccaaatagtaaatgagagaggagaaaaaagccagaaatcccacggtgccagacttgcaggcacaaagagcctttgcaccgtaggtgactttgtttcctgagtgccatttttggcccctcccaccctggtcctcctagatcctggcctcagcttacttcccctgtggttccatgttgattccttattaaaatgtcacctgcaagtcatgaaaactcagtgtggtttcctgaaagaggaggggcagtgattgtccagagtgttcttttgtcacgatgagaattgcttgggcgacagtgtcaagacagcaaataaattgcctcctccccttcaatgtctcagtgctgtttttgcagcatgaatggttccagtgtggagataatccttgmtcatcttttcaccaggttcttgaatgtggaaaatgggcaaacagttctccctcaccacacactcctgttatttccagtgtcccgtggccatacacccatcagcagagaggcctggagtggcaagcaggggtggctggaagtctgctctcttctcatgagagtactgagggcccagtgaggtgtctgtagagcaagatagagccaggtgatcggggaagagagccctccaccccagttttcccaggaggcgacaggccccatctctggggggagtggcgcatgcctttctcctcgtcacctgccccgatgagccccacatggatgaagtgagagcctgtgtcaccaccccggctcctcaggaggctggtgatgaatagggatggcaggaaaaaggagctgggctctgctgtgacatgtctctatttttccagaaaactgccggatgtccttcccttgtaaaagttgaagagaacagaggagaggagaagggtcggagcagagagatttctgatatgctgttagtggcgctgccaattaaaaagaaattaaaacagaaatctccgtgggctgctggagtgaaaaagtctcctctcctggcccctctaaacccttgaacaaattaattggttggatgttgactgggtaccagtgaaattcttagatattaggtcttgttctatggtaggcacagaagaacaaggggtgtgtgtgtgtgtgtgtgtgtgtgtgtgtgtgtgtkgtatgtgagagagagagagagaagagaggaaggatgggggagagaagaagggaaggagggagaaagggaaggaggaaaggagggaaggagagcaagagagagacttgggggcatcggggtgggttggagcagttcagggattgaaatcatgctgcatgacatttgggcattttggggtagctgagacaaaaactgctggaatttcattttgaagataagaaaaggactaggaaagagagcttctttaggccagaggagaacagattgaggctgtgaaggactcttggctcccagctcttcttgttctctgtggactttcaagcttctgcagggagacagtgaactgggaggaatatgtagtgactgtgaaggwtacatgtggctggaaggggcaggcaaaaggtcccaaatggccctgtggtgctttagttggcagagagatggacaagttgatcctgcccttatgccgtctcatgcatttgtccaaaagctttgtttctgctgcgtggtcagagacagaaggaggaggctgcctccccttcctgggacctggatgttttggttcatctgggttcctttctgattttgtgatgccctaagcctcctgtccccacagcccttctttcctttttgtagattctcttgcaaacttacaaagyrtctgtaacctttggccctgggacccagcatgagcagcttactggagtcaggacagatgcacgtgggtgctgrgcagagccctgtggrgcctcggcctctggcctccttggccagctgctgccctgtcccagggacagtgtggcttcccagggagcacttcactccaatctctgagccataaaaaattaaactacagggctatcaaatatttaatctgcctgaataatgaacatgggcagattcttatgaattctttgctttgattaaataaaattgaaggatgggaactgtctgcttggcacgttagctgaaggcaatgcagggtaggcactttgtgccagggatctggccctgagtctggaagaaccatttggttcatgtttcctcacccactgtctatacttcagttgtggatagccctctggtctttattcttcttacctgtaaaatggggataataatgataatactacctcacttacaagattaactatgagatttatatcaaaagcctagtacctggcacctgttagtttctttcttttttttttttttgagacagagtytctctctgttgcccaggctacagtgcagtggtgcgatctcggctcactgcaagctctgcctccagggttcacgccattctcctgtctcagcctcccaagtagctgggactacaggggcctgccaccatgcccagctaatttttctatatttttagtagagatgggctttcacygtgttcaccaggatggtctcgatctcctgaccttgtgatccgcccgtctcggcctcccaaagtgctgggattataggcgtgagccatcgtgcctggccaggcacctgttagtttctaaacaattgttaatatcattcattactttatttctaaaacagcatgattgaattgagcatttccttggacttggaaaggtatgattttggaggagggtgaacctgtgtaggctgttgcagggagttccttgacattatcaactgaccagtccatcaacaaatttatttgttcatttatttattaattcaaggatgttgggtccatttttcagttagactctggaaagataagtgattggtcctatcccttaagggaaatatgctttcaytggagaaataacatgtacacgctgtgtgtatgtgtgtgtgtgcacgcgtgtgtatgtgcatacacatgtgtatcttttttttttttttgagatggagtctcactctgttgcccaggctggagtgcagtggcatgatctcagctcactggaacctcccccttccaggttcgagattctcctgccttagcctcccaagtagctgggattacaggcgcccgccactacctccggctattttttttttttttttgtatttttagtagagacaggatttcaccatgttggccaggctggtctcgaactcctgacctcaggtgatctgcccacctccgcctcccaaagtgctgggattacaggtgtgagccaccgtgcccggctgcacgtgtgtgtctttatgtgttcaccctatggggagagaaaaggttcatgaaagttgagattactgtgggtagggttgtcagggagggctttgccgggagggggaagctgcgctaggcaagctgtggctccagagtcttggaggcgcctgtaacagtccctgcggtttcaaaagaattcagagaggggagccatagcctggtctccaaatgtgcagcaccttctgggcaagcttagacttaaaggatatcattgtagataatgatttgcttatttcttgctctaggatatggggactgtttctttttttctgggatgctttaataggatagtaaaagtaaacgtgtccctgtctgatggcccttggctcagctggaagaagatcagctctgctgcaatttaggaagagataactggggtccatcacgtggctggttcagaccagggttttatgactgggatttgcctgctggagccctgggtcactgtgccagactcaaccacaggtcacaatctggaactggatccttgctgccagatgggaggcgggcagggccagccctatgctgtcattggcctgtagccagctcaggtctggtggcaagtgaaggacacatcctgatgtctgagtgccctgcaatttattggcttgtggtttaggggtgtgggggacaaacaccaatgccacagttgacatatatgggcgtcgtatttggtggggtcaagagtccggagggaggcgcatccagcttctgtcttggctgcaggccaggtctgcccatgagacggttctcctccttaacctattcaatccaataatcgatgagcaggtattttctgagatctgaagtgtcaagtactgaagacatcaccaggcttggctccgtgggacacacaaggaattataaagcaggaccccctcatccccctcaggagctaacagtccaattgagggaagcaagagagacagacgcacgtgaaaggttaaacaacttgtcctagcctgaaagacaagacccgtgggaaacaattcaggaaatgtcaccaggcagcatcttcttagtgctgcaaagatctggaggaacgaatgaccagccggggcacaggggygagggcttaggcttctggggtccggttacaaactgtgacaccttggccacctgggtttacctgtgtgagtcctggtctctatatccctcagatgggcacagtaagacctgcctcagagacatggggaggatttaatgrgacaatgtgtatagcacattgcctgacgaaggggaaaaacctcactgtgatagttaatttattgtcattggctgcaggggccagagagtctttggggaggctctgckggtaaaggctgagcctagccttgtattgctcatcttttggataaggtaaggatggaacctttgtgaagaggaagactggacacctcctgcccyctcccactgtggtttgagtggattttatccmgcatctgttgtttgcctggcattggatggccctccacaccagagagctaatgcctgccttcatcactagtgtctctgtctctttgtttcatcagcttctttatgtgaaaagagagaaatgatctctgtctctttccaaatcccagcaaggctgaataatatctgtggatattcttttctatttcttaataccctcgcattgcttatgaaaatcctatgggcacattgtaaattatctgcaaaaaacagcagagtgcaaagaagcagaaataaaacctcccataatcacaacagaaacatctactactgttcatgattygttttattttcccccaaatatattactgtgcatttttctttataatgccgagatcctagaatatgtgcgatttagtgttctgcttttcttcttaacrttacgttatcagcatttccaagtgacactgggactctataaacatattttaaatgactatatcttatatggatgctcactccttttccttatatttgctctttactttttcctcttttttgctattataaatagcattgtactgaaatccttctgcagggttatgtacattacctcattggtttatttatttaacagactttgagtatctacaatgtgcaatacaatgtgcttttagttctgagaggaaaccatctgaaatagcaaaaagagacataaatgaaatacctcacatgtagagttttgtgatactcttttttatagtaagtatacctggcttggagtaacactgtgggccggttaattgttctgggcctgaatttctgcatctttagtcactagatggtttctaagctgcctcttgtctccagcactctgtggtcctgactgcaaatgtaagaatcaccgtagcattcatctatccttgtgactcactagggctgtttgtgtttggagcattcctggtgcacagatgatgtgttgatggacttggacacagtctgttctcttcccctctcagtcatgagcagagcgttcatctgctcagtgcttctttttaataagtagttcaggggttgactgcagctcagctctgttgggaattaacacagacataatagacttttataaaagtgtgagcagagcaactaagccagtacagactctttgccacatcctgacatgctaagagagaggtcccctttaaaacgcaagcagggtaaatattagaaaaatggyaagaattcatagagcataaagctcataataaactcagagaatgcattgtcctgagaagtggtaaaggaaggaagtggaatagacttcaacaaaatggcatagaattaacggcagagggtatcatgtacctgcagggtatttgaaccgggtgattttgtgtggcagtgcccgggatccacagaccctaatgacacccaaatttgtgaggcattcttctcagtttataaagaacatgactgagaccacctagcacatttaaccgggtctgaaggaccagctaatttcctaaaaatagcagtttcttgctgggcatatgtcttaggctttgctggctctaagaacttaatattaacaattcacacagaaggaatcgtgttcagggcattgaccaatactcagctcacctttgaatggccagaggacacagctctaaagaaaggtgtgcaacaaggagtgtggttgagtgggcatgttatcttcctaggtcacaagtaacaaagtgccactccccaactccatattcataacagacatccataatctatcaggatgttctttctagccaagccaagatgcaacttcaggatcttttttaacacagtgctccaggcagccactaccacacagatggggttcatttgctcctggaataaaaccttgtcatccctagacatagaggcagtctttcccctgtgagccacagcatatgagaaaatgtcaccatctagaaggttccttggtaagcacagacatatggtggcctgataaattgcctttctctacccttgggatctttgtccaaggaactaggtgccatcttgagtcagactggcaagtgtgggaaaatagaattcttattcctatcagccaacagaatcttcagtgtttcgtgttatgataaggagttacactgcagacatttctcagagggtctgttcctgtgttttatcatgttttccatggcaacccctgtgggatccacgaagttggtattatctccatggcacagatgatggaggcccaaggaagacaaatgaccggcaggaggcaagtcatgcagctaagagcttttcctggaatccaggtgtcctgccttcagatgccagttctcttgctggttttcgtttttgtttttctaaaaatgttttcacctgtcaagtatgtgctactatgaattctggragggtagggtcgtgtcttatttatttctgtgtttttgactgcttttcctctccaatctcaagtgctgtgactaacacataggaagtactcaagaaaatatttatggcatataagtcagtagaaaatccattcattcattcattcatggaagaaacaaggaggtgccccgacctcttttgcatgctggcctttccaagtctgcactgggattgtgccctgagctttcatcataagagcagggttctggctgtgaggcttacctgggcacatgcacctgagcagcagacgatgacattatcagtccactggagacattttcttcctcataaaaaggctagtcattaaatccttatttgcagcctgtgacagcaggagccaaaagcctctgacccgctcaggacctggggttagagctgcatggaccctgaagagagggatccctgtgctaaggccttcggacagtggccctgaccgagcagcasagggaagagggcttagggagcgggaagcaccaatgctgggcttgcaaagggcagagcagcaggagagaggctggcataggagggaggagggctcacaggagtgggaggtggattggatttagggccatcaggaggggtgggaggccaaacagctcagctccccagtccctttctggggccatctttgttttctgatttataatgtgtcccctttgcggatggccttttgacatgtgctaattataaattgtcctttggtgcattccgagagttctaataattagaatttctaattccagtcctctgagctgctcccagcagcctcatcctgtgagaggagcttgactcatttgctctcctgctcaaagtcgctggaggaggccagcaccgtgcggcctggaggaagtatccaggtttgggggtasgggtggaacttctttctgcaacccaatacagataacccagaagacccttctctttgtggttgtggtttgtgttgaagaggaagattttgaagtcaaattgacagggcaggatggtctatgaaaaagaaccctggactctggttttagtccagccagagcctcactgtgagaccctgagcaaggagatctttagacctcagtttccttggcataaatccaaaggaatcagatctgtgattgccaagggcccttccagttctgagattatttgaatctgtgaaatgtgcatatggcgtgttctgggtggaagtcctcaggtcatgttttgaccctgcttgtactggctacaggactttgtttgcaggccatgtgataacaagatattaagtgactttgttaaaggtcaaagtaagaacccaagccttgtgcttttttttacactgccttattttcatcattaatctccccttgccttggtttcttcatctgtaaaatgggaataataatacctgggagattgtattggtgaaagctctatgtaaaatgcagaccactaagcgtgtgtaaggatcttmatttcacttctagcctttgggagatgcaagttacratttctcccctgcctccttcagcacgaaaccacaatcctaaagcatctttaggactgtatagtaatgtggcacctaggtttgtggtggggagaagacaggcactccggccccaactctgaagacccaccttgccttgcccagggagttgccccttggggaatctgataaatgtagatgtcagtcttgagaagccactgggcacccacctgtccttgtcctctttcgtaatggtgagcatgcttggcatagtgtagactttcactggtacacaacacgtgcactcctattatctcatttacagatgcccgggagggggacaagttgaggcacttagcaaatagagcagctgggacaggaacgaaagctcctagctccaggaaagagtcaagcagcctcctgacatcacccacacctctgtgtgctccttctgcagttgtcccactctgtcctccagggcttctcccttctaggctcatgatctgaggctgccccttgctacccmggggcaaaattgttagtcctggaaggctctttaaaggtcattgtgggccaggtgtttcagttaactgatgataggatgggggccaacataattgaatagttcccaagactgagcagcttgctcaggtagcctggctaaacccaccagctctcccggccaggccaatgtcctttctctgacaccctattgcttttctttccttacattctctcagggagtcatatacaatgacagagaagtccagggctctgtgttgtttggctgtccagtctttgggagagagagaaaaaaaaaagaatgtggaacctccagacagggcacaccctaccgcgccccatgtgagtttcctgaggtgctgtaacaaaggaccatcgcctgggtggctcacacaaccgacagttaccttctcaccctgctagaggctgtaagtctgaggtcaaggtgccagcaggattggtttcctccgaggcctctctccttggctcttgtagatggccgccttgttttccctgtatcttcacatggtcttttttctgtccatgtcctaatctcctgttcttataaagacatcagtcctgttggatgaaggcccaccctaatgacctcatttaaccataatcacctgttcaaagaccctgtcaccaagtacagccacattctgaggtcctggggattaggatatgaacatgtggatttgcagggaaccaattcagtccgtaacactctctctcacatcatgccgtgtgtgatttacatgtctttgctgtgtgtctggctcttgtagactttgcgttttcacccctgtcttcctgttggaagtcttggtgaatgatcaagggagaatgtaggccccagaatggaaggagtgtctcagggacattagagagagggaagcagagagactgcccacccacccttcatcattgtgactgctctaaggaccggccctgggtgaggcggaggaggagcgcacctgttcagaacgcagygaggctgagcggggagctagctggcagtccttctagggagtgtagctgattaaaataattatattaactggccctcaaagagacttatttatagccatggtgacacgttattaaggatctaatttggatcaggactctgggaatcttatttttaggcccagaagagagccctgcaggcaggtgaccaggaggtctcagatggctgtgtattcactctgtcgagtcagggattctcaaggtgggaggcaattggaaaggtcgcactggcccacccttcccccgatgtctgtccccctgctccagtgtcccactgagagaccatccacctcttcttaaatgcctcctgtgccagggagcctgtttccatccacggaggcccctcctatcttgtgaaagtcaggctctactgaaaagcaagagagagatttctctctaaatcttctgtctggtggttctggtctccccctggggatggacagaatacatctgaccactgggccactctcttcaggcccttgaagacagggctaaagctcttcttggcctccactgctccaggctggggcccccagttcatcagcccccctcaggagataattgcaagagccttcactgctccgtttctcagaggatgtgagtgttcagttctgcggtccagcaactcctccaatgcctgcctcctggggatagctgtaattctgggttgagatgaaagttggccagttgaagtcaactggcstttggttgagggcctatggtgaaaacagacttcatctaaaaagaactcagtcagcaggcacctgcactttggaatcagggaggagaaagatggagactaggaactgacagargggttttcctygtgtgaagggcagcaccaggccatgaggtgacccagggcaggccacagccrtggagggttagggtacagcaccctggtgggtggccccgctgggaagtgcacatttgggttttggtttgccaaactcaccctgcccaatcctagtacgagcccaccatgaatgtcagacagcatagagtaagtgcacctggagcccatcctgagcccttgagctaatgtcttcactcctstgatctctgggttccacctgcctcctttgttgtttgaagggtggaacggactgatgcctatgaataaacacaagctccagygctctccacagatgtcacagatgaaagactaaaagctgcttctgcacgcacagatatttatattgtagtgccaaacaacaacagaataaaaagaaataatttttagatgtgggaaaatcagactctagaagatgttttataggagctatcatggtaggatggggctaattttccaaatgcctattttcctctgcttccttttaaagttctctctctttttatttttttattaaagcaaggaaataaacagtatgtgtgtgtggtgtgtgtatgtgtatgtgtgatgtgtgtttagtatgtatgctctctgtgtgtgtgtgatgtgtgtgtgacgtgcatagtgtgcctaggtgtgctatgtgtatgtgtctgtgtctgtgmtgtttgtatagtgtgtgtgtagtatgtgtgtgtggtgtgtgtatgtgtatatgtgatgtgtgtttagtatgtacgctctctgtgtgtgtgtgatgtgtgtgtgacatgtgcatagtgtgcctaggtgtgctatgtgtatgtgtctgtgtctatgtgatgtatgtatagtgtgtgtgtagtgtgtgtgtgtgtggtgtatttgtgtggtgtgtatgtgggcagtgaatatataatatatgtgtgatatgtgtggtatgtagtgtgtgcagaatgcgtggtgtgtgggtatttatgtggtgtgtgtgtgtggtatgtgtatggtgcatgtgtgtatgtggtacatgtatgtgaatatgtgtcatgtgtatgtgtgtgtggtgtgtgtatgtggcattatgtgtgtgtgatgtgtagtgtgtggtgtatgtatggtgtatgtggtgtgtatatatatatggtgtgtgtatagtgtgtgtataccacttgtatgtttatgtgtgtgtatatatgtgtgatgtgtgtatagtgtgtacatgcgttgtgtataatgtgtgtatagtatgtgtgtgctgcgtgtatatttgttgggtgtgtgtatatgtgtggtatgtacgtggatggtgtgtggacaatgcgtgtatgtgtgttatgtgtgtatgtgtgatatgtgtatataatgtgtatgtgtgtatagtgtgtgtggtgtgtgtgtgtagtgtgtgatgtgtctatatgtgttgggtgtgtattatgtatgtatatgtatagtgtgtgtggtgtgtgtgtgtgacctgtggtatttggtatggagtgtgtacagtgtatggtgtgtgtgtagtgtgtgctgtgtgtatgtgtatggtgtgtggtgtatggtgtgaagtgtgtgtgtagcatgtattgtgttacgtgtgtggtgcatggtgtgtgtgtagtgtgagttgcattgtgtgtggtgcttggtgtgtgtatgtgtgatgtgtgttatgtggagtgtgaggaaagtactgggtgatgggtacatgtgaagtgttgggggtagagggtgagttttgtaagtgcgcactgagtaagggggggtggggtaaatggggggaggagaattgggggttggatgtgcgttgtgtgggtaagggaaagttgagtatgggggaaaagggggggagnnnnnnnnnnnnnnnnnnnnnnnnnnnnnnnnnnnnnnnnnnnnnnnnnnnnnnnnnnnnnnnnnnnnnnnnnnnnnnnnnnnnnnnnnnnnnnnnnnnnnnnnnnnnnnnnnnnnnnnnnnnnnnnnnnnnnnnnnnnnnnnnnnnnnnnnnnnnnnnnnnnnnnnnnnnnnnnnnnnnnnnnnnnnnnnnnnnnnnnnnnnnnnnnnnnnnnnnnnnnnnnnnnnnnnnnnnnnnnnnnnnnnnnnnnnnnnnnnnnnnnntgtgttgtatatgtgttgtgtgtgtagtatgagttgtgttatgtatgtggtgtgcagtgtgtagtgtgtgttgtgttacatgtgtgttgtgtggtgtgtgtatggtgtgcgtctatccattggatgagccgggctgcctctctgagggcaggaggccctcttgcctgcttcattccccaccccggttttctcctcactgcctcagctggcatagttgtgcttgatttagctcaaggaacaaagtaagagaatccaagtttttggacaaaacaaatgcctagaaattgtgcttctaaagaagtagtttttgatggctcttgtagagaaaccctggttgcttgaaatgaggtgagagtttcccaagttagaccccagtaagatggcggagcctgcacacaggctttaaaaatgattaaattactcgttcagtatgatcaggattatggtcaagtgccttctttctgctcttctgtctgacttgcagctaaaaataaaagtcaggaattagattcttctttttcttctccactgaagagcaccctttgtggtcgctggcgctggttaggaggagatcccctgcccagagccctcatgtggggacaggatcttccggcagcactgggtgttcaaggtagggtgccgggcctttggtttacatttctggatgaagctcttctgctgccctaccctccctctgtctgaggccacccggagtcttccctttgcggcacacagtaagcagctttagtgacacgtttccgggcctcacctcctcagtttgctgagtctccattacatctgtggcaccgtttaagcagcccataatcatttgtggggtaaattaatacagtacatgtctcaggccctcccccaggattggcatagggaactgagaattccacctgtttccctttcctggatccttgcagttggtgaccagtggagaagatggccctggggtttcctcctcagccccaaattcctacatccctccaaaagaacctcagagagcaaaggcagccggacgcatccgaccctggcctccttctcaccactgctgacagaaggagcagaatcttggcagcattgttaggtcttcatctgctattagctgattaaaaagttaaaaaaaaaaatctgtatccctgggtagcccagcctgttccttgctgcagttgaagactgaccgaggagctatcagcggcttcccggccactgtggtgccatttttggcctcaaacccaytgtgaattgctatcttttcccccagccatcagccggaagatccattaacaaattaaaattccctctagagtcagaatggctttggtttctgggttctaaatgaccttgattttaattaccatgccatacaggtttggaagaagacaccatcactgaatccctggctccttgctgaggcagcagagagctggggtattcagtttggccacacttctgggcttgtgggtgatacctctgaagtccttattggtttctaaaggtctttgtgccactcccagtttctcagtcagctgccagtgagttcacacacctctgagaactcttccaggacccccagtaagcttgctctaggccccaaggagtcccctctggcaaccgttatattcagggacccttctcaagacaaatttcttgaggagacacagttctggcgctgccctctaaacgctgtgttttccttaggtggccaggcaaactgtccagagtggtgtctgctcttcacctcatcttgaaggtggacgtcttgaccagaaatcctccttctccaataaactggaaggagaggcttctaatttctgtaatgtggggacttggatggcgtgtggatctctaactgcatcctaagttgtctaatattgataaaccaaggagtagcggggttcctattgtggcctttgaaggtattgggtggagagaacacaggatgggcaggcgggtcctacaacagtcagcaaagtacatggctagagcaaaagaaaccttatgcaagtgcagatttgggactcaaaccattcaaccttaaggtgcttggggcgaagtggtcggggagggtggtggggattgtgaagtgtgtgacttgtctgcagaatttactgttctctgctttcattataagcctyttttctcacacagaagagtaagatgaagcatgcagagaccaggttgggttaagactctgtactaatcacaagtagtgcaagaaacattkgctggacacctactgagtgctgggaactgggtactcaacacatctctgtgaggaagggactattatcatttctattttcttgatgaggaaagggaggcactgtattagtttgctaggcctgctgtgacaaagtactacaggccaggtggcttacacaacagaaattaattttcttacagttctagaggccagaagtctgagatcaaggtgttggcagggctggttccttctctgggttgtgaaggaaggatcggttccaggactctctcattgccttgtggaagactgccttcttctccctgtgtatgtatcatctccctcctgtatatgtctgtgtcctaatttcctcttcttctaaggacaccagtcatattgcattaggacccaccctaatgacctcattttaattttatcacatctttgaataccctgtctctgaatacatcccattctgaggtactgggcattaggacttcaatgtgaatttttggtggggaacataaatcagcccttaataggcacagaggggctaagtaacttgtgtgtagacacagagctataggagaagatggcaggcattctgactccagaatcccctggttctgacagaatcccctgacagttctgacagttcgagaccagcccggcccacatggtgaaacccygtctctaccaaaaatacaaaaattagccaggcatggttgtgcacatctgtagtcccagctacttgggaggctgaggcacaagaatcactggaacccgggaggcggagtctgcaataagccaagatcgcaccactgcactccagcctgggcgacagagtgagactctgtgtcaaaaaatttaaaaataaataaaaataaaaataaaaacaaggaaacaatatgattgtactattcaaaggataatacttaatttgcaaacttcatattaattcctagtgtactaccagaatgagatctggtaacaggataaaagtttaaatcagatgatcaatgccatattttttccttccatgaatacatctccaggaatgtgtacataacctaatcaggaatagcttcaaggtcaaaattcgtggtccctgtgaatgtagaactcggcgagtggccaagtggccctgctgtgcctccctgcccttttggagcagcctttcagaaacttctggactctctgaccactgtcctctctcaagtctggaaacttgggaactaaccttgacctcgagttggctttccctaggggcaaatgcaggcgctggtggaaaaggctatggcctttatagtctctggcagctctgtgtgtccacacaactgtgatgctgtgacatagagttctgccactggattctatgactgaggatgaagtccaactaaattgccatgtctggaaccctgttggatcatcgcactggcaccctggagtcccttgggatcccctattcgctcagcattacatctgctgagcactgctcagtcaacattagtgaagacaactgcttcggagacggactttccatcatcaaaaaatgcaaccaacagagagcttgattaaagtgtagttatttggtgtgaaacatgtcctgccaacagtgtggcagtacagncatgaattaagatgaaaactgacacagtcactgagtctcagcctctgagaagcagctgcaatgtaagagttttttwaaaaacyggtgaatctataaggccaagagccaggagaggtgatggtgcacatcaaatggaggtggcaatggctttatgacatggtgcccttcacagtctggcctagaagtcaccttaagatcacaggctaggctctgcgttcctctagctrgatttttcctagcacaggggtctggctttcttttttcttttctctactttttctttttttccttctcctcttccttttcctctcctcccctttcccccctccctcccttttttctttctttcaggtcctgtctatctgattgcaacttcactgcctctagggctttcaaatcaaaggtgataacctgcctccctcatggacatcagcatcccacgtgacagaacaggcaagccctcagttctgtgaagggtggtcacagcagacggaaatgtcctgcacaggaggcttgtttgctcatattctcccctccttacctttctggctccttactctctcactagagctacattcagcctgtctcttgcatcagtctttctgtgactattgaagccttcaatggttgattatataatgcagtgaactcatttcttgtagttgattacaatttaacatatatgtaatatgtagtatttgtttgtgtacttgattggcctttgtctctcactagagaataagctctttgaggacaggaatccttyctgcctatttcactattgcactccagagctcatgcagtaggttctcaatgcatgtttgttgaaagactgagtgagcatcgtttgggctctctaaccatcctctgagatacatgggtggctgtgtcaattgggctttggagatgaagaagcagctagccagcagatgatgcaggcctgggctttcttagcacagtgtgtttggctcaagaggaccacagtgatatcagttactcccctgcccacagggagcttgctctctagttagggagaccaggcgaagtgaggsagagtgggtgtggagagtccatgctaggcactsaggatcgaggagtgagggcagccaggcttcagaggggcagagaggtctgggccaggaagaggtggatgcagccctgggcctcatggtctatttttgccttagttcctgatgctcccgccaagggtatgcccttgctgggcatcctacttcctgcccactgagctcctgccaggaacactttcttgggatggtcccattttctgccaagggtggatttggatctcttctttccctcttagcatcccatgggtgtctccataggctgaggcaggttgtggactgcccagccccgggaagcgtcacacatctagaccaccatatgggcagtgcctcctgaagctgtgcaatggagcagccttgggctgaaggatggaattgggaatctggcttggactggttcaccctcttaatgtaatgtataaaggaagagaatattcctagggagaggctacccctcgaccagtttttctagtctatgttggagggagcccacactcattaaatgcctgctgtttgccaggtgccgatagggtgctttgtatatgttaaccttattcaatcctcttgatagccctctgacactggcattgttattatccccattttgcagatgagaaagctgtggttcagtatgtttaaatggctcacccaaggcagayacagctagtgagtggcagcatccagaatcaaactcaggctgttctaactccaaaactctgagtatttctgtaataccagaattccttttaagacctgggaaaagcccagcagccccaggaggtgccatcctggagccagaaggagggaccagcaaagttgccttaccatttgcattaaaacaccctccatagctgtagactgactggtgcccctgggtctgcaggtaccagctttgcacttagttgaatctccagccttaagtgtccttcccaaagcccagggaaggcaacgcagtttgctgcagggatcgtggcctatgcaaaggcctcattgccacgctcagcatcatcagagactgtatgtttggtctctggatggaggccgagagggactcaggcctggccgtctcagaacttaatacttgagttaccgagtgtgtgtgtgttttattttggggtgtgcttaagtctctcatctatttttgttttagaattttggctattcctttgttacctacccaagttgatttatacacggccgtcgtcctgtgcagaaggcaggtaattggccacttcagccctgggctaatggagggaagcaattcatttgatgaaacaagttaagcaataatttagaaactttctatctgaacccttgtgatatcatatcctcccagatttatcctcttaactctgtccaactcaggcaatagtcagaatgtcttttcccttcctgtcctcacaccagtctgggtcagctgtcaaggacgtgggcaccttgaggtacttaaaagagtttctcttagagggccgggagcctggcttcccgtcctggccctgtttctcactggctgtgtgactctgacccactcacttaacctctctgagccccagaagccacatttctcaagtgcagtagtgatattgaatgtcccaaaggcaatgggtaacaccagaccagggatttccagatgaaatgctctggcttacttagcatgactcagacccgctgcttccccattagcaagaggctgctttataattttttttttttaatggagagatatcaargcttaaaatgacattaagaagtcttcttcctgactgcagtgtgtccttcaaggatcatctccccatctacctctctgtgtactaatgactccaagaaagcggaagggggcagcctggtagaaaatggaaacrtttttctgtaaaggccctcccatgcttccgaggcctgcagatgaagggtctgacttgagcctctsagaacccaggagaaagaaacaagcctcactcatcctgtagcccagaggaagaaattctagcacccagagaggtcaagcaagtcctgcaaaaccacacagcaatttgatagcaatagctggaccaggaactcagggattttgactcctaatcttgtgcttctcaaactttagtgtgcacaggaaatctgaggatcttgtggcaatgtatattcgggaggtctaggrtggggtctgagattctgtttttctgatgagagccctggtgatgcagatgccgctggtctctggagcttacttggaatagcaaggggctccagaaagctgggaggctggggtctttgcagcccaatctaggagggagtagcccttccagctcctgtcgcctgtcccacttcctgttactaatttgcatgttgcctcctttctttccctcatgctcctaaggcctgggcactcccttctctgccaccccctatgcttccccagcccattttctctggttccgtcttgctcagcctttaagtaaacagcacttctcagctgggttgcatgaggcctcctggctcaggagtctgctgctctgggctcacagtccctgttccatggagatttgagtgcctgaattaactccctcttggagcaataaaccaccctgagtgctaacctagtttgtatttttagcgtgtgctccatcaattacttaacttgcagagcggctcctctctgctcatcagggaggtgccaccaaagaatgttcttcctcaggcttattgagttgcccctctccttggtcccacctcctgtgaggtcagagtcctttctccttgatgctgtatccttggtatttaggaggcaaaggttattcaccccgttttatagaagcagaggaaacactgaggtccagatagggtgacaacacagtacagtgtgatggtgccaagaagcaggtctcctaagcccttcaccttcccactgtggggaggtaacaaatgatggtgggtggtatcttcccaggctacgcagggccaggaggctctctctgagccagttttgcaagatagtgatatgaagggaagcaggtgggggccatgcactgtgttacctcaggtagaagtgagctcctcactgtggtttttacttgtaaagtccagccagaaaacctacatgctgggagaatggggccaggaccactttagtcagtggtttcttccaccttctccccaccccaggaggaccttcagccatccctagataagtcaagacttggtttgagtttcatcgaggtttctcccacctctggcagaggcatggatcagcaacactccaccaagaggccagcaagatgctggctgtttcccaagctgggatggggtgaragagtatggcttggaaactcagaggtgatagaggcagcaccggcttcctgagccaagctctccccatggacccaaggcccaggcatgagacgacttcattcatccgtccattgaggaaacgtgagcactagttgtgttcaagacaccaggcagatgctgtgggtgggcgggactctctcccgggggagagcccaggrcacagtccctttcccagggaccttacatcttccagggaaagctcccatgtctgtctgtaaaggtaaaagctaaaaacatcacacagtgtgtaagtgcatgtgtgagggtgtgtgtgtttatccrtgtgtgcataggtatataagggtctctgtgagcacatgagcatctatagatgtgtgtatgtttacgtgtatgtatgtttacatgtctgtgtgtatgcatgtgtatttatatgtctatttgagtgcatacatttgtgtttgtttgtaaatatatgtgtttttacgtctaagtgtgtgtgtgcacatgtatgcatttgtttctccatgcatatatgtatttaagtgtatatatgtttctgtgtatgtgtgtgtgtgctcatgtgtgtatgtgttagcatcagtgtgggtatacatgtgtatatttgtgtttaggtgtgtgcatctatctgagtatatgtgctgtgtgtatttatgttagtgtgcatgtgtctgtgtgcctgtttcattgtgtgcatgcgtgtatgtgtgtgcatgtatgtgtttatgttagtgtgtgcatgtttctgtgtgtgtccgtgtccgtgtgtatgtgtatgtgtgtctgtgttgtttatattagtgtgtgcatgtgtctgcttgtgtgtgtgtgtgcatgtgtgtgtctgaatttgtgtgtctgtgagcatggtactttgggctgtgcctctgtgaagccccatagtcagtggggagtccccacacagccctggctataggctgctctggaatttgcctttgatgacttagataggcatgaacaggacatgtcccctggggaagatctgtgagtctgtcctgggtgtccccggggcaatgggcagactcacggggaaggaagaggaagacaaagcacacagggtcaacactattgcatctggagcgtgcctgggcccatgctggatatgtgacagactcagaagtgagccagacctgtctagttggggcaacaagccccgtaagtgttctgcctggaggggtgctgaggcaggaagtaaggaacctctgtggaggggtgacctagtccagccctaaatcaagggtagaaggctgggtgatctgtgtccccactctcctcagtattgaaatctccttaagcccaagactgtactgaatcatgaatcaagacacatccatgtctggtcctgactctgccgtcactgtgtgaccttgaataagtcgcttggcttctctgggccttgcttccctccctgtaaaatgaagacattggatcatctcatcatttaacaggaacaatgaaattctacagcgaaacaagttgccccacaaatagcagggtggggcaagggtcaccacagaagagcaacttggaagtggtctaaggatgtggctaagaaaagagggagggtccagggaggcctcttttttgaaaaaaaaaaaaagagggagtacaagtgcggttttgttacatggatatattgtgtagtggtaaagtctgggcttttagtgcacccatcacccaaatagtgtacattgtatccaataggtaatttttttttttcttgagacagagtttcactcttgttacccakgctggagtgcaatggtgtgatcttggcttactgcaacctctgcctcccgtgttcaagtaattctcctgcctcagcctcccaaggagctgggattacagtggcatgccaccacgcccagctaatttttgtatttttagtagagatggggtttcaccgtgttggcaaggctggtcttgaactcttgacctcaggtgatccgcccacctcggcctcccagagtgctgggattacaggcttgaaccaccatgcccagcccaataggtaattttttatcccacaccccctcaccgtcccactttttggagtctccagtattattattccattctgtatgtccatgtgtactcagtttagctcccacttataagtgacaacatgggcttttagtgtacccatcactttctgtctgactttgtttctgagttagttcacttaggataacggcctccagttccctctgtgttgctgcaaaagacatgatttcattttttttctaaggctgagtaatattccatggtgtgcktgtgtgtgtgtgtgtgtgtgtgtgcacgtgtgtaccacattttctttatccagccatccattgatggacacttaggttgattccacgactttgctaatgtgagtagtgctgcaataaacatgagtgcaggtgtttttttggtctaatgatttcctttcggtagatactcattagtggggttgctagattgaatagtagttctattttgagctctttgagaaatctccacactgtttcaggaaggctacttgagcttggtcttaaaggatgggtggagagggaggcagagagaataataatacaggaagaatctgagaggtgggagagcgcagcagactttatcaacgaacattcatatagcactcactgtagagcaggaatcattctaagataggggttagtaaactatggcctgcagggcaaatctggctcactacctgattttataaataaagttttattggaacatccatttgtttacatattgcctatggctggtttggagctacaaggaccgaagtgagaggttgtgagagtctgtgtgacctgcaatgccatagaatatttgctatctggctctttatggaaaaagtttgccatccttcttataagatctttaaaagcatgggctcatttaattttcttgacaaccatattggaaagttattgttattgtgtccactttatagatgaggaaatgcaggctcagagagatcaaatagtgcgcctaaggccacgcagtgaggaaggaggagatgagacatgacctcaggcagtgggctccagagagtctgtgttctggccactgtgctatgccaagagcgggcccctgggaggaaggctaagctgtgaagattttgggtgctggtcttcagagcactttcttgaccttgccaggtttgtgaccagcacagtgatgtctcaaagctgtgttttgattaccacaataatgtgggtattcggggaccagcctgcctaatggggacgctcagtctccaactgtgtctctcaaatgctagacagttcttggaggcaacacctacatgctgttagccaggcactgctcacaagggtttctccataaagatttccgattttagcttattagtcagtgtttgtatagttgctgcatgctgtggtctgtgtcccagctgcctgctgtagatcacaaatgcttggaaggcctggattgtgtctctctctgtgtgttgtctccagggagaatggcttgtcatcaggtcagaggattctggggccacattcccattgcgaagaagctgtcaaaatgcctgcatccagaggtgcttcaacaagagcagaggtgatgtgcaggaagggctggtgattgtggcagaggctgtgaatgccctgcccatgcccccaggccactctattcctatcccactcaaatgcccctactgtcagtgccttccctccccctaccagtgtgagccaagacatctggaagtgcctgcagcaaatacccccaggtgcagcccttgccaatgatagaccctaatgggagtataaataccccagattctacccctcagatgacacagctctgaggcatggtctatgccagtgctacccctatgattttctgtaatgatggaaatgttctgtatgtgtgctgtccaatatgatagccaccagccatctgtggttattgagcttttggaatttggctagtggactgaggaactaagtttttcaattcaagtaatttaaatgtagatagctcaatgtggctggtgccttccatgttggacagggtggttctgccccatctcccagaggtctccagtggcattgagccttggttgtctgcagcrgtgtcctgaccattaacaaaccctgccctctcactttcccattttatttccccactccccagctggttctcccctgggatcactacccaaataaactattcatgtaagccacatgaaattgccatttttgaggttaaaaaatggttgaatgtcagtattttcaaatgattaaatttgcactgaaatctctaccatgcatgtgtgtctggggaaccccaccataacagggagttgagattcgtgtttgttcatgtgtgtaagttgaagtcattccctgtccaggcagggttctaatcccagctctgcttccaagtggctgtgtggccttggaaactctctgtgccttggtcctcagggaggaggacctgcccatacccctggccttggtgcctgccctatctttagaatggttggaaggaacaagggagctcatagatagggctatttgwtaaaagaagccagcacagtgaggagggaaggtgccctcctgcatgggtggggccattctggggcacagtgccctggctgcattatccctgggtggaggatgcctgcttgtggctgatggaattcagacagtgtgtttctttgatgctacaagactggctttcctgctgccccactttgtataatcgggtctttttggcagggaggacttagtagctagcgtgagctcccaagtaggaactctaggaatattcactcgggctgccgtttgatctgagcaagagcatgatttgatgggaggctgctctgggccttacatttgtttccctcatttagaaaaaggcagtaaacagtttttaactacattgcgattgtgaggcttttcctatataactttttttcctggaatggaaccagacaggatggaggcactgcactcgcaggcaacatgggttttcccagcccctccatcttcttgaccttcctagggatttgttaattcagctcagattggcctttccaggaagctaccaggctctcagaatgcccgtgctggagggaggctgatcccaccagggaccccagaggaaacccagagttcatgccaaaatatctagtagaaggagtttatatggggaactagttataaaggtgtccaaggagataaaaagccaagcaaaaaatggagaggcagcccagagaatagcaatggcaggaagctgctagcatcctagggctagagggggaagggaggagctggttttctagaactcaggatccagcagcacctggcggatgctggaactacagaaggcctgctgggctgggcaggatcacagaggaaaggactctggggagggcaggatacccagaggtgatagatataatgatggacatgttctctatctggagatgccaccaaatgcagaaggagggagaaatgtcctggtttctgcctgcccccaccctgcagacttctgcctgcattcctgctgaatagaacaaacttccctagaagaaagagcgagggagcctggggagtgtagtccacagtctacagacgaggggtaaagactgggtctcagagcaagcaggccaatgactagcagggcggcccaagagcctttaagtgagaggctgtcatcctggggctgtgaatgaacttcggaggggtccttgcccttctaggaagygcaggcatattttgtctctatgtaagcacatgcatttctccagaaagaaagttgatatcttcagattctcaagttggtctgtgccaccaaaagattcaacataatcaataaccagtaatccaaccagcttatcttaaacatgggaagtctcagggctcagagaaacacccatagcgacagtgtctatactcttggtctagggtcctactggatgttgtccttcaactgtcctggaagatccagcctgttaggagagtcccctgtctgttccctgcctctccagaatcractgtgtcccatcttcttggtcagctttccctgatctcaagcacacagacctgcttccacagtgcacttctgcagcctggggaaaccacaccatggatgtggatcctggtctagatgcgccacatagkgctcgatgcaggcagagctggcactggaaagagggcccagtctcctccatgcagcctccctccttcagcaaacatttgccttgcacctgccatatgccagacgttttgctaactgccggggatatggcactgatcaagatagatgatgtccctgctgtcacggaggtagaagtggaaacagaaaacaaacaagagaacaaatgcagcaacaaggtcatttctgattatgataagtgtggagataatagagtagggggctggcagacagtgatgcgggtagagtctgggggctacttttgatgggaaaggtttctctccggaggtcctgtgcaagctgacatgagaaggatgagaaggagccagctttccaaggtctccagagaaagtatgccacatggggacaaaagccagtgcaaagtccytggggtgggaatgagcagaggaagaagaatccatgcctrtgtggccaaagacgaatcctgcctcacagtctttgactcttttgacttcccctgtcgtgcctcctgcagactcttcttgcttccctgggagaatgggtggcaaagagtgccttccttagccatgcttccttgtcagcacagtgcctggcaggtggctggaagctacagctgaatttttgcagtgtctttgagatgccaggaggatggcagatcatttctgttcaatycatcagccacacaaaagccctgagatcaaagagcatgggcttaatttattttgtttattttgcagaggaaatagtgcttccttggactgaaagctctgaggactaagagctgaatggaaaggggrcgtttggattaaatgaatggsctggccagctctgacccaatttccacccagtgcagcagtgatgggggagggaattgccttctggctctctgctctggcccaggggctggtcatttctcaggtytgggccttctgtgtgagtcaggtttgatggaagtgtccttgaaggtgattcatggggargagaggaggggaaccgggagtagtggcctcaagccctgcctgagttcatccttggatccctcagcctttcttgacactagctcatcaccttagcaatgaggacaggtgcagattcaggtgaagctcacctacatttcataggagcctatcaaatgtgagtggactcggagaaggaaatcactgagcctcacatggcaaaggagcactcaaagtrgggaattctgaggaagcctagaatgggctgggcagggagggcagggkacagtcccactcatcatcrtgaccaggctggacctgtgattgcagtgaatgagacttggccaggagaggcttgggtctaggagtcctgggttcgagttccattaattatttgaccctgagctggtgactttttctattttagaagcctcagcctcttcacatttttgagtaggagtaagggtagctgcctgtgcttgggcttggtgtgagagcccggttctgaagattggaaagtattgccaagcacatggtaggtactcagtaaatatctgtttactkaaatgaaagaatgcatgaataactgaaagagatcaaagctgatatattcttctagaactttatgactacagggaatgaagattaatatggcaaggatagggaggaagttaaagccaactgccacaaggtacctgtggtggagggtccagggttctagtggcttggcccactctttcaggtgccctcatctcagaaagatcaatggtgcagacagactgcagtttatctagttcacattggatggatgccttggatccacagccctaggatacttgggcccatttttggatttcttgctcttctagattgttttagacagcagtccatatgaagaccttaagagagaatatagcccaagagtgatggaaggctgcaaccatgacattttgagtatgctccactaattaaaaattaaattgttaatccccaagtaaagaaggaaaatgtgagggcatctgaagaagagagcatgtycgtgtatcgtgatcgctgatcaactctaggtttaacagacagaactttatgaatgaggaatgaggagtcatctaacttagggtagagtgaaagggggtcaggtggctaaaacacaaaactggtgaaaactgctaaagatagccacagacatttgtaaaattataggcagagaattagaagatgaacgagatgggagagtatcactgcttgggaaatgtgacactgttagcaaacagagaaacaaactagaaagtgagcatttctgttttttttctctctcttgtttctacctaggattactgtctttagaatgaaaaagagaaaatctcttgcacagagctagagaggcactttgaaatgcatttctaggaccagaggggctctatggctgggtcctgaaatacactgtagatgtggttgcagaagtggggagtcttttgatggactattttttcattatgggttcaatttttttgcctttttgaatgcctggtagtttttgattggataccagacattgtgaattttaccttgttggttgctggatatcttagtactcctataaaacattcttgagcttattttctgggacatgatcaagttgtatggaaacagtttgatcttttttgggtcttgcctttgagctttattaggtggaaccagagctctcttaatctagggctaattttttcccactacagagacgctgctattctcagtactctaccaggtgctctgtgagcttgaggtttccactctggctggtgggaaggtgaaccrttcccagccctgtataaactctgggaaatgttctgtctgctcctttagggtgtttctctcccccaccttggatagctttcacacatgcctgtgtccaccaatacttagctaaagactcaagggggtccctctgctgacctcaagtattcactgggcagttctttttgctgccctggcctgtgaattccagcctccttggccttgctggaatccagccttcatctcctcaactcagggagacatctgggccctgctggggtcctccttctttctgctgtgacttggacgctctctccagacaggaagttgaggcaactgtagggctcacttcgtttctcctctctcagggattgctgtcttcccctgactgagctccagtgtctgaaaatcattgtcttgtctgaatttttagttgtttcaggtgggaggagagatctagtccatgctacttctttggagaatctttgaatggtgagataagattatttatttatttatttatttatttatatttatttattttttacctctagcattctggaacttcttgtgcttgttagaatttctcagtgggtgtcagaagatggatgctgtaatctgtattctaatgatgtcgtggcttatctctggaaatactcttgattggattttaaaactgagtgcttaggagcccttagagaggcaaatgctggtcacaggggccaagctagactctatgcaaacaggtcaggctggaatccccagttatcaagggactgaagttaacctgaaacgtttcctttaccatgacttaacctaaggtgcatgataatgagtgttaactgggtaccaggcttgcctttacaccaggttctgtccttatagcaaccccrtcagctaggtacccccatccctgttttccagatgagattaaggaactttcccaaatttagggtctgaattcacatctgctcacccttaaatgagatgccgcattgggcagcatctttcttatcatcttgattagggaggatccaagagctggaacttgaatatgaatcagtaaaacaaaaacaaagaatcagacacaagataaaggatccctctttgtccctgaattgagataagaaaacatcatcagaagcagatggaggctaagtactgattcccagaaaaggcctcatttttagaagggtatttagagattattcagtccccaacttacagctgtggttggcagaagccaagtggccaacagctcttgaggtggtgtcatactcatgggcagacagaaacttccctgacaggattttcccttaaacctccatcgcatgaaaggactttttttgcgcatttataaagtgtataattactatcccagtagctagatgcaaccttgtcaattataaataaatcatcacctcgcctcctcatcaccacccaaatgtctttcacactccaatttaattaactcacttactttattctctaataaactttcacaaaagttaaccccccattcccagctccatctagcaaagaatgctggctggatgtcagccatgttttgggcccccacctgaatctccgcctcaaatgtaactcaaatgtgatcatctcccccatctggggtctcacatgaggacatgaggtatgggacatgaccaggaggcatggccagtcttactgtctggattgccctgggggtcatggcaggygaaaagatcagagaatgagaaattccttcctccttccagaggccaggtgggagggcgggggaaagggcagggtcttgttgaattttgttaaaaagcactttgctctcttggaatgctatctcatgtctaaagcagccaagatcattaagtaaatataggatctgtgcttttattttcactgctattagcaaagttygcaggaggaaagagacattgaatggggagtttcatcaaagccaggggtgttccacaggaaaatacttgttaggcctagtttcctgtggtgaaagtcttatacatttcaaatatgttttgtgactctccacaaactttttgtttcctgcaggtttgtaattgagatatatgccctggggagaaaaaacatccaggcatccaggtccttagaaatataggtgccctgataggactgtagctggcagacttgcccataaaacaggtgaggcaggtgcttgaacatgtgrttcacatgttgcatagactgcctactcctgggcaggggcacacttggcctgtatttgaatacacctagacttcaaactcagtttgtgaatcacctcctttggaagctgtccttgcaccctaggctggaagcgagctttcgtcctctgaacttcaattgccctgtattcatacctctgtagttcgggctctgstcactttctacctgggatttgagttggtacatgccttctcacctactcgcctggactggactctcctttgaagacagggtcgaggttgaagtcatctttgtgacccctgcagggcattgcacatagcagatgtgacctctcgctggtggtcagatcaacttcaggggcacagggttcctctttttatctgccygatggcctttgtctagtgtattgctcaggatgacaataagaggaagattctccccctgtttaattccgggatgtcactggtcaggctcctcttgtatctcaggggtccagggctgagggctgtggcttcagctgaggctctaggctaagccagtagggcttgtgtcttgtattattctgttctcatgctgctagtaaagacatacctgagactgggtagtttccaaaggaaagaggtttaatggactcacagttccacatggctggggaagcctcacaatcatggcagaaggtaaatgaggagcaaagtcacatcttacatggcagcaggtaagaaggcatgtgcaggggaactccccttaataaaaccrtcagatctcatgagacctattcactataatgagaacagtatgggaaaaacatgcccccatcattctgttacccctgactgggtccctcctacaacacatgggaattattacaattcaagaggagatttgagtggggacacagagccaaaccatttcaggtctactactttggtaacctcctggaatgagtctcatggggcccttctatcccctgtactcatgatagtatgactctttgggtgggtctgaggctggacatgactggtggtgaaacccaaactcttattagagaaagtatatcctcttactagtgagataccttaaagttttgaaaaggaggctttttatgataataaaattatgcttttatgggagaaaacttggcaaatacagaaaaattataaagagaaagcaatgtctgtaattctgcaatgcagaaatcacatttgggtgtattttattattatataatgaaatgttattctgaaaacttagattggttaatatatataaatgttaatatgtatattggttaatatacataatatatgtaaagctttaaaatatacttagtttaaaaaataaatctgggtacagcggctcacgcctgtactcccagcactttgggaggccgaggcaggtggatcacctcagggcaggagttcgagaccaacctggccaacatggcaaaaccccatctctactaaaaatgcaaaagttagccaggcatggtagcgggcacctgtaatcccagctactcgggagactgaattaggagaatcacttgaacctgggagacaaaggttgaagtgagccaagatcgtgccactgcactgtgtctcaaataaataaataaatgaataataaagccaggcatggtggaggaccacttgagcccaggagttggaggctgcagtgggctgtgattgcaccactgcactctagcctgggtgacagagtgagacacattctctattttaaattaaaaataaataaataggccaggcrtggtggctcacacctgtaatcccagcactttgggaggccgaggcaggtggatcatgakgtcaggagatcaagaccatcctggctaacacagtgaaaccccgtctctactaaaaatacaaaaaattagctgggcatggtggtgggtgcctgtagtcccagctactcgggaggctgaggcaggagaatggtgtgaacccgggaggtggagcttgcagtgggctgacatcccgccactgcactccagcctgggcgacaaagtgagactccgtctcaaaaaaaaaaaaaaaattaaaaattaaaaaaaaaattgaaaaagtgaaatgaaataaaagtaacacatatggtaaacattgaaataacttataaaaatataaaatgaaaagtaaaagttttctgcccaccctaccccacccaccctaatcctggaaacctctctccaaagatgtctactctttctaaattcctttgtatgcctgtgggtcctgggagggatgcatataycagcatttacatgtgtgaatacttagtttatttattgattcttaaacctagaaacatgtaatgagcatttccccttgtggttgctgacatttcaaaactatttttaatagcatcaccctagtttatcatgaggatatccagtctttattttctgttgttgggtgtcgagtttcttgccagtttatttcttattaaaggtaacacttcaaaataaaggcagcttttttatttaatataatttggtgtctctgcttatttttttcaggataggtttccagaaatgaaattattgtagcaaagaacagatttttttttatttcaatggctgtttgtaattttttttttttttcggagtcttgctctgttgcccaggctggagtgcagtgatgcgatctcggctcactgcaacctccacctccyggattcaagcgattctcctgcatcagcctcatgagtagctgggattacaggcatgcaccactacgcctggctaatttttgtatttttagtagagacggggtttcaccatgttagtctggctggtctcgatctcctgacctcgtaatctgcccgccttggcctcccaaagtgctgggattacaggcatgagcactgcacccggcctgttagtagtattttgttacatcaaattaagatacattttcaacagaaataggaccatttctcttgcccataaattctttttgatgatttgaagatttaaaaagtaatacaagaaaatayactattgataaaaatttcaaataatacagaagtacacggagggagaagaaaaaggggccctttctgaacctcccttctcacatctgaaagaaccctggaattggacagacctgaattcaaatttagatgtcgctgctgatcagttttatgatgttgcgagtcttgattgtctcatatgtaaagtgactatgtcaacaatagccttgtaagattgtggtgaggaaaaagtgaatgtgtgcagaggsctggccggtggcaggcactgtgacaattatcgtctttgttggtaggttgattgcctgttctctgtgtcatgtgtacccagcagactccagttgatatcaccctagaaaacaatttcctcattctgataaatgttggcccttttctgcaagattgctttaaatttggagccgatggaatcacaaggctgtgacctctccatgcaggagacagtgtttctagcagcttgaggggctgcagctgccccacygagcttcaacgggtgtcctggtgcaaggttgtcctactttttgagtagcaaggtcttttcacccctttatgagaatgggcacactctggatatctatttctgagaactctgacactggagagaaaacaatcagttgagagaaatcccagcttggatgggcattcactgaacatccccttggaacatcagcctgctcaaaattttaggcatgacaccgtaaaccctgctatttatattgcaccagattctgcaaatatctttagtaacactaagccctcggttgttttaactgcgtctctaattataacctttttaatatttacagtggtgtcatgccatcctgattaaagtgccgtggtgagagatgctgttggcacctagtagcagcattgctgatgagaaggtgtcactaaagctgaccttccatcacttcttaagtgagccatcatttaggatggacacagaggtaccaatgagcccctgttcttgatcccaggatccaaaacctctcaggtgaggcatctccttgtgtgttcttcaggagccagcatgctgtgtgattcctagggagccagaggaagccatgctcttgtgatggcatatttatttcattggcctcatgtcatttggtctacctgatcagcagctgctgtgagtgtgcctgaaagagtggcaggctctgcaagagctccgtcagcaagtagaaatgctaaattatctcatgtgtttatcaaaggtttattgagcaccttttgtggcagaaacatgggctataataataatgaccattgattgaatttctggtgggagatgggtactggtggagaccagtttgagctcatgatgtttattaggaatccacctctgagaagggagaggcagaggccagagtgacaagagggacaagtcgagagctgatgcagcttccacaaaacctcggccaacccagcagacaactctggagtggatttatccaacagagatgatccctttgggcccaaattgctgtgcttctgtaccccacctcactctgtcaccagatgcaggctgtcccaggaagggtgaccttggctgaagctgtagctgaggctgagcctgaaggaaccgacagctgggggctgtttgcaaagccgtctccctgaagctgggcctcaagtccttcttcgaggtgaggttgggggcagcacatctccatggcatgcagagcttgatgaggagcttgagtttgacctgaccctgaagggcaagtggggctttggtaggcagagaggagcaggaagaacttgccagctaagcaaaacagtgtgaacaaaggtatggaggtagaaagagaggactttgtaaggaagtgccaatatggaaaacattgcagtgtggacgcctgggcagagaggctgtcaccttgagaaatggccaggggccacctctagggtgaccttctctggtgttactttctagctatcttctgaagcctgtctttcctgcccactctaaggaagtcaggtcaacttagggatgtgtcttcccaagtgacccccattggcctttgttggttgtcctccaagttattgccttgggcaactgggcagattatctgcatcttcttgcacagagtatggattttcaaggctcagctcatccttgactaagattgaggtgacttctagggcggctgaccggggccttgagaatctccctgggccctttcattcatttctcttcatgggctcttttggggtgggtgccaaggatctgggtacagcttccctaactcccaagcttggagaggccactctagctcttggactggcatctgggccagaagctaccagctaggcaacccatatttgctgggcatctaatagcccctcagatggtgaaaggctggtctttggcctggatggcttatctgtttcctcagacagctccagactgaagggacttcataggcagtgactctgtttagtttcactggtggtccaagggcctccttagctaggccctgggggaatcaggggctgtaagagtgggacaccgaacagaagtttcatctcatggaggcaggatttagaaagtgtagatctctttgaagagaggtttcagggagagaggtttcagggattagggtccagccagctccctcccgatgccagccttacctgctaagtgccttctaagctttcccactcaccctgtctgtgtttccagcctcttgtgtttatctctctctccagcccacactgccttttggccgaaaagggccataccttgagtccctgttgcatgaagttggatttcctttcatgtgtcctcagaggccctggcttgggtgttgtcatggcattttgtgatttgatggaggaggagagatagagcggccccatcgcctgtttgcgctagcctctctcagcttgaccgatgactgtgatgacatctgtggacagtaagcaggtccctggtgggattgagtttcctgagctattccatatcagcattcgagaagccagtacactggctgctaattgtgctagcttgtacctggggctgggtttgggtttcaggtccctcccttcctccctttctcccaatgcttggtcttattaggaaacattgcatcgctaaaataacaattactctacagatagagtaatagaagtgttcaaaggtagggttaattagaaactttcattaaaggaccttggaccttgttgcaattggtcattcattgatatttttctgatcaacaaatcaaccatagtttcttttgaataattgcaagattttttttatttttcatatgtgtgtgtgtgtgtgtgtgtgtgtgtgtgtctgtgtatgtgcgtgtgagagagagagagagagaatatggacgatgcagaggtggatggaggattattttctgttaaaatccccagcgtggctcagctcacctgtggggcctgcctcagctctgcatgccagctttgggctgccagatagtcttggagcttgccttatagaaagtggggatcctagccccatttttttcctgtggcttccctgggtttttctgaacatgaacaaaccttgctttccatctctaaacgctgctgggtggtccttgccgttgggattctggaattctggccctgtctggggtgagccttgggcatctatctcataggcactcatgcaacctcagttgggttgctatagaaaccaaatctcatggcctgctgggggcctgtttagttctttatgtcctgcctctgtctggggagataatgtggrtggtgacactgttgttcactgctcaagtggagaattccctctatcacccaacaaggcttttcaaggacccaaccacagaagggactcggtaactcttgggtgtgtttttmctcttgctcggtgggggaatccaccttcaaagaggctgcccagctgctccctgggactcagcaggttcactggggctggtggtcctcaagtctttttgaatgccggggaagttcccaggacaatctccagagtggttaggaggcctggaattgataaccaccctgaggacagcccccgtctcaacatgggagacaagagaggcatatggcatggcattatagcattttacagctcatggaccagctgataggatagtgaatataattgccatgtgacaaaytaaagtggctacaagtgagctaacaggtgtcrtttcattattaatttcaatcaaagtcattagttgctatttagggatctggctgcttggccacctacaccgtacttcatctggctgctacagcttttgaagaagacagagaaaagttctctttctctcctcctcctttcttcatccttggagaatttactatggcaaaacattgggtaagtctctggactaagtcttttcccagtgcaggagtctgaacaagtcactgcagtaattttgtatgctggcaagccccagccctattaagtaaggtcctgcaatgtgcttgtcacctttctaaattagagcctcatagtctcaaaacggtcctttgcagaaggatttctttttttaatgacttagcatacaggtcagtatcccatgtgtacttagaaaggatttgtaatctctatttcatatgcaggaagtctctctcccttttataattttaattttatttttactgataaataataaatgtacatatgtacatgtgatatttaatatagtcatataatttgtaaaggtcaaatcagggttattgggatatctatcatattaaayatttgtctttatgctagaaacctttgaattattctcttctagctactttgaaatatataatattttctaaactatagtcaccctactgayctatcaaactctaggtcttatttctgcagaagatatttttattttcattttagcattcagtatttctttatcacaaatctatccaaagattgtctcctttggttccatttgaaaagcaacctagaaagcactttagaggtggagctcagatgttgccatttctgaattagaaataatttggctcagaaaggttaaaggaaacagcacagttgacctagctaggaagtggcacagctaggaattgatccctggcctctgattccaaagcccactccctccatgttccacgagagccaatgcagtgccaggcagggtagattcctcgtgtgctggggtctctgaacttcatgaggggctgccattctctccaactggcagcgtctcaccctgccctccgtgttctctgtgaagcctagtccagccatactcccagcctaagaataattttccaagtcatgaccacaacccatgaatgctctgcagatgcccatgatggggggatagtgatggatctcaaggaggttggtggctatgctagaccatgaatgcagggcttctagacaaacagaaaccagtccctggcctgcaggagtgtcctggaagcctgccgggaccactgagaaaagctttccattgggaaaacatatgtaggcccctgggagggacagcctttccccctcttttgggarccagtctggcccctcgtgggatgatggtggcccccatgggctttttctttcacttgatttccctgtctatgtgtgtgtacccagccaccctggatcgtgggtgtcaccatggtatcctgtctctgagcaaacacatgagcgaaaaaacaaacaagcattaggaaggagggctctcccccacaccttggccacctatgyggagtgagggaccctgagccaggtaggaggagggaaggtgatggagattaaacagcaggtgtcagacagtcagggaaatgcgtttggattcacactggatggtcaggagccccaggtaccaaagtcaaacatgctgactcctgtggccacctggtcattcctcttgggtgtgaaggaggaggaggggagcgtggagaaaccaacaacttagcaaatgtgtgctgagtcccatgcntataggtgatgggagttggactcagagaaaagctgccagtaacaccccttagcaagcacttgctgtgtgccaggctctagatgacaacctttacctgctctctcgataggtcctcataagcagtccctagaggtcagtatcgttattgtgcccattgtacaggtggggaagctgaggcactgagcaatgaaacctcttgcccatgatcttacaactagtaaagtagcagacccaagaggccaagccaggctcatctgacttccatgccaggtccctgctaagattaggggtagggagaacagcttaggagctggggcaggagagtgcttatgtgtggagtagagaaagcccatcctagatggggaggtggcgggggtctaggtggcaaggggaaccctgggtgcctggcttcctcctgcaggcactgggaacatttgctctgctcacctcctggctctggatccagaggagtccattcctccaggtggctgctctcgcctgggaatggggtgggggtgagagtgaaggctgaatgtgggtgcagtgagtggtaaggtaggaaaagctgtgggtggctagagtgaggtcttggccccataggcaaggacatgcctaaagcaaacggacctttcgagtctcctgggtgatctctttcctaaaacccaccctgactctaagaactgtgagtgaccccagcacatctccttgctggcgcagttgagacagggctgtccctagctcatccaggacagttctgaagccgccctgaggctgtggtggctcaggtggaagacaatggcctggagggagggagtgaaatcctactctccaatcctgccaactagggaccctctctttgtttgcaagaccaaaaaaagaagaaaaaaaaaagatctcaggctattgtccaatgcttctatttatagctgccaaataattaagcrgatcagcccttccaggatcagaaggggccatctagctggtggaccatatggtgagtctgcagggtcgcagagtggttaacaggagggaagagaggggagagagtttgtagagcctcttgttgatgttcatgcttcatttcttctcagtgtgtttttggtcaacagaaagattaaaaatagcattaaaaaattctgttctctggatataaccctgcgagggggtggggggactttggatcatatttacttgcttccctgatgacgcagagtgccaaattctaaagtccttaggatggaacccagctgaagacttccagctgaagtatcccccttcttccttctttggtcagtctctgaggagtatcatgaccttaacttcttgctttcctctgtcaagacccaaggactccttggccaacactttggggaatttattaattttctccctgcacccctagtgtatccagtgtgtcatcagcagacatttgggtcatgatgctcctctactctactgaaattcctctatgactccctattacttataaggcaaagttcagacccagcctcagctcacccttcctgcacccctgagccatcttcagtcgttcagggcccttcacctttccaaacatgagagctggccctttgaattttgattcttggccgggcgcggtggctcacgcctgtaatcccagcactttgggaggtcaaggaaggtggatcacgaggtcaggagatcgagaccaccctggccaacacggtgaaaccccgtctctactgaaaaaaaaacagaaaaaattagccaggcatggtggctggcgcctgcagtcccagccactcggagggctgaggcaggagaatggcgtgaacccgggaggcggagcttgcagtgagccaagatcgtgccactgcactccagcctgggcgacagaatgagactctgtctcaaaaacaaaaacaaaaacaaaaaaagaattttgattcttgctggaatgctttctgccctactctctcctgttcaagtcctgctcactctgcaaaagccagtgacatttaacctcccaggcttcctccaactcagaatgagctcacggtagaggggtttttttcctccccttttctggaccgttagagcaattttgtctgaacactttcatttgacaattaatcatgttctccctggcagcatctttcccactattatctcaaagaattatttaaatattttatcagcatttaaatcttcacttttgtcttgctccctcccctggaccgagtcttcctggaggtcagagagggggtcttgggcttctctagcaagcagcgttttgtggtggtcacctgtgcaggcttctgaaactgttgcccatgtttcacccttgctctgcctcttacttaaccctgtggccttaggaaagttttaayttctctcctcctgagttttctcacctatagaatgtggataaaagtcacacccaccttgtagagttgatgtcagtattaaaaacgtgcaaagcgcttagaccagggctctgaggtatctgctgagctcyttagtatgcctctttcccctccacccagcatctggcccactgtcttgaacataggagatggccagaatttgcttgttttttttcctttggtgtggcgtcatttgtaaagctctgacccagagaggataggaaggtttcttaaggtcacatagcaagaagtggtggagaagctatggtgtcagaattgagagtccagcactcccagcccccgccctggccccaaggcctttcataggcagccctcttgcagggtctttactgtgcgtgggacactggagaaagctgctgtttatgctcgaacaacttttgcatgaatcagatggacttgaagattgccaccactctgcaggactccaggaggaccattcacattgcattctgtgggcatggtatccccttgaggtgtacgaagaggccccaggtgkgaaacctccctgacaaccctcccatcccacgaatgcagctaaaagacacaggaggtatcagggccacagagtgagaataaaatcccactggagcaggtgaaagggctccgaagataggtaccgctgcccttttccgagtactgcctctcctgctgtcccctggccactttcagagagcccatgggytgacttagccttcagggtttagggagatattttggggtggtgagcttttcccaaatacccatctctccctgctttgagccaggggagaaatcagagctggttgggatgtgtgttgtgatgatgtgtgcagatgttcctggatcaacactctccttcctgcctgcccccttcccaccyccatactccccagccacaaagggaatgggatgagtgggtttcagaagaggccaaattatttctaattcagaaatggcaacatctgggctccacctctaacgtactttctaggttgcttttcaratggaaccaaaggagacaatctttggatagatttgtgatagagcaatacagtaaaatttaatgtttatggtataatctaggtgatgggatacaggtattgtctgtgaaatcctttcaacctgttgtatgtttggaatcttctcttctcttttcttytcttytcttctcttttctcttctcttctcttctcttctcttctcttctcttctcttctcttctcttctcttctcttttcttttctttctttttttgagagagtctcgctctgtcgcccaggctggagtgcagtggcatgatctgggctcggcctcggcctcccgggttcaagtcattctcctgtttcagcctcccgagtagctgggaccacaggcatgcaccatcaccccggctaatttttgtatttttagtggagatggggtttcaccatgttggtcaggctggtcttgaactcctgacctcaggtgatccacccgtcttggcctcccaaagtgctgggattacaggcatgagccacctgggccactacactcggccttgtttgaaattttcttaataaaatgttgtggagagaaggaataaggactttgtagtagccaatcctggctctgcccctttttagctgtgttaccttgggcaaattacttaatgtctctgagcctcagtttcctcatttgtaaaaatggggccaatcttacaacatatcatagagtagtgagataatacatttgaagtacttctttgtttttttttttttttgagacagagtttcgctcttgttgcccaggctggagtgcaatgacacaatctcggctcactgcagcctctgcctcccaggttcaagcaattctcctgcctcagcttcccaagtagctgggattataggcatgcaccaccacgcccggctaattttgtatttttagtagagacggggtttctcctaattgaggctggtctcgaactcctgacctcaggtgatctgcccgccttggcctcccaaagtgttggaattacagattcaggcactgtgcttggtactacgttttttagaaactggatgccaacagaaaaattagagcccacatgaaagtctagttttcttctggtgtggcggcccatgcttctagtcctagcaacttgggaggctgaggcgggaggatcactttgagcccaggagtctaaagctgtagtgagctatgattgcaccacttcactctaggcaacacagtgggatcccatctctaaaaacaaaaaaaattaaaattaaaccaaacatttaaaaaagtatagattcccaacttctctacactggcagcatggggcccagcattcacctaggtctgggtagcagctgcacccttggcctccgggtgtgtgatttccaggccaccataggctctgatggcccattcagttctgtgatcccagcctaactctttaaagcatttgagtttgtcactcctgatcgcatgcagcctcttactttaaggaagacgacccgagtcagccaggtaagggatttgcctgaaatcatctattttgtccacagagcatggtcctggccccggtgcaggcctcctgcctctgtatgttgtggcctctctttgtgggtgactagcccctgccatcagaagcccattaagctctgtgaaattcagaagcttggtccaatgggtcttggttgtggctctcagggggcctggggataggttaggaatgtatgtaacactgttttataaaattatcacaaaccaagttccccttggtgacttgttctgaattttctatccatgaatgtttttatatctttctgctccaaaattttacctgctgtaaaactatataagaacattaaaagacatttacaaaagcagtcataatcccaccaccatagcacagcagctgttcctatctttgatttttagaaatgctttcaatcacagaaaaggctattatttttatccggtgccactgacagtatattttaaccgaacttcctgcctcccatcctcccactctccccttcctttttctccctgtcttgtgcttttctttaccctccatcctttcccacctattgtccaccaggtactacaatccttccatcttacatccagagtttctggagggtacagccacacaatgctgctccgtggcagccctggcccaccctaggtaatggagttctgtgctctgtctggtggtcaagataaattccagatcctgggaggcagagtggggaacaccaggcatcagcaataagctagacttatggctccaggctctcttttccctccactaaagtggaacattttggctgaaggagtgtgtgtgtgtgtgtgtgtgtgtgtgtgtgtgtgtgtaaagaaagaagactggaatagtaggactttaggcaccaagaatcccctcccttgctagcctggcatattcagataattttcttttgatacctctgacctgtaataaattttaagctccatatggtcatctttactgtgtatggcattcttagcatttatgtatattcatgtcaataaatagttattgcactgtgtgccagaggggtatgttttagtagatggtgataacaaaatgcaaatggcacttccttaggaagttccatgtcatgtgctgctggaaacagcccctgcttctagtgctgtagtacctgtgtgaccttggccaaattacttcacttctctgtgctgtttccttttctgtataatggagattcttaaccctgctgggaggattagttaaatgagatactgtaagtgaagcatgtagcacaaagcttggcgaaccaatggtgcagagattccagttccctccccttcctttctctgcaagttttctttagtgcttgcactcctgccaaatggttagtaatctgttaacaaacacttaagtctttaggggtgctcagacgacaaagggttgcttttggagagtgaagaatcttcttgtaatataaatagtcaactccaattccagttttaaagtttggtacgccttgaattcaacctgttaagttagcccagctctatctggggttctggaaaaatctatccaagcctgatgttgcttgagagcagggcctgggtatgtggcctgtgaaggccagctttgctgtgattttcaccaatttccttacaaacggattttggaccagacttgtgcaagcttcccccagcaggtcttaggaacatctggggatccaattcagccttttctgacgttctctacgtgcagggcctccaccaagtcattgccttcatttcttaagggccatttggctgaacttcacaaagtggtggaaacacatattgcacacacaggtagtctaagatcgggaataaaaagattacaagtcctcccctttcataggcatctgggtcccatggttcatccaaaatgaagacctctgagctctgtcactgccaggtggatgggttgggtacattccctcctctctctctgcttttctgtcctcatttgtaacccgaagaccataggatataatgaatctgggagggccagaaactttggaaatctaattcagtcaacagacctgtgttgtttaggtgctgtctttcttccatgcgcttgatttctttgacattaaataatctgcttatggtgttataggacctggatgttgaaagaaatgttaaagctcatttcagctttatggtttccccacaccacaggtggtgtagcagataccttctagtgatatatggacaggaccctgagtcaccaaggagggatttagttcatttccagttttcttccagtctttctagttatctcagggagaaagtctcggtttactgtttgaacatctcttaacccttgcctgtctcccttttgaacaaaggcacagaacagcccccattgagactgcatgcaaacggaggcatctacctagaatttcataccctggttttgttttgcatttattttgaaagttttcttctattttgtttattttgaaggttatcttctatttcttcactggtgataccagtttttcacatgtggtaatgttacggagtatccttaagatatatttatttaagctgggtgcagtggctcattgctgtaatctcagcactttgggaggctgaggcgggaagatcgcttgagcctaggagtttgaggccagcctaggcaacagagggagacaccatctctacaaaaaattaaaaaaaaaatagccaggtgtggtagcacatgcctgtagtcccagcttttcaggaggctgaagtgggaggttgagcctgcagtgagttatgatcacaccactgccctccatcctaggaggcagagtgagactctctccccaaaaaagatatctttgtttagttaaaaaatttgactccattgaaagaaaaatgtttagtgaatagcataggagtcatgcagctagggcagaagttgtgatgggagtatgtgaataacacatttaagaagcactgatccagtccttcttctagattagtccaaaacccgctgaccttgactccatttctgaccccaccagtgacaaataacaagggggaatctcccactagccaaaaaactccttggaggcaggggtggtgtctttatcgtccttgtatttccagtgctcgacaccggcacttggacgtattcatctatttcacccgtattgatggagcacctgttcctcagcagctgtgttctgggttcgggggtcctgtngtgagagatgccatgtgcagcantgaatatcttcatacaaaagaatgtatgtcaatccataatggtccaagacatgcatcacgctaataggggagcctctcgcttaggagagggttgagctggtgcaggctggccttgagatgtgtgtcgggagactggttctctcagggatggtgttcttcctgaacacgatcttccctgttctgaccgccagcagctccagcccacactgtccagaacaagatacctcctttccacaggaacgagacacacttccacagcagcaggaagaatgcctgttctggtgcagtctgattttcaagcagtttgttcttctacagagaaaatagcctagaaggtgagaggcaggcctggctgcagatgtctagatgtgccaaggccccttgccagtggtcagcaggctgtagcgctggcctgagcttgtagttagtggggactgtggttggggaagccgaaggaagcttgaagctaggtggtgacgttgaagataaatgtcccgtgtgttgagtgaggaagggacaactctgaggttggggcgtgttggtgacataaaaagtttaactgagcttcctaaatgggaggcattctgtatttggctgtggcttgatggaattgcagttacccttgtggcgtgggaatcagcctcgggaccattaggatattatgatacagtcccttggtgccactgattggcggtgtcaaactcatctgtcaaaaaatgaaatcgatcagccaggaaggatgctggtgttgaggctgacataccttttgagcataataactactgtggcttccggtgctttgacaaaacctcagatacatggccttctggctgagcatctgtgatttcatattgttggcgcatttgttatttccctgggggttgcaaccctctgtaactttgctgtggctgaactaaaaaagaaggcatacacggattctacagaaattatgattctatgaaagattttgaggagatgaggtatctttcagagtgcaaagtgattttggaatataaagtattcctttgggaagaattacctagagatttgtcactgacctgtgttcttgaactataaaacatgaatatgtggcttaagaaatagtttttcttaaggctgggcacrgtggctcatgcctgtaatcccagaattttgggaggccaaggtgggcagatcacttgaggccagaagttcaagaccagcctgaccaacatggtgaaaccctgtctctactaaaaatacaaaaattagccagatgtggtggtgtgcacctgtagtcccagctactcgggaggctgaggcgtgagaattgcttgaacccgggaggtggatgttgcagtgagcggagatcatagcattgcactccagcctgggtaacagagtgagactctgtctcaaaataaaaataaaaataaatagtttctcttgacaaataaacaacaaatttttaaaaatgaaatcacctttgttttgaaaaattraaacttacctcatgaccattgcctgattcctgagtcctgctcctctctgaatatgaagttgcggagtctttttaaattcatgaacagatatccgtgatcttttctcaccttcagggaggttcaaggctccctaatctctactccatcccaatcatgaacacttccaccctcactcagtcccttccccctcaccattcatgaccctctccttcttccctccctgccccttccccctctgtaagtctctctcgcccaggtgtaggataagaaagtgttttgcaacctgtttggtagttttttaaaagttgaaagtttaatgatttgttgttgttttttttgagtgggaccagagtgtcccagccttaaatggctcttttgaaatgacagtatggaagaaacacaacattgaaaatggggacctttgagatctctgctgtctgggcctggctctgccaccacttccttgtgtgagggtgtatctggcctttccctttcatgggcctctgtttctcattgaccatagaagggatttaggtccctcatttgagtgagtctcttcatttctgcatgccagttggcttgttgctgtgacagtgactccaaagctcatcttcaggcttctgcttctgaagttcatgagtctgacactggatggctgtacttgggttccacagttgtgaaatggggaaataagagaagcaggatgactgcttgtttttgatggattttacgaagagcataacagagtaagagtaacaggtgagcagggccttcccagcctcacgcagtgcctagaatagtgctcataagtgactgattaagtgaaggaacataaggtgattctatgagttttgtgcaaagcaatcaaaaagcctcaaggaggcaaagtccctttggcctctcattaagcactactttatcccagtaacccgaaggtgctcagaaggggaaaggaaaggagagaggtagagtgcagctgtggctctgggagcctggagtcctgcaggtgtgagaggcttgctgtatgcttctcctgccccgaagctgagcatcccaacctccacaccctttgctgtgagcctttttttttttcagagatagagtcttgctctgtcgccaggctggagtgcagtggcacgatcttggctcactgcaacctctgcctcccgggtccaagtgattcccgtgcctcaacctcccgagtagctgggactacaggtgtgcaccaccacacccggctaattttttatattttagagatggggtttcaccatgttggccaggatagtctcaatctcctaacctcgtgatccatccgcatcggcttcccaaagttttgggattacaggcgtgagccaccgctcccggccttttttttttttttttttttttttttttttttttacaacagaccagacttcaggggcatgctgcaaatatctagcagttgctgctgcatttgtgttgcagctgccctagggctgagcccttagtctcaactcagtggtctgcaagctgcctgtgtattctttggactggctggagccaaggtaaaccaagagggggccccaggtctgccctctggctgagactcttggctgttcctgcatccatacactctgcttagaatgtcataaaaggattagagaaatccctaggacactgttctgttcccagggctgaaagaggattcctggaataccagaggcctcaaggtatgattacatttcaatccccatgcaaaattgtagaatgtcataccatccagtttctctgtcaatattagttctattgtttgcaatctgagaatgggagccaatctatggcctctccagtgcctgcttttggcaagagagaccatcaagagactgaatgaccagtcactgcatgttttctacctagaatgataggaaactggtcycttgatgtactgtcttcaggagggacattgggctggctgatctgagctggaaattgatcttttatctttctgaactggcgcaagtgaagagatgacagtagatgtgtcagggaagcggggagctgccatcctaaaaggagtagttccctgcagcctggagaggccagggtagwatatttcccaagaaaatcatgaagaggacagagaggattggggaggctttattgtgttggtgacgatctgtgaattataatcaaggcatgttgatggacaagtccttagcatgtgttgcctaacagtttattccttccacctaacttaatggaggcccactctgtgctcgccacaatacaaagatgtattgcattgatacaaagacgaatcagctttagtgattctcatgggagttgtacttatagtagattagcaggtgcatggacatgatgtaagtggatggcgcctccttgcaccctcccttgttatgaccactgtgaggtccttctcaactatgtctgcaaaaagtgcctgctttgtctgttctcctggggaacagaaatgctgatgtttcmctaggcgttgttcctaggtgagtattctggatggtggtggtggagcctataaaccaaaacatgtctgaaagagttctcaatcartttagaggttcattttgccaaggttgaggatgagcccaggaaaaagagataaaggctacagtagactctgtggcctgtgctttttccaaagagggttttgagaacttcagtatttaaaggcaggagagtgggaaggagcaaaaagagggacactcaatagtgcattcggctcctgctcagtaaatcttgtattttacataagataaagtaaacatagagtagaggaagaagaagtcagatctgcatttgtcttgaggtgggcagagggatgatttctagtcttgtctttgtcccttacctgtgaagatacattgtcagggtgagagaggctacctggggagataggtgaccttctctcttgcagcaatctgtttaggaacaaagagaaagcagcttttgcatgacaaagttcactctttcttttggcatagtgagttgagggtcccaagattttactttcctttcacaaaccaaattgtgacatggctgtgagaggatggtttcttgtatcttgtatcttcttgaggattaatctaaatcatttgtgtaagagaaggaggtagactgggaatcaggacttcagcttctatgcatggctctgacactcatctcttagtaggattttgaaccctgacttgcttattgcttcagttcctcttgttcaatggaaaggttgggttgcctgatatatcatatatatacatatatgatagatacatattaacatatatataaatcacaatattctttggaacaggaactctgaaagatgcaaatataggaataaaggggttttgtttgagaaagcttgcaagatgttaggtcaaacaaaacaattaaatagtgttcttcttattgcagaactttttagggcctttaatagactactatggggaatttccaaaagagggtrcaatatgcagtgattctcaaacttagttgaccatagaatacttgtgttggggagaagcttatgaaattaatattccttggaattctactttgggaattgtaagggtagaccagcgatgttcaaatggtggcgattttgccctcgaggggacgtttggccatgttgggagacattttagttgtcacaattarggatgggggtggaatggaggagaatagctactggatagatgccagggatgctgccaaacctcctgcaatatacaggacagcctcccacaacaaaaagtttatccatctagccaaagtgacaattgtgctgaggttgagaaaccctgaacttaaaacccccttctgttcctggctctaacacttgggggattaggtggtttggtgacccttccgaacttggcataccagttcaccctcaggcatctttggctcttgaactgtatattattctcyagaaggcaggagaggtgaggcctttcatactcatccctgcagacctgcacatttctggcaccagacccatatatctatatatctatrtattcatttaccacagcccagcattcctggcagccygagagctggtggctagttgagaagaacatttagtctccctttcctgggtctygtttccacccctagtggccaagctggggcagctcgctttgctctgtggtctgacaaacttggatttcaaaacccactgcctgccaggagcagttcccgcagacagagctcagattccaagaagactatctggctcttagagatccatcatctttatgaagttttaaaatcacagatggtttttatggatattcaaggtattccagcctttcatgttttctcttcatccctctttcttccccaatcacacatttttctccagtaaccaaaacacaataggtaatggaaattccattacaggctgacccacagagactgcatgggaccaatgcaattatgtctggagcaaagcactgtcatgactaattagcctctcacataaatgaattttcctatggataacttcagaaaaatcagcctgcaaaacacactccttattagttttccttccttctctgggcttcggagttaggctttccctaaggattctctccaccactgggccacgtgaacagtctagcccatggtggaaatccattttctgcttgctcttcaccccctcagtcctgtgcttagtttcattagagactaagtctcatcagagacctcgttatttttagggtgatgagctatttattgagcaacttgcttctctcttggaaggcaacataggcagtgatgagcaggggctctgtcaccccagctctgcactgacagtaactttgggggaaccttggagaagccacattgggacctcctggytttgtcttcccacctgtagagaggggcattgtccttgatctagagatatcagctgtgattgaatgagtgtaattcacggagcagactttattggccactgaatttagaagggattataaaacacatcttccttcaaaaggatgcttagagctgggcatggtggctcacacctgtaatcccagcactttgggaggccgaggcaggtggattacaaggtcaggagatcaagaccatcctggccaacatggtgaaaccctgtctctactaaaaatacaaaaattagccaggcgtggtggcatgcacctgtagtcccagctactcgggaagctgaggcaggagaattgcttgaacgtgggaggtggaggttgcagcagtgagccgagatcatgccactgcactccagcctgggtgacagagcgagactccatctcwataaataaataaataaataaataaataaataaataaataaatarrtggatgctcaggattggatgacttattgggcaaaagcctgggcccttgcttaattggttcagacatttgttgagtgttacctatgtgctaggaagtactgctatttcttctgaaggttgtagaatctctaaatatagagacaaaaagagaggggagggaaggcccttgtgaggtgttagcaaagacctcccaccaccactgactggcactgattcagtatctgtatctgggtgctgtgccaagtcatctccacatctcagctaacaccctctgtggtgcatattgatagtgcccccttccaggggagggcactgargctcacagaggttaagaacccgtccaataacatctgagttagtaactagcagaggtgagatttgagctcagttctatcatactctaaagcaagcctcttcactctgtgtctgctgtgagcattgttttgaatgggtccttgattcccagcctgtattgactttccactgcctgggtgctccagccaggctcagggctctggggaatatataagtgaccatctgggctgggacagcaccatgatgctgatgtgcaccaggaagggctgcctttgggaagaattgctgtgcactgcactcagaaattgcatgtgctagatgttggagctgaactcccctaagaggaattttctaagtggattatgaaatcaatttagtgagttgtaatcaatgttaaaaaatacaggatatcaaagtacattccatgtaatagtgtaggtattgtttcatgaatcctgtgttgcaattacttgtatagtaggtatgtgtgggtcacgatgtaaaatgtatttcttactttgggtccaggtcacaagttggaaagcgtggccctggaaggaggtggggcatgcagcagtgctgcagagggaggtgtgcaggctttgccctttaaggctctgctggggatgccttgaagaaggcagagggcacagcaagtcctggcaagtgggtcagcaaactcactctgactggctctatgaagtgctgcaggggcttcagagatgttataggggaggcccctaccatttgtcaagaaagtgggagagagactagctctgctccgcaagacaagagactataatagtcaacatctacaagaataataacagcagcacactgtatccatctttaactaacacgaactctagcgcagactgtctggatttatatcccagctsaacctcttataactgtgtgacctcgagtcgttcacctaacccctcatgcctattttcctcatccgtaaaatgggcataataatagtacatactacataaacttgttgtgaggattcaatgagttactatttagggagtgctcagaaccatacccagtagacagtcatcatatatacatgtctgttatatacaaaaaaaagtcatataagctttatwtgagtgcccaatagaaagctttaccaaggcaagacttgaagcaggccttgaagattactccattggatcttcttcttttcatctctgtcatcaataactgtttatttcaggggccataaatatgttccagacactgcagagtccttcacgtatgtcctacagtctggtgaagtgggactcatatgctcattttacagatgaggaatgaatatttaaagagagtccaagccaggcccygattattctggctgtgtagtctgtactcttgaatcagacgacacagtccctctttggcctgccatctgtgttgtactggggtctggagatggttggtgtcctgttctgccccttgcttagcttatcctctctcagcctcagaaaccaaggccctgtgtggacagaaagcaccgcgatgaacacaggtgcctatttgaagtgctctgttgtcccagactggaggccagcagactcctaagcaggatgtgtcacctagcagagacccatgcatttttaaatgtcctcctgcctttggagacaggtcctgaaaaaataccagaatcattaggactcttagtcatccagttcagccttggggagctgagtatcacagccctgttgtcagcagcagaagtcctgccacctggacaaggctgggaaggcagcccacattgccgcaccagggagaccccaagaccaatgcctctggggtygatgtgggatgattggtggttgactgatggcaataaatgaggacaaggagaaggcagggcccctcagctgcatgccatgggcaggtttcaacmgagtgtgggctacatgtccagatctcacccaagcactgtggacaaacatgaaggagaaggcagggctgctgcccacatggggagtctcatctatttggggagataccagtgctcagaagcctaaattcragtgctgcaggaatccagggagggggcatttagggaaactggggtggttgtgtaaaacttcccccaaaagagaaaattcaggtgagggtaaccaagatttggagtgactacaatgttaaataaatcggggcaatgtgtttatagataatgtgctctccttctgcaagctgccaccagcctgccaatacttatatcctcatccatccatccatccatccatccatccatccatccatccatccactcatccatccatccatccatccactcatccatccacccatccatccacccatccatccattcatttattcagcacatacctcccaggtgcctgccctggcccaggcccagtgctaggccctgtgtagacaacgagcacagttgcatgctgcctctccttcctgctcatggtctagtgtgggagaccagcattgaacaaataaatcagcaaatagctgtgaaattaaaatcacagtgagtccaacaaaggaaatgaatgggttgtgatgagaaagaacaagggggccctaatttggactgaaccaggctgagtgcatctgtcaaaatcatgcctatcctttgaggctcagcagaaataccaccaccttcattaaatcagtctgttcctgccatttaacaggtcctctgccatactctcttcctccctggtgtcatattctaccttgatttagttttgggtacttgtctgtttcccctgagagatcttcaactcctggaaggagagattgtatttttttttttgtctgagaacctgttgtgagtaatcctctctcagagatgcccaggtgaattgttgaatgaatgaatgaatgaatgaatgaacacagatcttcattcctagccccaggcttccactatgggtatatagcagtccctgtggtgagagcaccagctccagaatcagctgcttactgactttgtgactgtgggcaggtgccttgacctctctgagccttcatttgccatatgggggcagtgctataaatagttgtaaggatggaaaagattagggcatgtgcattacttagattcatacttggcatataatgctttataagttagaaggaatgtgctagacacatccaacaactctcagaatcctcacaaatctgctgcaaagcacttataattattcctgtattatagctcagaaacctgaggtttcaaaggattaactaacctgctgtagtttgcagaataaattagattttaacacaaagcaaaacaaaccaacaaaacaaggccaatatgcaaacctgggattgtctgactccaaaagcttgtcttccttgacagtgtcccattcctctgccaagctgaattctcacctctgcagacagaggctgagatgtttgcattttggaagctcaccgcctggccaaaggctaacatattgttcatggatggactggacatttgaaattacatgctggccttgggagggaagagagaaggaatgcttgacttccacggggtgcctctgccttacccatctcaaagaatcagacccctctctcatttttcaagggccttggggtgagcatcctaaaagtctcacagtctgttgcagcagaaagcgtggctttgtcccccctataaaacatctggagattttcaagtttgtgcagaccccatgtgagcagccagccctgggttggcatggattggagaggcagagaaggcattcacttggctctgatttttcatcctgtggcctcagagcttcagaatacagagtccctacccctggtgtctccttcctctccatccaccatgacaagctgtgtccacattctctttttggctctttcctaaggtatcgggcacaggactatgtctgcccaagaataaaaattataccccttatatttccaaaaggagaggcatataatttatgactaaaactggggtactctgactgaaaatatctactgsttagccgtttctatgtcgattagagaaggtgtttatagctcagaactagaggagaagaaaccatttctttgtcactgagaaactccttgccagggtctctcagtgagaaacagsacatgtggagcccaagatagggcaaagccaagtctccttatcttatttagtgacatttttttaagagtaaaaaataatcacatgctttttgccaaatccagccctaaggcatggatccaacaaaacatcacattaattagataatctaatttccaaaaacagaccccagcgcagacacccactgtctagcagtgatgacaaagggawcagacagctgacatcgtggcttcctccttcagagttcatgtggacacctaccaagaataaggccttggccakagctttatctgtccttggactagaatgtttcttagtgatgccataacaacggggttgacttaaaacaatgttaatttattgtctcacagttcagaaggctggaaggcttaaatcaagatgtcagcagggccagcctccctctgaagcctgtagggtttctccttccttgcatcttccgtgtttctgctggtggctggcagtctttgacttgcagccaccactccagtctctgcttctttggtcatggggcgttctccctatgtgtgtcyctttcctcctctcctagggacaccagtcatattggattaggagctcaccctactccagtatgacctcattttaacttgattacatctgcaaagaccttctttccaaataaggcttaccttcacaggaactggggattactattgaaacaaatcttttggaaaaaaacactgcaacccattacaggtgcctaagactagaaagatgggtcagagctgctactgccagtgtgagaaagtggacaagttggagttcacctgggaataagatccttggatggaggagcaaactccagctagaggaccgaagccttgaaatcatttattctgcagatcagtgtttctcaaaacggggttcccctagccatcagcattagcgtcagctgagaaacatgtaaggcatgtaaattcttatgctccaacctaagcctactgaattggaaactctgggctggggtrgtttcttattttaataagccttcctggtgactctgmtgyacactaaagtttgagacccattcctctaaattctgccgtctctcctcactgcatcacttttcagtggggctgcccttggacactggcagatattttgggttaaagaagaaagttatttggtcaaaatgagtgtgggcagcattgtattggtctatgttgaacaggttccttgactgaaggctatctctgagcttttgctatgctgtatgcagtgagcattgaacatttgttagaagaggaatgatggcatttccagatttcactgcaaagagaagtgtcccttttgtatggagtttcccatcagactggtgttccgtgaatttacactgggaaacatggctctagtccacatatcaaggcattcagtgaatttttatgaaccgccttgtgagaacaagacactgtgctggagagatacatctgtgaacaagacgtggcttccgtctctaggaaactgatagtctagtgcaggagctggcacaccacaggctgtgggccaagtctggcctgccatctgtttttgtatggcccattagctaagaatggttttcacatttttaaatagttgaacaaaaattttaaatgaagaatatttcatgaaacatgaaatggtatgaaattctgatttcaatgtctctaaataaaattccgctggaatacaaccacactcmtttgtttatatattgtctaaggccacttttgccccccagcaacagagctgaatagttgcaacagagaccrtatgctaaagcctaaaatatttcctatctggccctttacagaaacaatttgcccacctctagtctagtgaagcaaagaggccctgaacaagtacttgcaaatgccttgagtgttatgaaggagcagtgcaaagaccacatgaytggaaggttttattgactgatagcaatggtggtggtggagtggaggtggagggtgagttaggaaaggcttcctggggagagatcttaaatatgagtaggacatctggaatatgactgtgtgaagaaggttgttacaggaaaaggaaacctaggacatgcagatccctgaattagaaaagaggagtgctcattgaaggaatgcaagaatktccagtattrctgtggattaagggaggtgagsccaagagtatttcagtatgtggccagatgcctggcaaaggccagatgtgccagagcatcttcgacggccatgctgagggccttaacttttgcctaagagcaagggggagtccctgagaagagtttaagcacaggcatgatgtgactgatagaaaccttgtggtatctctctggcttcagtgtggagaatgaggggcagaactaagtgggaattgtaccattgcatgatacaatgtaaatgattatgaagcttaggagtcaaccaggggagagaagctgagatggagagaagtgggtagatttgaaaggtgaaggttctctgtgatgcttggcctccctcctgccaggccctttgtgttctctgacaacctaaagaaccttccttcctggttactgggtctgtgctcttggamcctgatatattaataaatattratwgtttgttgcacacctgctacaaatccaccaggcccagtgctagatgctatgaaatataagaattaataagccctggctcctgacctcaggttcttagccgggagactgatggatgtagccactggactagaatgtaatgaggactgataagcagagaaacaagtgatatctgaggggactgatacctgaaaggaagtattgagcaaacagccctggagacgttagctctactgaagaggtctggagaggcttcatggcagaggcagcgtttaggctttctcttaaacaatgtgtaggatttgggaaggagaacagtggtcattaatccaacatgagcacaatgacaggtctattaacagcctccggtgggtgcaggggaggctaggggagccatgtggctggcatgagccatcagtggaggcttacagagagcaaagaggtgctcctgttttggaaactcaatctagactcctgattgcttcatgtgcctgacagttcagtgaaggctgtgctgggaccatgagttaccctcagcagtggatcagcagggcagcagaagacccactctttcactgatggccagggccctgcgtaccccaattcacttcaggcccttccaaggcaggtacaaatcatgaatcacattcccctctctatgactttgtttataggcagagctctaaagctgggataacagcaaactgcatcaacaagttctctggggcctctagcccattgatcctatgacttgttgtgattgcccctgacctcttcactttcttcttcagtttggtgctttggccactgggaccaatgacttccactgaagttttctggttctcagtcctgctttccagggctgtgacacagggtgatttgcagactgatttctgtcctgtgccagaagatacttaataaatgctggcaatgacgatgggtccctgaagagcagtttgcccaatttattttttaaagactttaaaaaaatagtatagacagaaaagtctataaaatgaaaaattacaaaatagcaaattattatagaaaatttgtgtcactaccactgagttcaaaaaataaaatactgwcggtatccccagaagcttccctgaccatcccttctccttggctggcgtctcacctttgacgtctcaagttcaagaaatctgagtaacaactctttctgcctagcttctagtaagaaaaacagctgcaaaaggagaaaaacaaaacaaaacaaaacaaagagacttgggattcaggtaaccacctgacctttcttccggatctgctcctccaaaaaaggtctccatccctgtcagtgctaagggctggatggttagttgttatggagacgtggggcgtctttccaagacgccagcaaagttgatgcctgcagcgctctggcaggtccctctgctctgcagggctcttctctccttgcagttggcagatccttataataagagacttctgagatgtaaaaggaactctcccctcatgtgaccttcatgccagtccccctggtgccaccccacctcagtgcagtagctgagcagtaacagagggacagccagtttccctctgtccaggggagattgtgggtcttcaggtgagagtgtggcggcactaacaacagcctagtcacaattcattagtaaacttggcattcaggttactgacatttttgcaaactgcactttctaacaattaccctctggttaaaatctgtatttgtagaaggaggccagtctgaaaaggaatgaggggaagaacgacttcccctggagaagtctgaatgaggtggccctctcttctaaaagaaaggtgtgtgccttttgagatttcaattattgagccacttccatcgggagctcttcaattatttatactgggtgtgttgcaagtagattcaccaatttagaaagttgggggaaagaggggacatggtaggagggaggcccccgtggatgcaagtgtgtgggcaagtccttttggcttcctcttggctctttttctggatccaacttcatcgtagggctggaccagccactttgtcaagggtatcctcctcactgaggtctggagatggggacagggtgtggatgcccctgggtgtagggaaccgacacttccagacactcggtgagctctgtctgggtggaaaacctcatcagaagccagattgaatcacaccagtttctaagacattcctcaaccatgytaggcaaaagagtcccccactgacaagctggggtagaaggaaacctgatataattttggaaaaaaaccttacttgagaaagaaggttctcacagctgccgagtctctctcgacgtccagggttggaggggtcccaggccatggagagaagattgatgggtctagsggagccaagtagagagttgaggctttgcagggccaggcgcttgccatccttaactcccattagggatcgagaaggaaaaggagaaggagttctctgaatccaatggaaaaagaagtcytgtctcctttccctgggctgttgaattgtttttatttcacattagcaactgctctggactctcttgtgtttggctgctgtgttggagacctagatccaaactagggtgtgtgggaacccagggacatagaggctgaagttttggaacccagccagttcttccaaggggtgaggtcagaggcagagtccagggagcagggcagctctgggagcctggttcctcaggctgggctgtgctcggagcggtagatcctgactgccgctgtatgcctggtaacctggccatctttctgcctcccaaagtctgtctgtcttgctagcccttggtttcctgaatggggatcatcttaagtgtggggaaaggctgtctgacgacctaattgggacagctcttttgacccgaagccaagccccatccaagttcagcaaatggaagaagcgggaacatgttcagttggtgaggtctataggcacagactggattaggtcctaaatcatggtggaaattttcctggcacgggacaaatccttttgtaaamaagaacattcatctttcttttgactgacatgcctggtagggcatgtgcctctcagaagctccatgtcatctgatctcatttgggatttagtgtttttatttgaaaatgtagctgccctgaggaacagcagttaggagccaacccccagtttaagcttcaagtcatggaaactggcctggtttacccagaygtcagtgatgcctgggaaagctcttgcttttccagtgcccactgagcagagatttaatttactcaatcggtacgtgtctgttaagcacattgctgtatgccaaacactttgggcataaaaggtatataggccttgccttcaaggattgtccaggctaactggggcaatgcaacatgcatggaccaaaagacagctaagtacctgtcccatgtggaattgggggagcagatgtgggccctggagacaggacagggagagctttggggagatctagccaggaaggagaacttcactgcacctctgggatttgatcagggaggatgaagatggttggggagcaatggggagagcatcccaggagtgggaacagccagcacggaggtgtggcagtcaggaggaccaagtcatagccgagaagtcaggtggaagagcaggtcagtgacgagtggggagggcagccggcagcctcagctccaggccttgaagatcaggccttgaggagtttgacttctatgcttagggcattgtggacttggcaggatttttgagattccagaagatatgagcgaagagtgaaaacaaagcaggacagaacaaaaaacakaatttcttcatttattatttcagtgcactgtgaaatgctcaccgtgtgctaggtgctgttcaggctttgaggatgtggagtgggcaaatcaggcagactctgccctgactgctagagaataagcacacgtgtgtgatgaaggtggtagtggtgggaagcaaagaacagcagcgaaggggatgaccgtgttcccttccgtgtggggcactgggctgtgacttacattgctctcgggttactcatctttttactccaaattgcttggagtcctctgttgactctgaagggaatattcaaccataaacaattcatcctrtctgctatctgtggttgaattctttcttcccagttgccccttgggtggtggcttggggccacggtaacacttgtagtatttcccgggaggttgttatagttctgtgcatttcctgcagtagtggtagtgaaggcattagatgccaggaactcaggcggttggtatggccctgagctctgaaaatgcttgccttcccstttcccctattgtgtgggccagcagcttgcagagctcctccagccctgagagaccatgcctccatccctcagaccctacctttcctggccccaaggctgcctctggctagtgtgacagacacaccctgggcccctgaagtctgaaagccacatttttyraggggaacctggccactatgagtgtggaatattggggccttaaatttcctgcctgtagaatgaggcatttgggctaggggagtggttcctagactttttgtgggataatcaatgaatttttataaaacagaatatcacaaggccaccagctttttattttgacaagcaaaaacataaaaaaagaaactgtcaaatgccagctctgccaccattgtcatttcattaaaaggacatgttaatacccaacaaaggagtaaygatataatgtcaaagaaaaggacagttcttcctgggagaggcccttcatcagttgtcttccactgacacacacagtgcgctgtactgaggcttttcattccgtaccacatcaggggcagcactgccytgtggccatgcaggacccatgggaacagagcacctgtgagctacctgcaggagcctttgctgaggagagtgaggctccttgggggctggatcctcctcctggtctacaggatggcaatgggctccctccggtaaaagttaacttggcaygaagatttctgcattcttttatgaacatgagggtttgggatttcctgtgtgtttggttatccatatcccagtctgccctgatgagaaacaaatgtaatttttgccttcctgctgggcccctgccacagttttcttgtctgggcaggtcttgagctgagcttctggggcaggatgggctgccctgcagactggcagctgagtctccgagtctctgatggacagcaggctgtcttggaccctgccagggtcatcctggctgaggactctactaatccaattcaaagtctctatggctctgatagtggactctggactgtcacttatattttccaattttattaagctaattgaaagrgaaggagattgttattttacaaatayggcacattggccaggatgtatgtattagccctgaaagtttggaggttgccttactaattttaggcagcatatgtggccatttgagaacatatctaatgtctaatgagcattgtattcccaggttggatccccgtcccctagcccatttctccaactctctgtccgtacatagtggattataactgaatttagatgtctgtactacaggattttgttacttagaagccataggttgtgagatggttgtttcagtagtagtagtaaacagaattttatatggagattccatctctgttcttgcacattggacctatcccaagacagtgtggaatagagagaaaaaatatggccttcagagttagaatggactagattgaaatttcagctctgccacttacaagatgggtaatcttggaaaattacccaatctctctgagcctcatgacattcctaccttgcagccaggcgtggtggctcacgcctgtaatcccagcactttgggaggctgaggcgggcagatcacttgaggtcaggagttccagaccagcctatccaacatgttgaaaccccatcttactaggaaaaaaaaaattactggagcatggtggtgggtgcctgtaatcccagctacctgggaggctgaggaggagaatcgtttgaacctgggaggcggaggctgcagtgagctgagattgcatcactgcactccatcctgggcgacagagtgagactctgtctcaaaagaaaaagaaaaaagaaaaaaagaaaaaacattcctatcttgcaggcttsttgtgaagattaagttggtgtaaaatcaccaaggacagaacacagtagatgtaagaggggatcagtgatctcctgagcaccagttgacccccttggtcctcagggaatgggagagcagctttgaacctggctctgagaagagctgaaaaggaatctgtcctgcagcatttcccgggggagggaaatgatgcttgattgacttgcccagggttacagagctgagacagtgcgtgcaaagtaagggacttaacaatccaggcctccgggtcagacagtttagagctggacagaccttggggagtgtttacatggctccctgcatttgagacaaagaaacctgaggcacaagatggtaaggacttgttaaaggtcacctggcctttttctaccatgaagacttccaaagagtagttgttcacacccagcgcaggggtgcttctaagagygagaatctggacagggcacccagaaagcaatggctaaaaatgcctcaatggtggagcactgtaggtccagcygagacamccagtaaactcacagggctttctgacagctcggggtaatcggttaggtcccagcttctttataagttcctgttgcctgaatctgtggacagtgtgtcccttccctaaaggtayagcccacagttagcaaacacagtaactgctaggtgaattaatcagtgcaaatgtcttaagccctgctggtgcagagtctccggggtgcagagcaggagaagtgatggcagccagggagaggttggactatgcaacttcccaggggcagaagtgaactctgccactcctgacaccagctctaggaaagacctgggtcccctgttgccctatttctctggtccttgagtctcagagtaaccacctcctccatccattccctttgcagaactcttgccatgaaaaccccagctggtggtgcccatgctatgcttgatttgcttgagctgctttgggtaatctgcctaataccctaatatgcaggattattggtacctgggagaatgcccgtggctgggaaacccgcccaggaggtgaaagaggttgctgggtggatgtcctctttggcatgggaggggggacacggaagacccagccccagcattcggggctggtgaaaacctgaggcraaggagaggagagcagcccgcggggagggaccagcagccccagggcttcctaaggtattgaggttcagacacttctggatcttaggccaaactgtgccacaggatgtcatagttattgtcatgaaayaaagcattttktaaaaagctaacatggggccgggcgaggtggctcrctcctgtaaatcctagcactttgggaggctgaggcaggtggatcacttgaggtcagaagtttgagaccagcctggccaacatggtgaaaccctgtctgtactaaaaatacaaaaattagccgggtatgatgacacacgcctgtaatcccagctactagggaggctgaggcacaagaatcacttgaacctgggaggcagaaattgcagtgagctgagatcacgccactgtactccagcctgggcaacagagtgagactctttctcaaaaaacaaaacaaaacaaaacaaaacaaaaaaaagctaacatgggcctatggacttttactcaggggatttctaatgtttttccccagaaaatcccttcactcagatgcagtctagcacagaaccataataggtgaaattgctcaatgcagaggcgcttttatttccgcggggtccggggccctgcctcctctgccctcccttggtaaccagcccccctggggcacctcacaatgctgggcctcaaggtacagaaaactgtggatttaactcaccaccccctctcgtctcccagatagggactcttctcagagaggttaggtgactggcccagggcacacagcctgtgcctggcttcatagcttctggtccagaaggcttccccctgcccccaccctttggtaggagagaaggagcccttctgcattgtgcccagttgaggacagcagcatgtggggctgctgggtcagtttcaacagacgagaggagatggggcaatggagtggccagggagagggtggggtggggctcctggcagatggaatgagtaactcagagcgcagtccatcaatgaaggctcaggggaaatggccttctgatgttgaccaggaaaatttgaggacaaaggggctgtgaggcatgaggcccttccttctctcacagccctctgggggtcaagcatcctgggactatcccatggttccagggtgctgggcagaacatccagcttccagggatgagaggggcttcccagcccctactctggtcccaaaagggctagcggagatggttttgtgctaacctgatctctcctgttccctgtcagaaccctacctcccactcaggtgcgtcaggcccggcagagctcagcctcttagtgctggagaccgctgggcagagcgtgctaaggactccaaggatacgcatggcgagggaggaagccaaatcttcctttagcagcatctgcatagagaaccgtggttcttagcaggagggcttcacagcccgtcagcttggccacgctcatttccaatgtgatactctgctccacgaagggtgaatttatggttccgggcaggttcttggcagagaaaggaactgtgtttctctgtccttgatggaactgccctccataggcacagggccctggaagaagggtcgtkatggtacaagcagtacccagawgtggcatgaattgagtgctctwcatgttaataaacctttcgtgggcactttgcagcagccaataatccttgcacatgcatwctcccgtctgctgctcacactgttcccgggakgacagcakgatgggtacgtgtccctttttggcatcagacagctggatttaaattcacactgtgtcttcctgggccagctacttaacctctcatctgycaatggaggacattagtaccaacgtcatagagttactatgatcatgctaaaaaacagtagtcgatagtataattattgttagtagtactatttactagtaatatctattctagattgtgcatggtaagaactgactttccatttgctgtagctctcctccctcctctcctccttyccccactccttccttccctcccacccaccaagatttgtcaggtgcttactctgagctcacagggattcaatattgaagatacagccataaatgaaacagacatggtgaaacccccatctctactaaaaatgcaaaaactaaacaggtgtggtggcacatgcctatactcctagcactcaggaggctgagacaggagaatcgcttgaacccaggaggcagaggttgcagtgagccgagatcacgccactgcactccagcctgggtgacagagaaagactctgtctaaaacaaaacaaacaaaacaaaaagaaacagacaaaaactctttccctcatgcagcttgcagacagyacacaatgatgaagtaaaggaagcaggtggcagacacactccggagaagacagcacagacagggagaggtcgggatgaggtggagagctcatggacaaagtgaggatgtgaaccaaagctcgagagaaatgagggtgcagccacggggatctctggagcagaggcagaggccagtgcagacagccccgagacgggactgggtctggaatgtcctggcagcatgaggaggccattgcatctgaagtggagctagtgagcggcagactcgcaggatgacaggcacgagtggggctgattgggtgtgaagacttcacttgtcctctgaatgggccaagaagccataggagggtgttgggtacaacagtgacatgatttcagttacatttttgaaaagtatttttcttcccagatggcctttgcctaaacaacttcccagatcctggatgaggaaccagtgtccaaagaactgacacgtagttaaacccgaggcagacttggagcttcaaggcttggctctaggcaggcagcagggaggggccctgggatcccctcaaggcgggcccagccagcttctcatgcctgaggcagtcatccagcaggtgtggtgcctgcagtgaccttggtgcctggttcagcttgacaggtgtcaggagtgtgcctgggggtgagagagtccaaccgggtgagagcaggtgtggcagcagctcaccctgtcagggagggtgtgcccagcatgacaggtcacctgctgagacttggcaatttgacatcctgttagggtgcagggtgacaacgggggacctgccctgcaagttgcagctgggtaggaatctgagtgttgagccctgcgttctgtgagggctctggctttgtggcacaggacttctttctccagagcagccctgcttcctgcccagaaccagaggacagtgactccacttgcctgccgtttgtaaagcagttgctttcagaaaggcaatgctctgttaccagattagggctcctgcaagaatcaggcagggtgacaaggcaggactcatccctgttcatagaagagaatatggagggtttgaggaatgacatgacttgctggaggccacccagaaaagttggacttggtccagagtatcttttgattttcatagttcttcctgccacaccacagacctgagagtcccagtatactgggtctaattcagcaaggatgagagacggagacagccaaatctgagggwtggggctgtggggtcctaggattagcacaagcttgctctcctgtgctagaccagagcagctgtcgtggctggggaaggctgggccctttgaagacaagcaggattagcccttgtcrtgaccctcacacctgaacccagtaccaggctaggtggagccttctgccagtcctaggaacaccctgaactccaggttccaggctggggcagcagagtgactgtcacttgggctagatttggagcaattgtcttatcggggaggcaacaagagataagggaaacagagcaactggggcttgcttcctggcccggtggtcacctggctgggctgggtggccctgagcttgtggctttccctctgggcctcagttttctcatctgtacactgtgtgtgtggtagttgggtggtggtggggatcctcaggaattgctaaggtcccttctcaagctttggtctttgatcttgtgattcagcgggaaatgcccaaacgcatcagatgaggtttgtatcttgagcaccaggtgatggggtscagtcaggcccttggccccaggtgacataggaagggtgagcccctctgcggccatgtcaacaaaaagtcatcrtggggaacaccactaaagggaatggggagaaggcatagaaaggggtgagggtgtaaggctgggcacagccccgtgagaggttgcctggtagggtgggtgtcgggaggggactgtggccactcttctctctggtgttccctgcctcctgtgcctgcacccttgccctgaattcctccccaccttctgatgtgggcactgaaattagatgtcactgttgccactgagaggcagctgtggcctgctttacacaaggctctagtggggagagagggcagggttggaggcagatccagagtggcctccagtgcaaggccgaatccctttctcagggagctgccaagggcagggggagggctcctgcaggacctcctctttctgagatggcctccccacgcgatggcctcacctctcatttttctccctattcttccctccatgttcctttcttttcccaagacatcttttcttgcatttcagaagatctggtggcctgtcctcctgaagctggggtagctggaggctgcagccagtggggtttctctcccttacacacacagacacacacacgcatgtgtgagcacacrcacagatgcacacacacatgcacacattctcagacatgcacacacacgtacacactcacacgtgcacacaaacgcacacacacatgcacacactctcacacgtgcacacacatgcacacactctcacacatgcacacacacatgtgtgakcacacgcactcagtgatttcctgactgacatcgggctgcccctactgggaagtgcttcctgtgtaaggacagggtcctctgcagtgggaggtggaaggtttgggcgtggctgcatatcccctttgctatttggaacaaaccatttgttcccctgtgaggcagtatcctgtggggccaggagcaagaacggaatgctgggactcaggaggcagcctctccctggtcctcagcgttctcatcttaaaaatgggaggttgatctaatggggcgagtcagaaggggtctgagatgtcactgggtctggggtccaccctgtgcgggaatccctgccccagctgtcctgggtggtggtcacacagcgcctactagaagccctgcaggagtcacagcaccttgccttatagggacttcttgctcattggaggataacagtgttagaacctgcacctccttatcctccattctgtgattatttattaaaggttcactctggccagtgtgcctcccagggccactggttgatgaaagtggtgcagcttcagtggattactcttagaggccccagccccatcagcgggtgcttcatcagggcagctgtaaccactgtgtgcycgggactgtgccaagcttcagcttccccaccaccttaatgaggcggcatgtttgtccccatcttacayggaagaggctgagactcaagggttgatgggccacagccatcagcttggaagttctggagcaggtacaagcccaggtgggctctctgcttccagcctgagctctcaggctctgtgcctttttctgagagatacctgctcttagttaccctgtctgtaaaatggaaataatttcacttgcctgttggatgtattataaggtttaagcaagacaatgcatagaaaacacttaattcttagttgctggcacctagttctggcttgttcaatggtggccaacactcttataatggactctgcccctgcatgttcccagcaaggctactgaaccttctctgctttttctttggagcatggagttataatgcctgctccccataagaggtgctttggccagagtgaagtcagtggtggagagaggggcctcttcctccaggcacaagatctgtggctagcctggtggctagtctggccggctggcatcaggctttaaatagctcccccatcactcctcccagtcctgcttcccacacatggtaattaagctcacaacatctagtgtaagcaaataataacaagggcattatctccctttagtctgtgtttttccttgcctatcataaagtaattaaaataatgaatgccttgtaaaacaataggtaagagggctggcgaaatagcattatctgccacatacctcttgtgctatgaattactgatgcagttaaccactgtgactggagggcccccctgcctcccagcctttttcacgttgatttctcctctccagggtctaccaaggggctgtggaacttgggcccccaggactgaggagcagggagctatcttccaggtccccacgtggtggccagggaccagttcagaaacatcctgggaggcttgactcaaaaggaaacactagagcctcagatgtgggacgatctccctgccctcctcttttcctcacccctccaccaatgtccaatattgaaacaagcaggtggttctgtccttgggtgaagggagaggccaggagagagctgggggtgaagatccatgtctcatttcagcagtcaccgagccatactagggtagtcaggagctgtggtccccaaagtrggcttccaagcccagcagcatcagaagtgcctgacatcttggttcgaatgtaggttctgggatgggcccagcacactgtgtttcaacaagccctctggtgtgcttatgatgcccgctcattgtgataaccattgctttatggtgtcagkggcacgagaagaagcaaggggtgctgggataattgcttgaacctgtgttttgtgctattggacactgtttaatcctgacaatgcctgaggggctggcagtactgtccccatcttattgaggtcccayagcggtggsagagctggattttcccccgaatctacaccttcagttaccatggttgaccctgtatcagggcctccccatcctcctaaataccctcctgttcagagtctcacagggcagaggctcagggaccagggcaagacctaacaggtcctatctgaggctggcctgggaggcttgggcagcaggtcccacacatgtcagcaggcagcccccagatacatctgcccagtggcctcccyctcctgggcctcctcttggatcattgtagctctgtggggcttaacacatttggaaagaaaatattagcgtccagggctgcaggtcccacttttctcttccccagcttccctgagccacaggcagccagagggagagaagcaggaatcgggaccagcttcctgcctgcygtggccaagtccccaagaggatgactcaccagtgcaccctccccacctgcctcccacgtgcctggcctccctctgccccgccccctttgtcactgcagacaaagcttttcaccactgtctttggttcttccccttactccaaatcacaatgatccccagtgtggctttgccttgggaattaattccagagttttaaatgatgaacataatttgctggcatctttttaaacatcttcatctgcagtcatagttgcagtgggtatttgtgttggggtccagttaaatgtacattgttagataaataatgaataaggttttagtataagcatgtcccatgtggtatttggaatatacttatactaaaaagttatttgttgtttatctgaaatttaaattttactgggtatcctgtattttatctggcaacactaaacccagcctttgtagctaaygaggggctgatactcatagccctttctagtcattcattcatggttattgagccaactctgtcccagacactctattaggcaccaaggctgcagcagtggggaaggcagacagtaagtgaaagaagtaaatgaattattaagtatattagcggttttaagtgctatggagaaaaataaagcagaaaagtgctattggaaagaaagtgttgcaaatttaaacaggtggccagggaagacttcattgaaaaggagatatttgagcaaagacttaagggagcaggccataagtctctgtgggagaagagtattccaggcagaacactcactgtatgcaaaggtttacagtttcggcccctrtgtggggctcagttatctgatgaaatcagccttgtttcctcaagcacattttaagccagaaggggaatgtattgtctcctgtaactggaaaggtctggtgtagatttcaggcacagctggatccnggtgttcaaatgatgacatcagtagtctattacttttacttttctctgcagtggcttcattctcagggaaggatgacttttcctattctttcctgcaaatgttccacgcttgagtcttattggcttgncatggatcatgtgattattaatggcccaattgctgttggcagggggtagaaaggactccaatgttggagccaatgtgaggccatctgtcccctttgaactacatagactgagaggaagagataattttcctaaaggaaagtgggggtgctgctgtgaaaaggggcatagaggctgggtaggcaaagaccacaggacatctcccacactttcctcctccctcctcagcatgccctaatcttagacagattgcgtttcctcttgctttggtattttctttttctttaaaatgggaggagaccagaactttgggaggctgaggtgggcggatcacttgaggtcaggagtttgagaccagcctggccaacatggtgaaaccctctctactaaaaatacaaaaattagccgagcatggtggccgcgcgcctgtaattctagctactagggaggctgaggcrtgagaattgcttgcacctggtgggtggaggttgcagagagccgagattgcgccactgcactccagcctgggtgacagagtgagacttcatctcaaaaaataaaataaaataaaatagaatagaataataccatccttctttgtttcactaagatattttaagaggaaataaagaaaatattcttttttaaataaaggctttaaaaaaatcaaaggcataatttaccccttctgctttactcctatacctttaagctagtttccatctcagctggggacccsttctggctctggttctttatgggtagagcatgttatttaaatccattgttccctatgtcttaactcttgctctctctgttgccaggaggcccagaagattaacaatggctcaagccaggcrgatggcactctcaaaccagtggatgaaaaagaggaggcagtggccgccgaggtcggctggatgacctccgtgaaggactgggcgggggtgatgatatccgcccagacactgactggcagagtcctggtgagtctccacccacttctcacaccaggaggccttgctgtctgggccaaggtggctttgcttatgagacgtgatattccccagggtcttctgcaggaggctggctattgggaggtgggggtgagcagcaagtgytcccgcgtggtcatggaggagaggctcggttccttgtgtacagtggtttgtggagggattttcaaggagtgggatttgcagtggagaagggttgttgggaagatgtagcacatttcctctgctaaagcacacatgcgcgcacacacacacaccctccatcatcttggagaggagaagagggttaaggaaatataccagaaactcatggaagggctacaaatgcggggatcctggggagtgctgagtgagtgtgtgtttggtggtcttcgggggatgttcttcttgtcctgtggtagcccatagggaccccctcttgcagcagtttcctaattttctgcagtgtgtgagctgggccctgtgcacggtagaaatcagtcatgctgatggtggatgcatcagtagcccacctgaggctgcctggcccgtgtacctagagctcgcttgtgtgcccttttctgatgagattgtctcctaagsccacctgcaaccagggctgattctgccccttctctgtatgtttccaacatctctctgatctgcttatatgaagcttggcttcactggctggcctcatgagcccttggtttttgtcaaggatcattactgggacaggcttatagtgatcaaccatcccagtttgcctgagactgaggggtacatgagacatgagtctttcagtgcaaaaactgggaaagtcctgggcaaacagggatgaattggtcgccatagccaggcccatgctctaggaaagccctagcttgctttcttgggtctgctctgggtcaggagtttccctgagaaggatattgcattcggagtgatttctcattgtgattctggaagctgttttgtttgggccacctgtcctggcatgaagctagggctcagtcaagagtcatttggctcatagatggaaggagtagggacatcctgaggcctgcgaggctcaaagaccaggcagggacactggaaaacagtcattatctstgagtctcacagcaaaaactcagtgaagaggtgactgtagatggagggaggtggtgagaatttcacttctcagaatccttcttggggagaactcaatgttatgtctgggatcaatatcacacacacttttgtgggaaggagtgagagaatgaacgyggtgcttgagtaatcaaaggtgctggccacacagccttcaagaaagacaggttctgttcaccgagggatctgccrtgagctgtgtgctgaagggtctggttatgaaaccatggctgatgtcaattgatggcaaaatggaaagaggggacatttaaagttggagttttggaggaggagagagaaactggtgaggtcagtggctgcttggaggaaggcagagagggagacaattcagtctggtgtgacccaggagggacagtgtctagtggggacttggaggtgacttgctgttggctgagctgtgtaacagcacctctatctctcctcctgcctcttgactgaagtctccattgctctttcatgcttgaagaggagtggattctgcattggaaacttaagagaggttgaattctgagtctgggtattcatggggacaaaatggaggtagtgtattctatatgtatggtggtgatagtgaatggggagcagcagacagtttagctgcacaaatgtgacacttgttccttccatgtggccattatagacagttctaattttcttcatcagcattgcaagagttactgaacactaattctgggccaagtgtatttgtttcagctctggagaaaacaaggaaggatcctgattctattgcaccatatgcggaagttattgaaggaatgcatggaggataagtgctatgagtacaaacacggtgtgcacttgtggagtgtggggaggggctgtaggggaaagtagggctgatcagaaaagctttcatagggaggaaagtctttgaactaaaactcccatttcaagatgagctgctttatggcgggaagatataaaaaataaaaacatatccaggcttaaacacaagaaaatgaccactaggtgggctggaatttgtgaagaatacttaataagacagaatgcatttgcagtgagcttttaagtgtgagttaggatcttgagagttaaaggagaagaaagccttcaaagtgaggagcaggaaaaacagagaaggagcctggcgctctgggaaatggggggtgcagaccccaaagtctggggaagtgtcctggagacagcctggtggggctttaaaggccatgctaaagaattttggggccaggcgtggtggcttacrcctgtaatcccagcactttgggaggctcaggtgggtggatcacgaggtccggagatcgagaccatcctggctaacayagtgaaaccccatctctactaaaaatacaaaaaattagccagtgtggtggcgggtgcctgtagtcccagctactcgagaggctgaggcaggataatggcacggacccaggaggcggaacttgcagtgagcggctctgctgagatcgccccactgcattccagcctgggtgacagagcaagactccgtctcaaaaaaaaaaaaatgaatttttgaagtttgtagaacaaggagattttgaggcagggggtgttgtacagagagagctgggggacaagtggagactgaatgggtgaggctagagcttggaggctataggacaagttagggcagtaagctactgctttagtgatggcatgggagcagatycctgatgtggtcctggtggggcacggtctgcactgacaccaagcagaagatgcaggtagcccatgtgggtgatatcatggaaatggaactcattgggcccagcacacccagcggccaccttgagactctcctggcaatcacactgttgaacgcctcttgtgatccaggcactgtgctaaccttatatgttatgatcagtttgaaggggaaggacaatgtcgtatttcttccrtatctccttattgctgttgtgttgtaggggttcattacaagaaaacaggccaatcttatcagtgaattcatctctgttttacagttgagaaaatcaagatatagcaagggcaattatttgtctaaaaacattcagctttgagtgacagagccaggctagtacctgccagctccctgtctcccagtctggtgctccttttgtgtcattacttcccagtcgaagataatgccttttcttttctaagccactgmcagctgtcactttggctgtgacattttgacattaccatcttttagccaatttggtcctgaggatgcttggcctgcttgttaaacatttgcatgtagaagcatggtccactcaggcctctttgcctgagcctgcccaaggtgccagctgctctctgaaggtctccttggagaaaatcctgcccaggctgttggggccatgcagagcaagtgggacctgctgcacagaaagcaggcatctcagagctccaggcggtatcctgagaataggcctgccctttaggagcaggcaggtccctgcactgaacaaagaagagatttcacaattaagtaatggcgggcaagagaaagcagcactgcctgttcagaacccaaagctgtgtttgtcttgagccgtccaaatgtttatccctgcaacaatgggaccaaagcaagaccagacagctggctattcagtttcccgtttcaatttttaatttgttttccttgatgcacgctcaggagcttggcctcctcatctgggcctctatctcacctgtctaattgtcacaggtgtgaatctcgaagctgggacatcatgagtaaggtccagctgggsaagaatttgccaatacaacctcagaatatctgtaggatctcccagacgagcacatccgttattcactaagtgtttactgctcatctgtacctggcactgttcaaggcactgggcataaagcagtgagcaacagagatccaggtgtgaattatttatattgataaactagatataaggatgcagagctcaatttaagaaatgacaaatgataattgccattcaccagtgctttttatagtcaacgcctggagcctgattatccacatgataaaaattccttgaccccccggctccagatctcagaatagcctgtctttgcctcctctctcaccctggcactcaggctcaactggccaaaaacagcaggactggacagagccttctcttggagcacgtggctgagggattctacattaaagtgaacaccaggctgtcaagagtactgcttccttttatttttttcttaactaaacaaatgtttattttctgattataaaagtaatatatgtttsctttttttaaaaaaattgaaatgtgctggaagacgtgctgataaattccactgtgggatttggagtcggctcatgcggagggaaatttggatatagcagtcaatgtcgtcaggatttctcttaactgtttgggtgtcattgaggactttgttcactgcatctcatgttacctgctttatgcacagactcatgggataagtagtgttttgcaccagagattgttgtggttttcctggtgaacatccagtgagcatgctaaatcgagaaagggatcatgtctctcagtggtggctgctcagagccaagtcggtggcttatggaaaatacagagtggctcaggtttgcgctctgtgtctttgcacccctgctctggcttgtcttcatcatctctcctctcattttccctttgccctacttttcttactcctatttggaatttacatgtatgcagttatgtgttccatacatttttgtcaggtaaattaaatccccctaagaataaggtggtttctaaataaagagggcaagaaacgtatggtgtaggttttagtatagtttggttgtgctgtatagaatcataagccaaagtcaacagtggtagtcaaattcagggttggtaagtttttccataaaaggccagatagtaaatattstaggcttgcagaccatgtgggctccacgactcaactctgccacagtagtttgaaagcagccacaaacagccttggtgtgactttgttccagtaaactttctttatagaatgggagaaaatatttgcaaacaatgcattcaacaatggcctgatgtccagaattcatgaggaacttaaaaaactcaacaacaaaaatcaccaaataacatttaaaagtgggcaaaagatatgaatagtcatttttcaaaagaagacatacgaatggccaacaagcatatgaaaaaatactcaacatctctagtcttcagagacatgcaaattaaaaccacaattagatatcatctcacagcagccagaatggctattattaaaaagacaaaaaataacagatgttggtgaggatgtggagaaaaggatcacttatatggagatgtaaattagtacaacctctatgaaaaacagcacagaaatttctcaaagaagtgaaaacagaacttccatttgatccagcatttctactaattggtggctacccataggaaaagaaatcattatataagaaagatacctgaactcctatgtttatcacaacactactcacaatagcaaagctatggaatcaacccaagggtccatcagtggatgattaaataaagaaaaaaaaaatmcacacacacacacacacatacacacatatatacacacacatgcatatatatcacattatatatgtatatatattacatttatatatatacaaacacacacaataagatactattcagccataaaaaagaatgaaatcatgtcttttgcagcaacatggatggaactagacaccattatcttaagtggaacaactcagaaacgaagtcaaataccacatgttctcatgaataagtgggagctaaatagtgtgtacacatggacagagagtggaatagtagtcaatggagactcagaatggtggaagggtgggakgtggcgatgagtgatgagaaattacttaatggttgcartgcacgctatttggatgacggttacactaaaagcccagacttcaccactgtgcaaaatatccatgtgacaaaactgcactcatactccttacatttatacaaataaactgtatttatagaaatagggggtagagaaaacagttgactggaaggaataagttccagcatgtgatagtacaatagggagattatagttaacagtaatttattgtacatctcaaaatagctagaaaagaattagaatgttcccaacacaaagataaatgtttgaggtgatggttttctgttaccctgatctaatcattatacatgtaccaaaatatcacatgcatcccccaaaatatgtacactaktatatgtcaatacaacgttttaaaaaaagaaacaggtggtgggccagatttgtttcacacaccatagtttgctgactcagtctaatttatccccttgttttatatataaagaaattgaaagtctggggctggaggcgaagagattctctaaggtcgagtagcaagagtgtcacactctttgtaaaggagcgttacagactcagtgatacacacacaaagataaatacaggcacacacacatactctcactatccacattgtcacttagtttctgcatgttcatattcatttccatgttgatctcacagcaactgtctccctagggaaactatgtcctgtggtgaaggacagcctcacctcaacttgggagcgacatctacactgcctagactttacctcaaccccctgacagattcaatgttttgtgtgtctcttcaaagactggtcttgccaaaatagctaccagctcctgagcaaagctagagagagcccttagaatcactctttgtagttactttccccatattcctatgctgttacatctgtgtattgctccaggaagcttacacagctaattctatgaactgaaagcatatgctacttgcttgaatgtatagggatgatttatcgatgtaagaagaaagaaaaatatcagcctctctctttatccccctaaatatgttgcatgtgtggcattttacattaacgttatatacatagcctggaccatttcatctttatctccaagggcccaaaagaaaatatgtgtcaaatatgcctttcaaataggaataatcctattggtttaacagagttaaatagatgtacattcactgatgtgctgtttgcgcatgaaattagactggttgaacccagtgggagtacacatgggcacacacataatcaaatatatcacattcattgcattcacttctgttaggtgccctatggaggttgtgacatttcccatcagtatcctctacttttctttctcagtggtgcctggtggcaaattcacacacacttctctctctctctgtytctgtctctgtctctcacccccctcatctatgccccagcttttattayattttaggcaaatctatgtaaaattcttacatcattggccaatgccttgtgtagcagaaagactagaggtttcacaggactgtacttttagtaagaatgtcccatagtgaataggtatgtcctgctctctgctattgggaatcagttggagttttattggcattgttttaacactcctaagggaggcttctgtttaaaggaaccatatgataatttccttccaggacttaatagtggttctgtatttcatcccatgcatagatactgaaatcacattatgggtatcagtcaaaaagtcaaagaagatacattctttttttactattaaacatgaaattttgtctttatctaatgaaagatacactagatttgcactagatttgttatttttgactcaacatcatttacccagatgagaaaacatgagtcagagaaataattgaattgagcagtctcccccgacaggtagtgagctgcctgttactagaaatattcaaagagcagcaggatcgcatttcatagtgctgttgctgacagttggttagactttatcctcatggctttaattaggttccatagaacactagacccacgaattgttcccggataaaaatggttccctgggaacttggatagacttcatttctcatccccctcctcgagattgccaatgcatatcagcatataaatacttacagaagtcctgcagtcagaaagcggaaaggctctgttttgcccagcattttccattttcatttccctgtggaatcctttccccatgtaatacctgtgggcatcacatagcactcactttgggaaacatttaattagcccagggatcagttagttatagcctgtgggacagtctggctcattgcctcttttgtgtggttcataagctaaggatggtttttacatttttttatttttttttcagagacaaggtttcactctattgctcaggctggagtgcattggtgcaatcatagctccctgcaacctcaaactcctgggttcaagcgatccttctgcctcagcctccctgatagctgggattacaggtgcaggccaccatgacatgctatgttttcttaaattttttgtactgatggggttctactgtgttgcccaggttggtcttgaacccctgggcccaggcaatcctctcaccttgacctcccaaagtgctgggattacagatgtgagccaccatacctggcctaaatggttattttttaaaaatcaaaataagtgtattttgtgacatgtgaaagctatatgaaattcaaatttcagcgtccataaacaaagttgcattggaatacagccatgctcactcatttacgtatcgtctgtggctgcttctgtaagaagctacaaaggcagagttgagtagtatccggagtccaaaacacccaccagcstaaaataattaccatctgtccctgtaaagaaacaattgccactccctgtatgcctgtcaatattcctcttcaagtggcctacrggacttgctccataagttacctatggcataggtaatagataagatataacatctgtccccttctcatggggacgtgtctacattcacttccccaagctcaactaagtactgcattagagatggagaggccagagccaggtgggtccccaagttccatagcagattcccagctggggtgaacatatggatttccacttcgcaaggtcaggagaatatgtctgagaattttgtagcagcatcattccttgagtttctccatccacctgcccactgcttcggcagcccccacaccccaggccctgctggcagctcagagtctaagccttacccccaagaggacccctgatcagggcctgcaggccaggcacctcagctcgcagcagctkctggtctgcaggcctcgagccatgtgctgggctctccggcacgccctgtaaagagcagctgttaattttactagctggtgtgttggctcctctgccctccccagggctgctgtgaaaatgaaggagagtttcagaaatcaaccctcagttggctccagagtgaggaagagcctcctggtccagggacagcccacttgatcctggccactcatctctggctcccaggccctcagggctcygatggcaagtgctggcatggctgttttccctctcctctgaagtttccaggtgcatgtgggtgcctgctttggccttccatcccattgtctgtctgcccatccatctatgtccattcatccacctgtgtgatccaccgacattgattggtgttccctagtatacagaactgagcgtagcacaggtcagtgggggcctggtaagcaagcagagcacttgcagcctctgtgcagtcagcagccagtccggcctgcttctgccggtcctgtcttgtctctgtccgctttgcttcagtctctgttggggcctgggagtgagaaaccctgcccctttgtcagtgcatcatgatctgaactagagctcctactcttttttgatctccatcttgctccttgtgtctcgttctcacttgattggaacaaacaaggaggatgggtggagcccatagcagcctcaaaactcacttcagctcttgcattgcctctctccctgggacacccatcttgggaaggagctgctgtgtgtggtgcggctgggcagttggaagcccagcctctgcagactcctgactcccagctccatctgtctcaggggcttggcttttaccctgggcgagtggcttcattgtctcatacctcagtttcctcatctacaaaatggggacaataatagtccctgcctcttaatgagttaatgcatgtaaaatatttagaacagtgcctctgacatggttagtgcttgataagcatggttattattatttttgttattgtgtgtgtgagcccggtcaccatgtcatggargaaatgggctggtatggagacagacgggtcagggggtgaagaacaaatccttttctggggcaggggtagaagaacagcccttgagcctccccaaacccagacatcttccaagagtgctgagcagctctgggcagggccatctgaaangctctgaatgccccaggcaagccctggtttggatccatccagatgatgatgtttgctctgtgcacacacttaattcaggcttgtccaggctgcgtcctctttgcagctggctcatgccagcctgactcaccattgtcaaattggccaggaaattctcacttcatatagcctccctgagctggctggggactggagaacgggctgggctctccctggagctgtacgttgtgggcgcatgtgtcacaggaaatgccttggcaggacaacagatgagtcttaaggaaaaagggtcaagtgcacttactgtggtctccgtatccacttctccctggaggtggggcgaggctgacagggcagggacaggctggtttcggagggcacatctgcaccagtatttggggaggtgggtttgatgtacattttgacaggtagtgaccacacattcattgaaaggagatgggaaagcgtgtgaggtcaccagaasataaagacccagattctactgcacatgcgaggcagctcctctgagctattcctccatcccttcatccattccttcaaacattctggagcacctgctcggggtcagatactgttcaatgtgctggacatatgttggttcattcagcaaaagctgcaaagtgcagtcatccaaagtgttgaaggtggaaatgttatgcttgcattttctagaatgatttggggtggcaaggtttctgaagtagggtttagtgataagtcagaacctgtgacccatctctcagtcccttggacaggcctgggagctcagacattctagtcctgattgcacatcctgtgcagttctgcagctgaatcccaggggcctgggcaaatatgtgagtagttggtttccctccctgcctccctcccttccctcccttgcctcccttaccttccttcccttccctcccttcctttccctcccttcccttccctctctccctcccttctttccctctctcccttccttccttcctccccactgccccctyccacctcccccactcctccctcctccctccctcycttcctccctccctcccttccttcctcgcctcattccattcctccgtccttccctccctccttcccaacccatgaaagctggcgccccctggaggcatttcaggaaatgaaatgtctgtatttgcggctactgagtygggctgggagacttttcttacccaggttttcccccaaggccttcagagggtgctgatggcttagcactccgtttttgtcagaaaaatatccttagagcctccatttcagctgcgagaaagtttgtttagcagggagactcaaaaatagagatgatgatgacaaagtcatcagcctttgtcgttgcaggggagtgcatgcttggaaagtcacactcgggaccacacgcaagctgatgcttccaagtttagtttacgaggctatgtttaggaggaggcagactgactcgtgcctacgggccccaaacagcccaatttggtgcactaaaagcctcatttttagactctgggtccagagtgaggctttttccagaaaaaaacaaacaaacaaacaaacaaacaaacaaacaaaaaacctacttcagggaaatgacaacaacagaaagccaccatttgccctaaaatttttattgtaaaaactattctctcctgtttgagtagtgagggatctaggacataacagtggcttctctggctttcttaaggaatcagggcacttggaaactcaattaaatgtacccaagcctcttaagcaccaaggctatctttttgctcatccagttaatttcagtttgtaaaattggccttgtgctgacatgatggagacggggtgagggtgggaagccagggtcctctgtgagcggaagcttgcttctctgttcacaagcctccaagggcacacatccttccctggggcatcaagggggaccattaaacctgtttgcaccacgtccctgggagagcaaacttctgggccttccttgtttactggaggttggttaattcggaaggtagatggactgggcatattrgttccccactggcaggagcagcccaggattcagcaggttaacgcaaaggatcgagaaactatcaccttcctagaactgttcccagacttttagcaaacaggctgaattttgacctttttcccatttttctttttaatcctccctccccacatgttttgtggcttttggtgaaatggctgtcctaagggaaacaggacagttcattgaaaargagagagaaagtaaagacccctttcccacaccaccttccctcagatgcagcctttgcttacactaaaaatagcttgaaacagaggctgaatcacaaaaaaaaaagtggcatttcaggggacagaggctgccagctccctggctgctgctgaagtctgttgggtttgttggtctctgagccccgacttgcccaggaaggcgtggggtttggaagtgtactgggataggtccagaacattctttttgtttctagagcaagggcctggttgtgtctgccttggttggagagtctgtccagagctaattatatcagcaggcactgatagagcctctgcctggtgttatgcctcaggggtggaaaatcacttcctgcaaaggaaaggagttgttttcaggagctccttaatccctgaggcacctgcatgggctcccagggaagctgccaggaggttattgtttcctctgaaccatgaggtgggcaacttggtttcttggccacctgagatctctccaggaaaaagctcagatcatcagaaagagagaaaacagtttactcaccttggtctatgctgtgtgtctctctggcccttggggattcatgacagtgtttgagatcaattctggatatgggagaagagaggcaagtcacttacttttatctgaggagctgcaatcagcagaaacctggatactaaccctggctttgctatcacttttctggttgaccttggacaagtcaattccctctccaaggcctcagcatctccataaatagagggggccgcagtagtttttcagtagttcgttcccttgcagcccaaaatatctttatgttttcttatccccttcactgtccttcatcagcaaaggccacaagtgttaggctcacatctactgtgcccttggccctgtgctaggcaccaggagaactgcaaaaggagagagaatgcacttttcttagctgccagagtgattggcgtgaagcagagttcatcaaggggtgtctctgcatggctctcccatggttttgcctccatttgaagtaaaatctgaaactgtgtccctggcttacaaggccccgtgagttacggtgcctgcttttgactcacctccaatgattcttttccttctttgctcctttctagagaagaagcaaagcctataggtagaagcatgtagatgggcctgaggcactgggcagggggaaggatgccgtgggaggagggggscatattccaaagggccagctcaatgagaaggagttggcttcttttgaatcatttcagccatggagctctcttttggaaccytcctcagttggaagcctctaaggggatgttgttcctagttggtatcaaacgtggtgaccccactagccccaaatttgactggaagagcctcctttccaattgagtatcctctgcttgaggagctcttgggtgagataacagcccctatcctttgctctttgtattgcttttgactgaactgctgcaaatcatggggcccctgaaagtccatccctcctccagaggtagaagcgcctccatctctgtgtacctgaaaacaataaaaggcatgtttatttaaaataatractgccggaggcccccaggaggggctgaggatcgaggaaacattactgtggccaaagtcattttttatttctggagcaaggtagcagactcaggggggtggcaggagctgccaagctagcccccaaatttatagcaagggtgttaaacactgtgggtgatcagtggagttgacattgcagaaattccccaaatgaaaattccttgtaggttaacttttagatgaactttaaaaaacaggggcaacagaccctcaatgggctatttcaagtgtttccaatttcattaacatgatttaagcaaagactcccccttgcctccctggatgctaaattagaaaacatcactattcctctgcccttgtgcctagtttgcaaaccagtgggtttatctggttgttttccccagagttggagcactgcagctgtttccatagcactgyggcccacagggagttgtgtgttgggggctcagttgttgtcttacagaaaaaaaccttgtaaaggcaattcagcaagccacccttctagcaccaagagatacaattcctcttcccggggctgagatggagagatacagatagagagaaaagaaataaataaataaccagtttctctttcatttaactctcagaaacagcctctggtgctaattatttctgctgtagattttgtcagactttgaatcccaatccttttgccataggtggtatattttagagatgcaaaatgatataaaaaacaatccactttcctgaaagataattttgtgtacattaaacagacacattaagccatttacaagagagttgtttgttctcagggatttggaggaaatctgaatttctaattctgggctctttaataattttcaaaagaactgaggctaatgattaaacgtctttgaacttccccaggctgtcttctatcccatgatctcaaagcatttgaaaaggaatagaattctttaccttgatgaaatcagcaggagagtagaggagacaccagccccaccaggagctttgtggcagaatgggggaacgtaaagtaaagaggctcaagaaaagtgcacaaggtcactttcagagcttcagatgtggagttgaatgaagagccttcataccagttcttatttcacagccttggctgctaagacttggaaagaaggccaaagagaaaagaaaaccaaggtaggacttagttaaggatgtctataatgagattacacatgacatgcaatcttatctggctctagtgtttaaggattagaagakatcaagtctagcaatggtgaactttcatcatctttcatcagctttcatcttctgggttcattctgattkatcagtagcagctacagagaatatttggccaaagatttaaggttcagcagcaaacagtcataatggctctgctctaaagaattccgagggctgggtgcagtggctcacgtctgtaatcccagcactttgggaggccaaggcaggtggatcacttgaggtcaggagtttaagaccagcctggccaacatgctaaaaccctgtctcaactaaaaatgtaaaaattagctgagcatgctggcaggcacctgtagtctcagctacttgggaggctgaggcaggagaatcacttgaacctgggagtgagaggttgcagtgagccgagatcacrctactggactccaacctgggtgacagagcaagattccatctaaaaagaaaagaaaagaaaagaaaagaaagaaaagaaaagaaaagaaaagagaaaagaaaaaaaagaaaagaaaagaaaaagaaaagaaaagaaaagaaaagaaaagaacaattccatgactgactaatgatgcctgccatgagtgccagcttggagggtggtagtactagtgttatttgtgccttagctacctgttctaggtcacattccctaaagtttacattatgtgtgattaaagtggggcttgtccaaggtcatttggtcagtttcagacatgtctcctgaccctgtctagtatttgataccccagctgcataggttagacctcagagaaacagcaaatttgtcagcttcctgtagcagccttctttttcttttcttttttcatattgcagcctgacttcagatttttccatctggagactttctttagtgtttggagagcagagggggtggatttcagagccacagtgattctacagacaaacagaaatgcaagcacaattttcctgtttgttatgtccactctcaaaattctctttgcatgaagcacacgctgatcacagccctcccactgcaaagccttcccctcagcccactcccgggttctttctcccaatcgctgcagatgcctttccctgtgccccactcccccggcactgtaaaaagcttttggtgggggttgatgcgtcatcatttccttccatcatagcctcaccttctatttcttcctgtttctcccttaatgttctttctcttagctattcatgctcacatcttaatggctgtgcttacagagataaatacattttgcctctgaccaaaaacagtttctgccctgacttgaatttaaaagcctgccagaattgcagtggggagcagaggcagagtcctcagtttcatcctgggagccataaaagttttctaagagtttatcatctccatcaagatgaaaatgggatttcaaggcttcaaataggaaagataaataacaaggaaaactccagcttttgtcaaagcaaagttctctttaccagttttatgagtctacctgttgtgcctgcaccctggcatctgtttcactgtggtatcagacaaagccttctccaggaatttatgcaaacctacgactggatagagaatttcaggcaattggtagagcttggaagacggctgacaagtcatattcttgggccgtaactcactctcagactcctcattcgttcctcaattcttcctcttccccttccagcataatgggaattggaatagaaagcsctattaactgtaaggcctaggctgtgatttataggacattataacaaacgggactayggttygttgtacttggctatcttttgcatttgaggtggccaggattctttgtcaggattagattttgcccccttggcctcagtaaatggctgcatgcaactaggaaaggctcagccagtgtttccagctgctcaagatgaccccatgtttcctttgaggaaagcagtgctatagagcacccatgtgccactctggatggccacgaaagtgcccagtgagtgctcyttggaacttgtttctgatgtgaaagttttggtgggaaactcrgggagacatattacatcctggtaggaggcacgtcctatggatttgcccttgatgcttctttttccattgtcctggcttaagccctgtgaccccttccttcactcattatagcagctacatgtcactctcctcatttgtcccatctccccgcttcagtccatctttcatgctattgccagatgaattttccccaaagccagctttgcttaggtttccccatggctcagagaccttcagtggctttccaaggtctaaagcccaaacacttcaagcaaatggtcagggcccctatcctctttccaacctgtccttcttctgctctcctccatgcactccatgtgttcaaatcctacctcatctttaagatgcagtgcatagtgtttcctcctctgaatccatcagtcttggagagtattcgcatacacttgtgaatgtgacttatccactctaaaggcaatgaggctgagtggttaagagcacaggctatagagccagactggctgagtttgacctttgttctgccatgtactagtgtgaccctgagccagtgacagaagacaatcgtagtacttacctcayagggttattatgcagattacatgacctaatatttataaagtacttagtacagtagctggggcagactaagtgttgtatacattgttaataaaacatagtaaactgtaagttcactgagagtcagaaacatgtggtttaattttataatcctctttgtcctgtgctgggctgaaacaaccttgaaccagattgctgtgaaaatgaaatttgaagagagagagagagaagaaatatatgtgaaagcacattgtcatatttttattcaataatcaataattcaataatcttattgagtatctggagagaccaggctctctgttgggtaaytgttgatcaaaatggaatgagatataaatcatgtataaacacattgagtatgactgtgtagaagacaagtggcaaacattattcttctcttgtccccatgttacaggtgagaaaaccaaggctcagagaatctttaatagcttaggtgagatcacacatccaataagcatctgaactgagatttaaatctgggatctcatgactcgatgacccaggctgttttcatgttaccatggtgcttctcattcaagaatgagtgaaggaatgaatgggcataggaaagaatgaatgaatgggaagatctcaaacatacgtggctccagaaagagagcaaaccagaggcttgccatagaaagtgagttgtaagtcagcttgggcaggtagcaaatccctgaagccataaccatttgtccagtcgagcattcactatggtggtgagatggggcagtttcattgcctcccctttggggaccaccttgctacccctagtgtcatacctcagtgctctccagttatttccctctgtggcaagagtggctttattttcttctcttttgggtattacccaggacaaacagtggatgtgacgatggatggtaaaggtacgtcatcattccctctttgatgtgctttcatcataatgggcctatttggaaggtttccataagtacaggaacaatgcctctccactgggcttcgtcagccaccaatgatccgagcaccagggaaaaagtctggagtgatgctggctggtttccatggcaaccacggcttgcctcaaccctgcacacatgctgccctctttccaagtaggaatgtgtttatttattattggtccaacctgggagtgcctgtgcagctgcataggtgttgtccctacctctgccattgaggtcatgttctcaactgggagatgaaatcacagctgggtgatggaggcacggtatttgctccaccaggaaaagctctcatttaggcttcagatcttgtattgtccatcagcgtgatgccagtgatctccgcgggggttagagaggctgatctagaaccattagagtcagacaccatctagggtcctgcggtgaatcgcaaactgccccagagagctgatggtgacgcacaaatctttcataaacatacagcatgctgctgtcccttggrgatgcccatgagctggctgagcacgcacaagcctgagaaactytaaacctgggcagtccaacaccggtggtcagtgagcatctgaaatatgaattgctgtgtgctgtaaagctgggagtagtagtgcacacctgtagtcccaactactttggaggtgaggcaggagaatcgcttgaggccaggagttcaaggactgtgcagtgagctatgatcatgccagtgcactccagagagaccctgtctctaaaaaagcaacaatgctgtaagtggaaatttagtacaaaaaaagactgtaaaaaaaccttattataatgtttatattgattacttattgataatattttgtatagattaaactccattattaaaattaatttcacttttttctttttacttttaaaaaatatgctttctagatggataatggtgatggctgagcgaccatgtgaatgtacttaataccactgagctgtatacttaaaaattacttaaatggtaaattttatcttatgtatattttatcatactaaaaagaaagcaaaaaaaaaaaaaatctcgaggttaagcaaccatctctccaggcctcttcttcagcagtctggcccacatttctagaagcccccagcacacctgcacatttatttcacaggtcaagaaccagtcacaggtcggtcctaagccaattgttggcataagaatgagagcaccagggcttgctcagactaatcgaggtctgcccaggagtggggccagcatcagttttggtgaggtacctgcacccctgaacaaaatcagggttctctgaatgagggagggggatggaaatgactgttaggaggcaatcaacattataatcttaaagaaaaatgtacaagaaaattaatgtatgggagttacaagtgagagcaatctgaaaacttctttcctccacttggaatatatatatatatatattttttttttttttttttttttgagacggagctttgctcttgtctcccaggctggaatgcaatggtgtgatctcggcttactgcaacctccaccttctgggttcaagtgattctcctgcctcaggctcctgagtagctgggattacaggcacccaccaccacaccgagctaatttttgtatttttagtagagacagggttttaccatgttggccaagctgttctcaaactcctgacctcaggtgatccacccgccttggcctcccaaagtgctgggattacaggtatgagccaccatgcccggccccacttggaatattatttgtctttaaatttgcatagagttgtaaataaaataagtgtcaaagaaatgtgccttctagaaaatttagaatgacctgtgtggtttgtcttatgtttcttctggacagcgatgctgataggggctcttctcctccaattacaaactgtcatcttggacaagctgcttcactgtgtctcacttgcttcatctgtaaaatgggaataatgataacacctgtttcatagacttgttagttaatacatgtaaagtgcttagaatgtgtctagcacatagcaggagytgaacaaggatcacctctcattaggggctgcagggggactggtggctgctgctgaagccttcagaacctcccttcacatgctcaccacagctcctccagcaggcagaaggcttactcggtggtgcagagaaattaccycaaaggaagcttttcatcagaggtggctgatgagtgcctgatggatgccttttcctccctagatggtcccaagatgactcttcctagatgaagggcctcctcctgagccttgttgtagctcagtggaaaataaataaagagggaacaaaaagtccacgaagaagaaacagtttgttgggtggcgcctctcagggccagtatgatttaattgacgtcaagcctgttatgagtactcatgtggctaggataagtggcattggaagccgggttgcccagcatccttgctctcagagccccacttgatgaccttcttaggggttagtgcctatcaggaggctgttttgagagtatctgtggggaagaagggctcagatttaaaactgattctaagtcaacaattcaaaaatataaacaagggaatttgtggttgctctcacaattaatttggaccagcagcccactggagacattgctgggaaccccaaggaatgtagggatttaaaaaaaaagtcattgaaacttagaccwcaatcactgggtcccaacaggctctagtgttaattcaaattgctatctattgggtagagaaagagaatttcagtgccagaagctaccatagagataccttgtagttccaccttatactgccgagaaggaaaccgaggcctggagggagcccatgatgtgttcatgtttacaccgcaagttagtgttaaatattccattttttggaaggaattttacttacatgcatattttccattatgtttataaatttccccctattttaaattatccccattccctactaattgtatctttcattttttctttataaaccttataattctctaatatactatatatrctttatttattttacttatcatctatcttcccctgtctccactaaaatccaaactaactccataaaagcagggctttttgtctgggtcactcctgtatggttgacacttatttcctggaacacagtaggggctgaatgaatgaatctgttgaacgaatggatgagagcctgaatgggtctcatagacccatcttggtagaagtaagttctcctttggtcatctaattcagagaaccttggggagaaatagaaaagccatttccactccaaatgggaatctaaggtcagaaaagcacagggttgcccagggctaagctgtaaatattggcattctgagaaagaggtcataagtttggagactttgcactttctctttggaaatggaaaagtcatttcatttcaccacatccactaaggtgcatgaagtaaacagcagacacgctggatgcttggggcatcattccttcaacagggacaacagctttcatgagggttctactaggttaagtagagaggagcagatttttcaggggaagggatggcagaagcaaggctgagaagtcaggcgtgatcattcatctgagctcctactatgtgctgggctcagaaccagatgtggatctacagcttatttatgggtgcatttgagggagtaagcgtttatgagtaggacaatgagggagagaaggattaacattttctgcccgtttcctgaaatgtgtcttaattccttcctaaggaaggctgaccaagaaaataatgcaagaagagaaagtctcttcaaaggagcccagctaggggctgtagatgaaaggattcctttgtgaataaaatgaaggaaggaaactgaagtggttcagtggttgaaccactggctgaatgaagacctgaaataagggaaatgcttctcaaaattagagaccaggctgggcttcctaaagacgactcatgcggagggaggccccttgagctggagggctcagtggaaacctagagacagaaatgagatgtagcagtcaagcagaaattgaagaatgttctttatattgatacccaccatgtgaagagggtgacagtgagtgtgatgcctttagatgcacatgaaagaactttcagacgacaacataaaatttccaaaatattttgtttaacctgttcacacactttcattcatttttccccctctgagagtaactatttgtaaccccaactaataatgaacactagtgtttatgaaggatttactaaatgccacctacaataccaggtgatttttctacatcacctcattaatcctcatatccctactatgagagtaggtaccgcattcatccccattcagtggagcccataggggaggaaactgacgtgggaggctggctcagttcccttagtgatggcagtctgatggaggtgctgacccaagtggacaccaaatgttttgtattgaaamataatacagtgcagcattatggggcagggatggggagctgctggcccatgagctggatatagtcttgatgtgattttatgtcattaaggaaacaattactaagagtaacacaccctttactcctgtagtcataaatctgtagtctacttttaaaatctactgataagcttccaaarttatgggttcctttaagaaagtttctctttagttctaattttattattgttgtttgtttgattgttttcttttctgcctacatatgtctgattttctcttcacaactgcatcctagatgccttccttagtctcttctgcttctcttctgttactcttgttttctgcttctatatatttatctgctgttttcctttctgtacttttccctcttctgtctgtacccattagtatcccttaaatgcctgtgaaaaggaattcaagtgagttcttattgcttattgggtagaagagggttttatgctttaatttaaaaatggttgaggatttaatagtatttctgtctttaaaagataataacattacattgcttttttactttatttgtattagaaaaatattctgactctccattaggcagttgtccttgatagagtgggaaaaaggctcagaattccgtcaagcaggtgtatcaagaagttgctatttggtctgttgtctttcctggttattcattattcagtttaacacagaaatcattaaacatacactgttttctatggtgccaaacatcaaatgaaacatgcttaggcctgtgaaccaagaacttctagaaaccagacaattaccaagggcgtcaaaatgtctcatcttgttgcttgtaactgaacagtgaaaatgagcgtacatgtaggggccatggaatgaggattttaatttgaatcagaggatggggtgaagagcagtcatttacaatattacacaagtcatcttacaatgaataataatyctatcttgaaattccacccttcctgccatgtgattataaatttgtttataattgggtaagtcccaccagtcctgtgagattgcaccatgctttatgtttgcatacagtgctttatgcttgtcaaggtgctctgccttctgctgtcttatttggcatctaaacatcctaaataccctgaaagtaatgagacctggagctaagagctctctttacaatgaggaagctgaggatcagagagcttatgtcatttgccttgactacagcaagttgctagtggctgtagacccaatgcaaaccccacccaaaccagagccccacccaaaccagggcttttctcttgaatgcatatggcaagagagagacatcccactgtccattgtgttgaaggtagaaaatgcagaatgtggcagagtgagctaacccgcttggtggccctcaccctggcaagagacagattttccttcctctccctgaagggttaagacaaagaaaatatctgaaacttttcctagctgagcctttgctccagaactcagacacttttgcgacggaagtggggcattggggaggcagaaaaagccaatacataaaaaagcagcaacctcaccacctcacctgggtccccatgaaaccattccacccagatgagtgagtcagtgggtgttcttttcatggcctgtcggctcggtggcacctgaggctgcagtgacccccagtgctgcttcaggtgaatgagcacacagagcattttcagaactatggcttactctctcagtgtatrgcagtttaagtgctagggacttctctgaactcattgaaagaaataaagcccctctgtctttgtatccctagaattggaagctcatgtatttgtgatgctggaaagggcaaatattcattgaaagaaaatagctcacatttactgaggtctcactatgagccaggcacggagtgaagcaactggttggcctcaccttgaactctcacacccagactaggagctaggcactgtgataactgctgttttacacaggagggaactcgggctcagagtggatgaatgacttgctgagggttgcacagctattaagtggtctgcctccatagcctctacttcccaggatctccagcaagggatatctcctgaggcagtggctttcacactcttagaggcctggagctctgtgtacactaactgaaacctagctgctttggttagaggattggggtcaggaggagactgtatcctcatggcccagcaagagttccgcaaaacccttgggattctcagtagagcagatcaggatgctaatgccagccttctctggaagtctgtctctttgaagttgaggtcatttccaccacaccccagagggacccatctagtcgacgcctgcctgcctggccaccacttccctactggaaaatcatcatttcccatgttctagttggggaaggacccagcagctctttctctttggcccatctctcttccttttatgagccagctaaaaggaatcccccagaggtcatctttgtccttggcgtgggaaagagagaggccttgtcagcaggtgggggaggtaggaaatgctgttctcctgtgggctgaaggtcagtgaaaggtgagctggggctcctgaggccagcaggttctggcacagaagcagcccgggaggaagctgccctggaatgtgctgtggacagacctgcgtagatcccttctttcccacgtccaggctgtcccagcatctctgaccaggccaaggtcacctaggcgcaggctcttctccttacctcacagacaaaaagaacttagcactgtaatctaagtgttcccactcctcatttgaaaaagggaagcatttcatttttatgtatgtatgtatgtatgtatgtatgtatgtatgtatgtatgtatgtatttatttattttgagagggaatcttgctctgtcacccaggctggagtgcagtggcacgatctcggctcactacaacctctgcctcttgggttcaagtgattctcccacctcagcctcctgagtagctgggattacaggcatgcgccacgactcctggctaatttttgtatttttagtagagatggggtttcaccatgttgaccaagctggtcttgaatacctgacctcaggtgatccacccaccttggcctcccaaagtgctgggattacaggcatgagccactgtgcccggcctcattttttttttttaatgaattaaaaaaaaaaaaacttatgtggcagttgataaaataattattttgaaattagccacttatcttctagaaaaaaaaatgtttgttgctcttctgatattggtaggagtttcttcctcttccaaggtgactttttggataacaccctgaggggactacccttcatcctttatctccatcgcagccattccaggccttctgtgactcctgggataaaataaacattagtgggcactgttccattacagggttcccttttggtgtgttccattgttatctccccctctcccccaggacctattctcccgggaaatgataaacctgggggctttagtggtggagaaggtctacagagcccaacctcaacttaaaatttccccagcctcttttggaagccaactaggtacctgattttcctgagtgggacacggcagccccctgggtggtcatagcaccacagtatactgttttacttacctgtatctcttggccatgccagcagcaagagcctcttggacctagaatgaccaaggaccgtggcctgtctgagttttaactctggatttagaagattggggatcttgtttcagacatttactcatcaacaaataccaagttcattgcaggtagggttcttggaaggtaagctctgacacgaagttgagtgtgctggaggctcatacccacgggaggaggggaaggcagcaggactgtgcagaggttgagtcgtgatgcaggctggatgcagccacagccagccccaagagcaccaagatggcctgccagcattgtgctggaatgagtgctgggatgggctgacatgggcctttattccatcactcccatcactcagaggaggtgggctgcccctgaagggcatgacctctggccaggtagcyctctgcaactgagcaagccctgaagaagctgctgacaaccctctcacgagctgagcagcaagtccttcttgaagggggtctgtgcctgtcacaggattttctcaatggctgaggcactgtgttgaaacatggcagatcaagttggaaaggcttggtctctgtccatgaastgcttgcagtgctgttgccctgactgcagtgcggtggatgctattatggaggactcttgtggtggctgcttggtagccccaggcaggcaccaggtcattaacagccgcgtgaattcccttgtcactcctaggagatatatacctgcacctctgttttgctgaagaagaaagtgaggttctgaagtgttgagtagctcctaggggtaatacggccagctgggaaagatgccaggattcaaacttaggtcggactctgaaggcagtgtgctttcctttattcataattgcctttgagattgaaggcagagccaacaggagcaggaccattgtgggtgttcagcagtgtcccctctcctacccttgctcatacccagttttagctctgtgcctggactctagctrtcccccgccaatggtgccacagctccatgccttttctgtgaccttcaccactttctctgcccttggggcttcctcttcctcttgacttttctcagcacttaggtgttggccataackgtttttggatgactgcattgggtaagtcccaccagtcctgtgagattgcaccttcccaaaaggcaaggaagttgtatggaaactggtttaggccttgtgtgagattcctttgctaacagtccaggaagctgtgtctggggcagcttccttcccccaaatatagatacttctccaagcttcctgtctggaatcagggtgttgtgaaatgtgggcactcattcagtcctaggggtcatggggaaccctaccagctttcccattaaacccagctggtaaaatggactcatgtctgtttgtttttggggtttgtattccctcctacctaaakaaactgcaagagaagggatagaaaagaccaaggcatcagcaagtctgtgcccaggagtgcaataatccttgtgtttactggaagggsaggctggcattgaacccatgtcaagataggtttggagaaaacccaaagatgccaaggccttgccttycatcccctgtgatctactacttaatcaaatagccaaggatgtgttaagagggagaaatgtgtaaatgtttagagagcagtgagttgtgagctgtaaatggccctggcatgtttataagaaatgagcaggccagaaatgaaaccccaatagtttttttgtgtggatagaattaccaaactgatggatggagggagtgttctggttgttaaatatttgggccttgggagtcttttgatgtagcaccttgtgacaactgcttgcaaagtgagctcagactagcttaaattagctcaggcccacatgttcgkgaagggaggctggagtagattcccgccatggttgtttgcagctctcccttctaagagttcaggactctggtagtcagagcgcccaggcttggccagatcagggcacctggggaagggtttgtctctgcctcttactaccacatgaagtactcagagtctgggtgattgtggacagggcttcagatcaaggaaacttaagattctcaatcagccattgacatatgccaagaccaatcaatctttttcatctcatctcccattatccacccttcccacagccatraccacccactggtcactgtgcatgtctccctcctttgtcttctggtgtccctgccatggttccttcaggcaaagatgcttcttcaacctatccctaaataattctgcttgaaccttcagggtcaarctgaaagtggtacctttttcacagtcttcctgggcccaccaactggaagcaatcactgcctctactaaagtccacatcaattaaatagtcaattagatagatccagagtgaaaatggaaaccaccttctttttgcatcagtgggatggatgactggaaacatggatgaccagacaggtgaaaagaagaatggaaggaaacatgagtggaaggacaaacatagtgtctcctcgttaaaaaaaatactgtttcagctttcytaacctcacctgtaatagagctaggaacaatagccccatctcattatgtgagaattaaaatacttagccccaggtatgaagcactgtcccattattgttgttattttggaaaataactccgtaagatgttcaaccctatgaggaaattattctttttaagattcaggcttaaaatcaaatattcctggggcttgtaatttcccatgcagacctacgccctcatgttactgttgaagaaactgagtccagaagaggggagggagggacttgctcacactcccagagttggtggcacctgggtggcaaagtataattttcaaaaagttaaaattgtgactcatacaaatctagaatgtggacatgtcaaaaatgcatttagctcattaatgaggaaaccaacaagatggcagcatgagtttacataggcactggaggaagagtgttggaatgagattgctaaattagaaacaaaactggttaatgtcctacacgggagtcaattaataaactttgagattatcttttctcctgaacagaaaacatttgtatttctactaggcaaaatcctacacattaatgtgtaacttcacataatctggctatttagttggtagcaaatatcaagtcaacaaaggtacttactttcctctaggtaattaaatatttcttgggcaggctgttaaacattgctccacagatgaccttgaaaggacatgacacatttccattccattgcttgacccctgctaatagaaccaagtcttctcacccaagctgctcctctcttcctcttccatctctctgctgcatgcagggagcctggtgccttgcttccattttctcattggaaaaatgagggccataatacytgccttctccaccagactaattatgtccagttatgacttggggaaccaggcaagcgcatggaagaagatcacacaatcctggatccggaagaccttggcatccaagggaaaaacaggtgtgggcaaacaattgcaccaacatttggcaatggctgtggcaggcaagagcaaaggactgcggcgcctagagagaggagtgacttggctgagtaaaggaagagaaaaagattgagagaggaacactgaactgggatttccaagacccgtagatctgttggtgaaaagggagaagggcatggtcagcctggtgaactgcagatgttaagatatagggactaaaaagtaaggcactttccatttaatgtgcatatgctgagcttttgttatgtggcaggttctgtgtttagccctggggagtggcagcgatgggaacaatcgtgggcaaaacaggaaacaaattctagtccttttggagtgattccaggaggatgggggtttgggtggatttgagaggggaacaagggaagtggagtggaggcaaaagaggctggagagactggtcttgcactgagtgatgatatggttgatagctcctgaccaaacaattaatctttgttcagaactttccctttggaaagtctgtggctgccttctggggaaggcaaacaaatgtgaactcaagaagtttacaatttagctagggaaacaggatgtgcaaacaggaagaaccaactatgtgaaggtaggtaagataactgttgactccatgctttaaggaaaggagagctctttgtggcttgggtggtcagcaagaattttttaagcagagatactcttgattgggttggataaataaaagagcaaggaggacattgtaggaggggaattgctcccagcagagcctagaagcagagagattttccagggttcccaggagaagagattgaataagtgcagtgggccatgtggtgacacatcttgagtgtccagctggagaactggaagtgcatatcataacaggggtggaaaactcagaggttgatagggaatggtgaggttgcaatgaggggaccggtggggactttgaccagtggagcaagagtctttccagatgaagggagcagctgcctcacagctctggccagctgtggacatttggccagtttgtaatttgtcaaaagaagtcagaaatctgcmttgttgtgaaatctccagattttttacatgttgtcaatttaattaaaatattaaaatcagcccaggggtcaagactgctgacccatgcatggggcctggggggaaacttgtggggctccagcttgtggcttctctgttggcggtgcagctgttgaagattcctacacacaggtgccacaggggaagatggcacaggaaaggagtgtggacctggagaatcaagtaaggagcaggcagcaactgaggcagggccatatgcaactgtggccaggggtcacatatcatactgagcagagttcaccttgcccgagaaccacaaacccaggacaaatagaagggaaacaaaataaaggaaagggagccagcgtgtctcgttcagtgttgggtaagtagtatgaatttggtttgttttcctggctgtctttaragaacgctgggcggtgctagcctgtatttctgatgagaggaaggggatttaacctgtggttcaagtgcacttatttggatagctcaragtcttcatatggtgttgttgtgcaaagagcactggactagaagttgggagacctggattacaggaatgactggtgttagctgagtgccccactgtgtatcaggtattttgtgcacattttcagtaattctccaaacaaccctgtgaagtagagggcactgtgactctactttttcaaggtcaaggtcacagagttggtcaatgcaaggctgggattggaatgagacttcaaaggccaagtcttttccagtagaccccgctactgcactggcctatgctgagtctctccacatgctccatgttacctgttgtgtgaacttggataggtcatctaccacagaggagcaagaggggaaacttcttcagggtttgcttggtccagtctcaacatgctgtggttctgcagttgagatgcatgttgaaatgcatttcatttgtatgttgactttttttattctaaaggtctttggatgtttaatttcaaacaaagagctagagattggagaggcatcaatctcaaacaggcagcggcaggggtgtttagaatgaacttgacagccctgcaagaaaagatgtgttcttatcatatgtggaagggctttttttttggtaggaaataggtacttggacatgtaaaaatcaggcattccagcatggctgtccccaaggcccccacctggaggcttagactgcagcttctgctgttttcatatctttctccccttttatcctctctgaatgtttccaaacccccaaaggacctgcaactttaaagagaaatattattgatgcagttgaatctatttttagcctgctggggttggtgcacatccaaagcagaagaatttggttttatatctattttatctacatcaacacttctttacctaaaatccattaaaagataacagaaacagagctgacttcagacgacattcaattggttcatattttggggggcaatatgtcatgccccaccttgctgtagctgagacatgcctttaacatttccaaggagccacagaaaaagacatagaaaaccttcgattgcatttagagattagaagaggatttttctcctaaatatggagctgtttccttgactcagcrggtatgtgagatggatatgaaagcaaaagatgttcccttgccatgaagcaagtatttttgagtcatagatcttattgatcagactcattcaattggacatttctcttgtgtgcacacatgttccctctctcctctgtctcctcctgcctcagtaacttgyagagagacttccaaaaagagagcaggtttttagagttgagagttaaaacttctggaatgttgttctagctcctggggttgggcagggaaaggtaatcctcaaatataggtggggcctcagaggaagtttggtgaatctgtcaactagaattttttcttgaaaattctcattgaagtaacctctatcctcaaaggattccaatatacatctagggttgaaaaggaatgaactgatggccttaatcagattgatttaatgagcatagggccagagccacaagagcccagactgggtttagagtagaggttcacacatggctgccagttagaatcacctacaagacatagaaaaaattccagcacctaggtcccccttcagagattcttattcagttggtctgagtgaggtctaggcttccatattttgtaaatcctcccagatgacttcactgtcatttccactctagagctgtgcttcccagactctaatgtacagggaaattacctgggattcttgttaagatgcagattctgaggacctagagaaatggcaagacataccatgttcatggactggaagactcatcctagtaatggtgccagctcacccccagatttctctacagatttaatgtaactccaaccaaaatctaagcaggactgtttgcagatataaacaaaccaatttctaaaatttatgtgaaaaggcaaagcaactagaataggtaaaataattttgaaaaagaagtgtatatttgaagaaatcaccaatcgccctacctgattttaacacttgctataaagctatagtaatcaagacagtgtcatattggcaaagggatagacacatagatcaatggagtagactagagtccaaaaatagacctacaacaaatatggtcaattgctttgatagaggtacaaagamaattcaatggagaaggagtcttttctacaatggtcttggaacaattggacatccaagggcaaatgaaacaaaacaaaacaaaaagctcaacctaaacttcatgtcttatacaaaaattgactcaaagtggatcacagatataagtgtaaaactataaagctttgataaaaacacataggagaaaatctttctgatctgaacttaggtaagttagacatgaccccaaaaagatgattcacaaaagaaaaatggatcacttagacacgtcaaaattagaaactattattctgtgaaagatactattatgagaatgaaaagataagctacataatgggagagaatacttaaaaatcacatatattacagaaggctttatagccaggatatataaagaactctcaaaattcaacaggaagagaacaagctacccaactggaaaatgggcaaaagacttgaatagacacatgatcaaagaggatatttggatggcaaataagctcagaaaaagaacatcagcatctttagccattagggaaatgcaagtgtaagcaatgatgagatgtgaacacacctattrtaatggctgaaataaaaataccaacaataccaagtagtgatgaggatggggggcaactggaactctcagacattactaatgggaatgcaaaacaatgtygctattcaggaaaacagtttagaagttttcttataaaattaagcatatacttagcatattaccagaaattcaatgtctagatatttaccctagggaaatgaaaacttaagtttacagaaaaaacattcatatacatgtttgtagcatctctattcataattacccaaaactaggaagaatctcagtgggtgaatggctaaaacaactgtgatacatccttaccatgaatacatgcagtagcaaaaaagaatgaactattgataaaagcaacaacttggatgaatctcaacaacattttgctcaattaaaaaagccagcgttaataggttacatattatatcaatttcatttatgtkacttccttggataggtaaaactgtagtgacagaggacagattagtggttattagtgggtaggggtgataggtgtgatcataaaggataatgcaagatagtttttggggcagagttgttctgtatcttgattatggtggtggctatacaaattgacacatatactaacattcgtagaactttacaccaaaaataaaaaattaaatttactgtatagtaatttagaaaatgaaacttttgaaaagtgcagattcttattcaagaggtytagcaatggggcctgggactctgcatttcttataagctcctgagtgatgctggggctcttgggaacacaagtggagggggttaggctctacagaggaaacatcgtaacatgcagattcagctcatttcattcctacgctgagagacctttaacggatccatagttcttccaagataaaattcaaatattttatcacttcaaaaaacttaaagtaagctctttcccctgaaatctcccatatccctcagatcataccctacagcagtgtatattctctgctttgtttgtggcctagagtgctctctatccacccattccctggaggatgagtgaccccttagtcactggccagcttgaaaggcaccttcccagggaagccatccccgaccctgccagtccctgayacacccgtgcggaatgagggtgcaccttctaatgcagtatgcrtgctattttgctctcatgttctttcacttttcagatgtttctctccctaggaacacaggcttttcaaagacaagatctatgtcttgtaggcccggtgaccagcatcatggcaaatagtgagggttgctgaggagcttacagaatgaagacaaactgactttatagaaatagtgaatgtttcagaagcaggaaagtatcctcttaggaactatggggaaaataatgaaggacattcattgatttccaagaacagaagatgccagggaaggaaaacagcttcctccacaatctgtgckgcccactccatgcaggagatagggttcatccacatttgtaaagaacatgtgtgtgtagagtggacttgtaatgtaagcatcacttccatcaccaccaccatcatatctccccagtatcaccatcatcttcaccattaccactatggaacatcagcaacattgctgtcatcatcactgtcatcaccaacaccaccctcataccatcatcatctcaatctcttaatgttattgcaatttgtgtggtgtaacaaaaataataatgactccaaaaatgaaataataaaaatgttaaaaagcacatgtggccgggcgtggtggctcatgcctgtaatcccagcactttgggaggctgaggtgggcggatcacctaaggtcaggagtttgagaccagcctggtcaacaaggtgaaaccctgtctctaataaaratacaaaaattagctgggcatggtggcaggcacctgtaatctcaactactccaggggctgagacaggagaattacttgaacctgggaggcggaggtggcagtgagctgagatcgtgccattgcactccagcatgggtgacaagacagaaacgtgatctcaaaaatagaaagaaaggaaggaagaaagaaagaaagagagaaagagagagagagagaagaaaagaaaaagaaagaaaaagaaagaaagaaagaacatgcatagtacctgagaatttgcaaagtgcttccttggaattaactccagctgcataaggaggatgcactgaattattcacctcactgcagtctgagttttattcttttctccaagcccttatatattattgtctttggatttcctacatttgtgtggggatctaggctsgaattcttctgcccatcttgcaggtagtataactgagaccctgggaggttaarattatagaacttgttagtgaaggatcaaggaggaagatggtttctaagtagggcccaccaaagtgccagagatctccatgagaggtgtgatgagtggsctgaaccatcacagagsacaaagcacaggaaatcggttctcagaactcatttgggaagtcagyggcaagttcacacaccaaggtgaaagcggcactataaaaggatggatggaggtacagtaaagaggaagaggaagaaaagaggaaacaaaacgtggccataaagtgtagcttctgatacatagtgaagggacagaaggtgaatccttgtaaagtggctagcctgtcgggagccacactatcacctgctccaagttacccctcctctgcccccaaccaaagaagattgtgcatgagagttctaccattgattgagagactctctaggatcataacatctggaattcagtcctgctttagccatcgtctatggtagtaagtgatcttgaagaagtcaactaaagcctcctcttcagaaggtccccagacaaagtatctaggttgctgaaggcttgggagtggaggatgcacatgaattgccattgcctgtcttgggttgggttgtggtacttttgaaggagacagtgacaaggtggctttgtttcctagggtggggtgctagagagtgagattgtgatgcttgtcatttggtccaattgctactgctttcagttgagcactggtgaggaaccttagttgattcttctatgtaaatggctcttgcacctcaattttcttggcaattactccccagctgtgcccttcttgctgcataaaacctcaatcaatccttcattaaaatgctacagaaactgaaagcttttcccccttgtttcctaatttttccccgagtggattggatttgttatgactcaaatggaaaaggactagctttgtaagcaggttcagattctagcccggttcctatttatttatagcccaaattatttcaacaactgctgtccagtaaaaactctgtttaatcagaggcaggtaaacgtgccartttcatctcattgcctaagtagtctcctctgctgtggaggaggaggatgccactctgggtcttgtcccaggtgctgtggggctggggaccaaggcagttctagactggctacccattcaggcctggccactcaggttgtagccacttgtgtcatttggtaggaaaagtgagaasttatgagccagaggtttcaattatggttttgccacttactgattctatgacttataaggttacttagcttcttggggtcagggttcactcatttaaaaatggtgatgttactaactacaaatataaatgagttaatgtaagcctccagtcacagcttggaagacagtgttttctttctctttttttcttttcttttttctttcttttttttgagatggagctttgctctgttacccaagctggagtgcagtggcacgatcttggctcactgcagcctctgcctctggggttcaagagattgtcctgcctcagcctcccaagtagctgagactacaggcacacaccaccatacctggctaatttttgtatttttagtagagacagggttttgctatgttggccaggctggtcttgaactcctgatctcaggtagtccgcccaccttgacctcccaaagtgctgggattacaggtgtgagccactgcgcccggccgcacagtgatttcttaatttatggttcatggagattataaaaattggcattttaattataagtgattgaatgaagtcagacattggagaactgaataaatggacacatttattcaacaaaggttgttgaggatctgctaggtgtcaggcattgtgcaaactggtcgagagaataagatattctctctggcttcatagagtttacatggtcagagagcgaggacaataaacacaaaaacatatcgtcatgcatatkgacaagtccattttaaaaagaacagggaactataggagagaagggggcaggagtgggaataaattgtactgggaagcagtcaggggagtttttcttgaggaggcaacatttgagctgagaccagaaaagggagcaggaattaactggacaaagacggggaggagtgtatgtctcactacaaagcaagaaagagctacgcacagtcaaggaaggagaagtgaagccagggagtctgaattggatggccaagccagtgactggcatgaaggaggctggagaggagggcaagagcatgtgggctttgtgtgccagagaaagtattttacatttttgcataggcaccatggaagygttttaagcaaggaagtaatgtaattctatttactaggactagatgaagttgaattgaataaaaggttactaagggtgcaaatgccatttttatgggaagagcttatgcactcaccctgagggctggcataaggcaggagtggcattgagtgtccttggctgttcctggctttggtccctgctgtgtgctgcagcctcagtggctgcagattctgcccatctaaagccatggactttcccatgaccagggcccattttgcctttgggtctgagaatccccaggagtgggaatccagaagatgtcagctctgtggcctgaactggaattccaactggatcatttcattccactattgattggaagaggaacagtaaagctgtggtgttagctggagtaaactggagttgagaaactcactgtgtatttttcagaaaaaaaaaataataataattcttaacaatctcaaactactctcaatattgtaagtcaccttgacagcacgaggacttgaatggtttgcctggagggctaacgatcttggctctcccaggtgcctgtccgcattgggagacggcgcaagctaagccagctgtgcatctctcctattatatcatggaccaggggaccatagacattttgaaagggaatgtatctgcctctctcacacttcagcctgcttgtgggatggcttggcccagacagcagcaggcactatgtcttttctaaatgttctgcctcttgatataagcaagcggtccgtgaagagatttatcagaggcccttgtgatggatacatgtcttcttataagctgatagtccaggggagactcctaaacaasaaagggaactgaaggcagactggcagcaattctagtgtcctacaaggctgtggcttgtcctgtgagctggacggcggggtctgaggcaggacgtcaggcaggkccatgctgagagcatttcacatttattgaaagcctgctgtcctctgggcactgtgttttcctcttgccattccatttatccctcccagtcatgctccgctttatggatggagcagttgaggctcagaggggttacataaagcacccaaagacatatgggcaggaagtgacacaacctggatttgaatgcaaatctttctggctgtttccatattgtctcacagcctatcccagcatcgtgtgtgtgtgtgtgtggggtggggggggtggggggggatagggggtgggggctggtggtatttagggatgccctcttcttaaggatgtgtcctggggctaagtcattgttcttgggggtgcagggaagggacaatggatcggaagggtctcagtttgcctctggcctgtcagtgggccaccctcctctcctctgtgatgcaggggcagtgtggctgccttgccagcctgccctcctccagcctgctgggagcctcgcgtgagacaaccgatctggaagccccttagggaggacacagcgcaggagaggcagctgaggctctaaggacagctgctatcaactgccagcagccactgagggagaccctgggcctggcatggctacaaatgggctcagctccaagggaacagagaattgggccacatttgtctgggctgggtcagaaatggcagttcctgagcccatatcaccagctcccatttgcaaggctgaggaggtkcctgggcttgctgtgtgctgccttgctttcgttcccgctttttaaggcacatatcagcctgggcagctcttgacccacaaggtggactcttctgggccagccacgggcagtggccaccctgtcctgccaggccgcagaaaggccctgggccactcccaactggagccagtgctcctggagagagcagtgacctggaccagcagacctatggatccyctcttgctcctgcactcgcctgctccttgcagtgactcggcagtgggagtgggaggtgtcagagcaattaggcggaaactcctttcgtgcacctctaattttcgagctctctgaatctcattagttcccgggcttttctgctctgccctcctgttctttgcttgcagaaaatccagggggcagccagtcaccctgttgctggcggtgatgatgagaccccaggccagtggcacagaggcctcctgggaggaagtccctgtttgggcgcccagcactgttcagggcctcctctagtcytgttctactttaggccttaccttctcatttctgttgctggagcaaaaggctctgaattcagagttgggaattctcaggcctggtctgagatttgtctgccccaatgatgatgatgatgacgatgacgatcatgataatactacactaatagtagttaagagttaccaattgcctattctgtactaggagcaatttagacctcatcacatgtaattctaacaacatccccgcaagacaagcattatagtcctttcatagatgagaacatctgtgcttagagagattaagtaactttcagactcaaacagctggatggtgactgagctgaggtttgtacccatgtcttgatgactaagcccagctgtgcccaccgggacaccttgacctagtacttctgagagccccagggtcactattcagaggctcccagagctgccagtaccccagatcattgcggctccctcatcctggcagtgaggaggctcaggcctccgtgctagtgccccactccttgattctacccgtccctccctccctgtggcctgcagagattccgactgctgctttgtttcacccagagcacctcttctgggctgagtgctgtggaaagggccaggtaggaaaggagatttaaagtagcttgactcagtttctcccctgagtttccctttggagacccgagaaacacatctgggaagtgaatgggaagatgagaagaagtaagcaaaactgggaagagtgaaggccttggaagtgcagaggatgccggtcgtcccaggtgctccggggagtatttctgtttagagtggcatgtggagggagtgctctcctggtacagcaggcrtccaggcagagtgagactctgctagactcaactctttcttcttctctgaaggaatcagagactgaaacaaggatggcttcatcagtttggccatagcctggaaagactgggaaacccagcagctctctgscccctgggctcacagacgacatagttcttggaagctgtcatccctgcctgtgatgactgacctgcctcttgccaggcttccatccttgcttcaaggcctgctaatcatcagctccactgggagatctttgcaggctgccctggaatcatagctccaggcctttgttctagaacatctgttgcattgtattgtacctattgctttatatatttttcttccttttctccaagacaagaatgtgcactcattcaagcctgggatgggctcttcttatgtgcatattcagttccaagaaatatttaaactatcactagtgtaattcagcatccataatgagtttatactcttgtgtattgaaatcagatgactttcctgtctttgtggttcatattattaatattcttcttatcgctttgctctgcttagttctttttttatacatctttgcctctcacccccattttctgccttggcattcgtttgttctttcagcgaatgtccactgggcacctactgtgtgccaggcactgttctaggtgctggggatacagaaatgaacaggaaaattgattggcttatttatttgaaaaacacagaattagggttgactcagggtgaagcttgatccactggctcaacagtgtcacccccagagctcccatctccgtgggcactcaccctgtgggttaactgggtctttggggcrccatttcctggacatgcctcaagacttccctgaatgagtggttcatctggtaatgaatgaggccacacaggctcccttatacttgtccctggcgtgggagctgccttctaaggtttcataatgagaacatgcttttttaggggagcaggtgtgtggtagactctggactcctacgctgctgtcttctgattattcccagagaactgcacctctccgctctggttgggctgaggctgtttttgtcaccccacaggcctgtgttgtttgttcataaagcagagagacatctgtcatcctcactgagcccgacagatgccacattcaaagacccagcacatgcagcagcagcggtggcagcactgtcattgcggcgctcacacacacataccgacacactcgtttcttcttcctggcggacaaaccttcctgcccctccccgccaacacatgcttccacacctatgagattcaaaatagggtaacagcagaactgcaggcctgaagcacttgctggacagtgaggacacctctgggttgaggggacagggttaaatggggtagaacaggaagaatattcctcctcctgggtgtgaaygagtctcctttgatctctgcaggaagtgccttacccaggccctgttacctttaggagcaagaacttgaggaaatggtgtgggcacatgcacaaaacatggggcttacttttagcatgaaggggaaactgaggatgcccagctcattgtgtaagagagtgaaggtttgaccgagggtggcttctaaagcaaaacttagacagatgacgacagggatgaggtggcaggatccgaagacaaagaagaaccaggcacggattcactcgtacttgtaggaggaccttggacatgttttatgtaatacagaacatttcctcttttaggattgtaagtaatatcatggtagatgttactggaaattttatcactcccaccctgtgggtcttagcaggaatcatcctgaatggtgtttgtggacttgttttggagaagtctgtgttgagggcaggggtggtaggactttgtgttcaacttggcaggctcctggagggagagagtggtctgggacaggcgttagagggtcaggccctctgggcttaaaagagaaaaaggaagaggggaatgtcttggagaaggaggggccaatcacttgttaggtcctaggcagtgtcttggtgccatgtattagaagggaggtggagggagtggggaggtatcagcctgtagataacatcctgttctaatgggtgggtgtgagaaggtgggggagatgctttgagacatatttaataatatctactacagataagtcagtgaatcccactctttaccatgtaggcttatcaaagaccactagcagaaaaagactggtctaatcctgagagtttccttggaggacttcctcttagtgtagccccacctaaggctctgggatgttggagaacagccggagagagaggaccagttctgtggctctcagctaggttgcaggagtcttgggggtgggacggaggattctcagctgattttccctgcttttccttaacatcccccactgcttgaaggagctgttccacttgcatctttttcttatattgtgctttggctcaaatatttatctggaaaaagtcctcaagaactaaaacctttctttgtatcttgaatcagatcatttgcaagttccctctgactgtaagctgattttgtgacttggtgttcccgagacccccagtccacttcatctcatctttgatttttaagccattctgtctttcttaagctgacatttgaattcctaggtggttctttctgcatttcaccagcttacagttgtgactcatcctcctcatgttgttttaagtcatgaagagaatctgaatccagcaggaaaactgagagccatcttcataacagtgaaagtttctggaatctataaaacatcaatttgtatgtagaaactgaagtttaagaaagacaagcttttctcttaatttaaaytattgcgtctcatgggaaatttaattttttaaataaatcacatattccaatgaagcagaaagctttgctagatacacagtgaagatgtttgctttaaaaattgttctttattcagctagaraggaaccaggggaatacaggaagataaaaagtgctgaatggaatatacaagacaaggttttgaaatcaaggctaaattaatcatctctccctttcagtgggctatatctaagcagaggctggcagatactctctgactgtcagatttgactatgttattctctaccagaggatgctaccagaatgactgtcccagggtccatgggtgccaggatctgttaactgatggcaatcttcacctgaggaactgcatgtatcttcagggatctcttgcatgcaagtgagacaactatggttcaagctgcttaagaaccaaaaaaatggggatgggaatttgatggcttgggtaactgaaaagcttagggttaggcttctcttcaggcttagctgattccaggcaatcaaatgatgttcttcagtctcttgctgtcactggttcactcatttctttttccatctcttacctctgctttcttctgtgttggttttatacttgggcagccttcttttatgtggatttcygtaacagaatcaaatgcatatcatattggcttcttacctttggctttcaatagaaagatagattctcttttatatatagacatacagtagttccagcaaaagtcctagaactcactctcattggatcaggttggttggcatgttgcttctgaaccaatcaccacagccaggaagataggtctcatagtcttactgagcaaacctgggtggatatcactcctggagatgraaggtggaggtgggcgcattcttaaaacagagggattgagagtggggaatagggcataccagaaggggcaatgaatgctagtcaggtaaagataatagctatccactatgatatggtttggttgggtagayttgagggaccagacctggggtgacccatgtttgcccagctgatcccattgggtgatttcttcctgtttgatttcctgcaaggtacctcagttgttggcatgattctcctgccatcttgctcctggatgttgaaaggccacacggtgtctaatttaccaacacagacctgatctagaaggcaaagacaagttctrtgcccacacttttccaactgtagagttaagaagttatttctatcctccaggcttaatttttggctatcaatattgagctaaagactattgaagatttacaaaattatgtatcaatttaattttactataattaaacacattttagtgaaattcctgtagcttccgttattgatatttttcacaacaatcctctgacatatacaattagccctattttacaggagagaaaacagggtcagaatggtagagaacttgttaaaggccatgcaacctggagaatccagcatctatgtgcttgtgctgggtttgatgcatttagggatgaataagacattctctgcccttgagctgtatgtaattgctctgtgtttatagttacataaaagaatgagtaatatgcctctatggaagtaaaacagaaggaagtgattaattttacrtaaatgtagtctaggagacagaagggacattagagatgggtcttgatgagtgagtaggagtttcccacgtggatattgtgtacagggggtcgttttttcactgagtaatgcgtgagttttctatgagatggagctgccagtttcaggaaatgtaatgtcacccttgactctgccttctccttttaccagaaggatggccacagagatctacattagtattagttaggtgctttcatttgcaaagactagaactcctaacacaaataggcttaaataataaagggcatgtattgtcttatctaattgaaaagcacagaattagggctgacttaaggccaaacttgatctgttggctcaacaatatcaccaaggatctggcttctttccatctctccgttctgtcttatgctrtctttcatatcctttggtgtctttatcaaaggctggcaccttttaggccctaatatgactgaaggagctcctggggctagatgcttccttcatcatgcccaacaggaaggaaatggcatcgtttccaggcactttcagcaagacctgagagtcactctgattggactggcttaggtcacatgcccatccctgaacccatcactgctgccacggaacagagaacattgataaagttgatttccctgaagccacatggatccccaaatggaattttgcagactgatggaaggaggaagtggacaacggatgctatattagtccgttttcacactgctgataaagacatacctgagactgtgaagaaaaagaggttaaattggacttacagttccacatggctggggaggcctcagaatcacagtgggaggtgaaaggcacttctttacctgacagcagcaagataaaaatgaggaggatgcaaaagtggaaacccctgataaaaccatcagatctcatgagatttattcgctaccacgagaacagtatgggggaaaccaccccgtgattcarattatctcccacggaatccctcccacaatacgtgggaattatgggaatacaattcaagatgagatttgggtggggacacagagccaaaccatatcaaatgctcagaaggcatrtgttttggtaaggcatcaaagaaatgtttaccagagcactgaagtttccatagtctctcttttttgggcagtaaaggttctatatagctccaagacataatctttgatgctcagtctatgacaactcaaattctaggcctttccttggataattcagccactgaactaccttttgcttccctctgtagtctcttcttagttagtactctggacaaacttgctttgactttgtccaaagacacccattctttattagtatatgacgaattttgtggacagagaagagtgctatgggcatgatggcatacttaccacacagaatgatctagaactttgtagcaactaatgtcctaggccttttccagagctgctttcttcaaatggggcaacagacgtgatgccgcattttctaaagctcttcccaacctccaaaacagcttcttttctttctgctgaggaagctaaatttactttcagtcctcaaatggtgaaaaaaaggggagcctccccagatgtctcacactgataagaggaagaaatatccaaagccattagccagtggtgacaaasagtgtgtgaattgtaacggacgcagggtggctgaagaaaagactgagtggttggagacaggcaggcaggcctgagtttcaaatccttaccctgtcactttcagcactttgggatgctgaggcaggcagawcacgaggtcaagagatcgagaccatcgtgccatcatggccaacatggtgaaaccctgtctctactaaaaatacaaaaattagctgggtgtggtggcacgcatctgtagtcccagctacttgggaggctgaggcaggagaatcgcttgaacccaggaggcggaggttgcagttagccgagattgcaccactcactgaactccagcctgggtgacagaacaagactccatccccacccctccacccccaccaccccccccccaaaaaaagaggcaggatgccatggggttgaagaaaacaggccctgtagccaggctgcctgagtctgaatcctggctctactgttcaccaactgtgcctgcgttcatgtcccagctcttccattgactaagcctggatcaagaaataatccctgagttctaatctrtcattcaggtaattgcgttcttatgtttccttttgtcatttggccttccaacttagttgggatgatggtggctgtcactttatctctttggcctcaattgtttcatctgtaaaatattgatacaagtaatgtccacattataggttgttgtaaggattaatcctcatttaactcatttacaaattttatgcattatatatgtatatattatatataccttcatatatatggaaaacacttgtaacagcatctagtaagcacgaatgatgtggatagatagacatatcttatagggttgctgtaagccctagagactttgcatatatattgtctggcaatagcagacactgaataaatcttagctattattaataattattatgttgattgaactgtttaataataatgtgattcatctaaatagagctttatagtttctggagttcttgctgccaatatgatccttcttgagccctacaaccactcagtgatggggctcctattcctctgtccagtggctctcagggaagggttggatgcctctccagggtctcctggccaggtggtcattagcaggaccagggtgtgaatcatagtgaggagcttcccagtccagggcttgttccacatcctctcttcccccattctaaaggcctcccagccatttgtcacagcctcatttgaaatgcctgtgcttctcatctgtaatatcctgattgtcccattaatctcctttaagcttcatgaaaaatacaaggggctggatcaggaaatagccaccaagttctaattttgcattcaggggattgtcttccatggacgtgaagagactgatgtttcccatttggcctttgcctttccaactaagtcggggagagctgtcattttctgaattatcaaccagtttacaaggtggcatctatattttgcctctaatgtgtctgtacttttgttgcttctctatcttcatatcatcctctccctagtagatgttctacagtactgcccagagggagtggtaagaaatgtcttttgataaaaccttaaaagcttaaaacttccagtcactttcttttgcatattccttagaccctggccataggccagtgctcactacagaaggagcagtgtttgttttgttaacacacacacacamacacacacacacacacacacacacacaccctgtactgcaagatcctaaattttagacttagttcactgttttatatggtagccactagacacgagtggttgtttaagtttaaatgaaattacaggttcagtttctctttgcattagccaccttttgagtactcaatagccatgtgtggttagtggctaccatattgggcagcacagatagagaacatttccatcaatcacaaagtcatatgggacaacatttaccataaaggggaaagggaacgggaatgggcacatgagtgtagtgttcagttaagtagcatcacgggacaacagatgtgaagtagtcctcttaactctctgcatgtatttcctctgtgatttccaaaggaccactaaccaggagaaataagaaactgttgttttctgacccaacaccagcatgcaatgaaagtaggatatttttcattctatagagaaccgtcaatgtgtattttgttatctgatttgaaccctgcacgcggacagcacatttcacgtgttttagcccatttgtggctggcacaggtgtggccagaaagccagcataggatcttgtttgtgtttaagagagaagttcagggagactattcaggcacattgtctggcaagtctagcactggtcaaaccctcataaatattcctgtccaatctgaacttgaaatgttcttgttgtggacacctttggtgagccagtctacttgaggacaatccagtctactagtttagcttcaaaaagcatgcactagaaacaattagaagaacagggttgcttttaaagctatcaggatggtgtttgctgttgttttgttgttaaatatcaatgggttactcaatggtaatagatctaaagagatgaacattgttacatgaatattgcaagaaatttgtggatctcttggggaccctccagacctagttttgagaatgactcatataaacaatttgcagagtctaattcatatactcagactagggttctgaattsttttccccctgggaggaaggaaaaacagaggataacattggttatctggggtaataagaaagcaaggggcagactacagctgccctaagatctgagatctgagtgacagagcctagttcagggaggggctgacatgctgctgaaatgggcttatccagccacactcagagctctagtgagtatcagggtcattgtgttctaaatcatctgtggccagcttaccaaataggctggagtctggcagagaatatctatagaattttccacaaatcagaaattctggtttccagaaggataaacttccccaaatatcctggtggtcttgagttaattgtggcttcctgggagtttctgtcgttggtaagggtcacattttcattgtcccttgacctttagtcttctcagagttgactggtaacattaaaatgagcatgtcttcacttctgtcacttacaaagctcttaaaaaatttataatactttaaacatatcacagtaataaaagcaatcgtatctctttacattgttgcagtcttttggataaagtcccctgaaagcattgtcctggtggttttcaaacttttttctttgatctttcagaatctttgttcaaatgacatcttggctagactccaacatatagcacagataaaaatggagttgggactgcagggagagaaagggtggagcccagctcactggacctctgcctccacccccaaaccaccctctagcctttgagtcaaccactgagtcaccggtgagcaatccctgtggttgcccagagcatcatcccactaagtcctcataatcaccaggcatgattgtgaggtcatcacagtgaattggtgcacccctggaggtaggaaggcagctgaagaggggagagagacaccctccccacccccatatgaggatggtctgtgatgatatgcatgcaggggaagggacttatccaaggtccctgatagatagggactggaattttggcagtgtcttttctagagtagaacaaatttatcagttgaatttgctgtagttctctgaaggtttctttggccacattagaatttttgagccctggcatccaagtaggccaacttcaaaatggctgtgtgctccactcagagattctgctgtgaagactggcaggagattttttagcctattctgaactccaactgttccagttcctcttgctttccagaggtgtgagcacctggaagcccctgctctggtctacaccccaggctcaagattcatcctgctcactcagccactcatgctgtcaccagtgataaaactgtaagtgtcagcagttgcatttgattcttgcacaagaaatagttaccctctaaagacttgttcattcttgtgcctgtaaagtgtggtgtgccctatgcatcagtattcttgcctatgaaatgggcatgtaggctgggcacagtggatcatgcttataatcccagcactttgggaggccgtggctggtggatcacctgaggtgaggagtttgtgactggcctggccaacatggtgaaaccccatctctattaaaaatacaaaaattagccgggtgtggtggcaggcgcctgtagtcccagctactcgggaggctgaagcaggagaatcgctygagcctgggaggcagaggttgcggtgagccaagccgagatcgtaccactatactccaggctgggtgacagagcgagactctgtctcaaaaaataaragaagaaatgggcatataaayagatctacataagactcactggaagtttagagctctttaaaaaaatggacaacaaaaagtttttccaaataaatgttgattctgggcctggaaagtttgagtggctggcttctcagagacagttactaccatccatgctctttaaagttccattgctcttattctaaccttgaaatcaaagaaaccaaagctgtggtttcttgtctgaccttggctaatgattttctgattgactctacatgcaaaagaactgctgataagtttcttataggggagaaaagatgatggggagaaaaggaactgagttcatttcctaacctcagtttccctgcttactcacccagtgggttgggagccacttgctgggtctgagtttccataatcaccatagaaatggaagtaatattatccttttgcccagtcgatgggaggwtggaggaatgtcttagtctgtttggcctgctgtaacaagataccataaacttggggggctgataagcacatttatttctcacagttctggaggctggaaagttcaaggtcaagacaccagcagatttggtgtctggtgagggcccgctgtctggttcatagatggcactttcttgctgtgtcctcacatggtggaaggggcaaggcagctctctggaggctcttttataagggcatgaatctcattcatgagagctctgtctccatgacgttatcacctcccaaaggcttcatctcttaatataattacattggtgatgaggtttcaacgtatgaattgggggtgggcaggcataaacattcagagcatagcaaggagaattcagggattgcattaagaaagtaagttgctgagcaaagggactcatcttcaaagtccaatacaatctttataatcttacaaaaagctttcctggttttagaattagctccaaggaatttggcactagattttagatttgctcagagaaagagtgtgagagagagagggatgtggcttttgtgaggaattccagcaccttcctttgcaaagatatgccctaaagaacagtggcggcctatcctcaggacagaagcacttaattttgtctaattgtgtcaatttctaggagtcattgggaaattcagcagctaatgaagatggccctgttctgtcaggtccctactggaatatttaaaattctgtttttcatacttatcagctaaaagaattacagaaatatatttctggatcctgtggggaataagagcagaaatatacaaagcttcttctttcaagacggatcccagcagcccaagctaatgtcacagttgtgttaaagactattgattccagcaggttctgggctgggtctcagcttcccaggactgttccaggctgacctcctttccctggttccatctttttttgggacttctgtgggccttcattcagcatgtggcttgcgggtgtccaggtctgcaggcatacacacctctcctgatctgaatcagagaacaaaagataaaggatcgaggacaatggcctcttcacttttgctttctctcttctttgggttttactttgtgtttccaacagccaatggaaggctgttctatttagggtaaatgactcagacttggtacatctcgaatcgtatgtcagagcacactgttgcccctcaaagctcaggaaaggctgcatactctatctccctcttgatggtttcctcgtatttacaagttaaagaccatagatgtcctgtagtaaaggggttagcttgcctctgtttatcccggtgattctagtgaaactaaaatgcttgtttctatggggcacagtccagatgtgttgttcacttggattgaccaatcctttcaataaagttttgatgcaaccatgtgaatcccaagttttcagcacttagttttgtgaccttgagcaagtcacctaatcattacatgcctcagtttcctcatctgtaaaaggggataataaaaagcatctacttcacagggttgcattgaggattaagtgctttaattaaggttttagtacagtttctgaaatataatgtattctatatatggtagctattattatgttagtatccattattatttgctggaatcttttaacactgtgctgagtgttggtactgtcttcttatcatgtcatagagcatggggtagtataagaatcctaccttaggtcaaaggtcacaaagccctattgttttattcccaatagtcttacagggaagatgcagttgtccttgtcttatggaggaaggaggtgaagcacacccgagcggtaaagaggcccctggtcacacagcccatacaggagtcaaaccctggcctctggctgcaagcctgccatccccaagcgtctctctaaagcttcttgtcaaccagcctcagacaggggcccacagacacgaacctcatctcagcgttggtaggaggcaccttccacttggattctcttcatgtggttaagagagtcctgagttccaatcctaagttcactcrtctctacctccttgcctttgtgcaggttacttaacttktctgaccatcagtcttctctgttgtaacatagggatggtaacacccatttcttatgcatgcagtgatgcttaatgacataatgtaggtggggttcatgcacaaggcctggtatatgatgagtgctggtaaatcttagctcccaatgacactgtatcaggctctgtgctagggtgctttacgaaaatgatctcatgtaatcctcacaacacatcaggatattggtactcttcattttacagatggggaaactgaggctctgtgggattaagggactcacccaaggtcataaagccagattgtgacattgagattcaaatcttggcaaccttactttctggaaacactttcccccttcctcttctttagacccacatgcaggctgcttgcagactctgtgcttggccatgtttcttggtcagcagggcagtcgggcaatgggcattttaatcatgtttatgctggacagggctgtcccttgggcttgaggacaatgttcttgaaccagaagaatatggcagaagtataatgccatttcaccaggacagatgcatcaaattccatcttgggtctggtaattctgccacagatggtggcccattgatatgtgcatgcttggctggggtgagagtctgtgccaatgtcacaggacacagmaaccccaatgagtctgtttacttatttaacagtcaaggtgaccagaagagacactttccaacaggacacaatgaggaggtacccagcaagtcttctagctgattgggggaagaaacccagtgtattacaggaaaatgagagagtgcatttgaatttgtttctaatctgaattttccatataaactctagttagcagtttcaaaactgtggacgcacttcagcctaagggacaaaaacaaaacaaatgacccaaggtaccagctgcaagatgctggaataggagggagggagggaaggcsagtgagagggcaagattattaatatgcttttcttactaaattggctttcagaatcaaggggaagaaccaaggtgggttgttaagggagtactgatttagatgtgctgagcagttgaaatgtttttgtttctcaaacatgaaagcacttggctttgcatgactgggttttaaattgctcagcaaagcatcacttggggctaacctgagtctgtgaagttccacaattcaggaatgatggttactgcagcactcttgtgtttcaaggttcgtcatgaagactagcatagattccactgttcaattaaagcaacgtttaccatgatattcctattttccatgatgcaggrtcctgggaagcatctctttcaggaagggagtatgtattcaaggtcagtcagtatatgaatgtgtctgagacttggatggctcaaggggatagagctaggtgttatctggcagtcgcaaaagtgagagatgatgacaaggccaaggtaggtaggagaatggggatccctcattcatttatcccatcattatttattgagcaccaactgtgtcccaggcattgttcaaggttcaagcacaaagccgtgttcaatgggttcaggtagaaacatgcacagttacatcacaacaragtaaaccatgggaactgcatggtgcagagtagggggtatttgcatggcagttgaagacctgtgtcggacgctgatgcttctataataacccaacttggttcctctccacttttagagccaattaattaggaaaaacactttcttccttccctctctgtcattctatgttggcatttgtcccccttgggttgatgggcagacacaggtatgaaacccataacttcatctctctgggattcagtttctgggcagagtgggcaagggaggccagggtcttctagactcactaagtcagaagcatctcctcctgatctttggtttaatttttcttttgaaggtactcagtccatgatttcagattagggaggcaccacctggcaaagggggagcctgacaatgcagggcagttctaagtaccaggcttgggaccgattctatggagatatggtagatgggactaccctcaactgaataatgtgtgaagagaatttaagaccatgcctgatacatagagggtccagtgaaagttgaaggcaaataaccctggtaaagaaggcaggaaacacaaggaagccattcatttatttattattcattcaatcaacaaatatttcttaaatatttataccaacaaagcatggaacctctagccaaactctctggtttcaaatcctggctgttttacaatatctgtataaccttgagcaagttacttaattattctctgtgcctccatttcttcatttgtaacatgggaataatcaaaaagaataaatgaagattgttatgaagactaacacrtgattgttattattatctttttgttcatttatttagctgtgtccttagtctgttgcttgattggtgtggtgttggggatgtggccaacggagacaggaaaggtctccgtctttacccaccttatattacaatagaagagtcagattataaaaaaataataaatcaataaataatactttaaggtagtgatgagtgatgcaggaaacaagagaagatgattgtggagtgagtgattactacgggtgaggtccaatgatagagaggactagtgaagagggaagacagtcagtctacacaaagatcatcctgttgaaaaatatgaaatatgcaagtctttggaatttacccaaaaaaaaaaatagagaaagcatttcttgagtttccaagagaggcaagcaggatgagccaccaaaaataagtacggttaaataaagattgattctgggmccaaataagcttcaagataattatttctcatggtagtgaatcagtatgtctcacaaatgcattcatcttttcatgttttcagtacccaaggtccttgatggatggattaatcctccttttcaccttgcttccttcacctgatccctcacctctcaatgaattgaaattaaggaccgttcatttggaaaaacctattaactccctgcttgtcgatggcttactttctactcagcctggctgggttccacctcttagctcgtgagccctcacgcaactctgctgtctccattagtgtcccttgtgggctggtggccgaggcagttaggcttatgaatattccagttgctcctgtaaatttccagcatccactgttaggcaggacatgaggcactaagggatgtgcatcacttctgggctggggcaggggatgcctgtgtgtggtggtgcagttgctgtcttccctgatggcactgaagagactgtggcttccagggttgcagtgcaagatggcggagcttctgatgcctaggcccatgagtgggcaggtggagcagagcccaggctgcctttgtcttcataggtctctaacttcttgacttctcaatagcctcaatgactggttccttcctgtatttggtaggtgattgaaaacctcttaacacatgaattattcagtcttggctaggccttctcctaaacagttgtctctggttcttaaagttaccttttcctcctctctaaaataacttmcttaccttttcctgccacggacactatgacctcttggttttattttcttgattgtatttggcattctctgaaattgtcttatttgtacatttatatgggatttgtgtctcctcgctagaatataactcttatctatttatactccactgtatcctcagtgcctacagcagtatctggtygaaaggggtgcctgataaaaatgtgaatgaaatgaatgccaacagccaggaaggcacctcatccccctcccctctgccaccccctttatcagggctgggctgtgtcagctcattgaggcagtagggagtatggttaggatgatggactgcccgggctcaaacacaacttcccacctgtgtgatcttagataaattcacctctctgtgcctcaatttctttatctatacaatcaggacaatggcaatacctatcacatggattgtttttcagtttaaatgagttaatatacataaagtcctcagaaaattatctgattcatagtaggggccatggaggtattaccattgtcaacagttactggggaagcaaagggcctgtcctctctctggtaaccccccgacccccttcagtctcttgagaacccggcctcaatgctcacctggggtcccctgggatccattcagcaagaaggttcagccacaccaagccctgttccttaagcccaggagacataaatccacaaagcctacaggagagatccctgaggaaagtggctattctggatggggccagaaggttctttctcaaggtcaaagctctcggagacctgatgaggccctgcccctcaagcttctgtcctttccacagccctgcagcattatttccataatgttattaaaaaccaatgtgtgctggccagatgagtgacacttcccagtgatggggctcggctctgctcctccaggcatggagaacttgttcaattatgtgccaccccgtgatgggcccaatcacagtacacacattagcttctgattatacccttgttgagtttctcttgacaggaaggaaatgaatttacctcgtgtcacctctgtagtttgcaagcaggcatggcttctgataatagcacctttcatgttttgtaagaccaaggagaagcattcgtgtggtggccagtccttggtgaccctttgtctcagcctggaggtgagcttgagctgattcttcatgggagtgtttactcctggggcttgtaggaatctggctgggggttgggtggtcagctgtcccataagattgtgggccttggccactgcagcatgcacatccctgaatccacactcttatggtatcgaggccttgggcaaatgactgaatttcccttgaccttcccttccacctgtaaaatggggacaatgatagtagttatctcacagggtaggcgtcagatttaatgagctaatagatgcaaagcccttgcatgtgcctggcatataataaatgctacattgtgtttttatcattaaaattatcttaatattattttgctgttgctgttattattgctgttgttattgcttagattggaacatgtctttgctatttataactgtgtgaccttgaacatatcacttagcccccatgtgccatgacatttgtaaaatggggaaagaggagtctgttccttggtgcagctgcaaggatgtcagtaggttggcacaggaaaggcctttgaagcagcatcagtgcagggcaagtgttgtgggttattattggtgacttgctcccctcaccagaggggtcttttgggtgctgtggagccagaggggtctgtccatggtgggttaggattatgcacttaggtcttgctttccatttgggacagtaagcatctgagagaagagtttgtccctgactataccaaattccaagttctgccaaggaatcctggggyaggccagaaagggaggcaggaatggagccagtggtggacccagcgtttccttccaaagcttttagactcagctgctaaagccagtcatgaagtggacgtgattcctgaggcagggcagcaggcccctctctcactacccccttcaccagccccaaccttcagcaacttttcctggcaggagaccacatcaccatcccctccccttcccatcacaggcatttcagaacacaaggggatctgggggacccacgtctaaggaactgtgactgagagcctgggaagggctttctcttgacctgggagagggaaaattaggcaaattgctgtgtttctccactgtaaacctgaatgggaatgagggaggagggagaaaaagccagacaaaaatggagmcacatgcagagagatggagaaacagagaaaggagaaggaaagagctacagagataaggaaatgagaaaacactgagaaataattgggaaatgagacagacaagctcayagaaggacttagacccagaaagggaaagtggaaaattatcttgacagctaacacgtattgagaagacagtatgtgccaggcactgagattagtgtgtgatatatctcatttaatctttgcaacaattctatgagataagtgctgttgtcaacttcattctacagtgaaaacaacggacatacagaacggtgaggtgtctaagatcacacagcttttgtggaggagttaggactagaatccaggtcaatttgagtgcaaagcccatgtgcttaaccccctgcagagaggccatgaccctgggacctaaagcatggcagagcatctctgagtctccctgcactctggacattgagaagcactagtcattctgttttgtagtacagatgtgtttataaagagactccagggaagtcagatgggtaaggattatgcctgtcactcttttttttttttttggcattttttaaattatactttaagttctagggtacatgtgcacaacatgcaggtttgttacatatgtatacatgtgccgtgttggtgtgctgcacccattaactcatcatttacattaggtatatctcctaatgctatccctgccccctccccccgaccccacgacaggccccagtgtgtgatgttccctttcctgtgtccaagtgttctcattgttcaattcccacctatgagtgagaacatgcagtgtttggtttttgtccttgcgatagtttgctgagaatgacggtttccagcttcatccatgtccctacaaaggacatgaactcatcctttttttatggctgcatagtgttccatggtgtatatgtgcacattttcttaatccagtctatcattgatggacgtttgggttggttccaagtccgtgctattgtgattagtgccacaataaacatacatgtgcatgtgtcttaatagcagcataatttataatcctttgggtatatatmcagtaatgggatggctgggtcaaatggtatttctagttctagatgcttgaagaatygccacactgtcttccacaatggwtgaactagtttacagtcccaccaacagtgtaaaagtgttcctatttctccacatcctctccagcacctgttgtttcctgacttttgaatgatcaccattctaactggtgtgagatggtatctcattgtggttttgatttgcatttctctgatggccagtgatgatgagcattttttcatgtgtctgtgcctgtcactcttgacttctgtgttagttaggattccttgggcttcatgtaacagagagaaaagcagtttttcctacaagtagaagtctagatgtaggggtttctggcactagtgctgctgctacatcatgtcaagrtaktgtctgtaggatgtcaggattcccttggcttttcactcatggctgcaagagagatggagagcttcagactttgggtccatttcaaggtagaaagaaaagggggaagggcaatatcaggttaagctgttccctcctgctttttatcagacatcttcccctgcagaatatgtggcgtggccacctatagctgcaagggaggctggaaggtgattattcagctttccatcttcgaggacaggcaaggttggactccaccttgggtgagccaaactgcagtgtcagccaccttccaacaaaccagcctaagcccaaacccaccagtaaccctcccctagtggagggaaacatttagttctcttgggagttgcaggcaggtctttgacttgaggcaccattctgagtcaagctgggtggtggggaggtggggtgaggcaggagtgcctagctctgcttccccatggtgttgctgggggtagatacaaacacagtcacatctgctatgtctggaaaaccaagactggagtctctcagctctccagtgcctgctttccctgtagccaattgcaaggctgacatcccaggaaaggcagcarattagatgagcacaggagcagagaggctgggaaggcrgtggaggagggagaaatgtgggtttggcagaattttctaaaatatcactttattgatttggaagagacacaagagaggaaatataagagacaagtgataagaggctcagctgagatgggcatggaagagcctgccttttttttttcctttattrcatacctatggagcttttctaagcattaaaaaaacacttccttaccccctccccatgagattttaataccacagatacactgtatatctgtgtgtgtactctgtatgtatctgtgtttatacataaaggttgttttttcacttttcaatgtctgccktcctggaggagactttgcccccattgagaatacatgcatgagacacatctctagagacgcatctgggcttactgtgggaggagaagagctggtcccactttgtcaaactgtcttgtagacaaagggaattgagaagagtcttacatttcttgagcacctgttaggtatttggcaccaagacaggggctttagatctgacaactcacctgatgcccaatggcagttctgagtggtcagagcaggggcctcatttcacaaatgacatcatcaagatttaggggttcctccctcctttgaagagatccaacctgcccagatgaacaagctagcactattctgatgacagggcatggttgagtgtcagatgggttcaaagctcgtaggatgagcacagaataggctggagtctgtagtggtcctccctggaggagatggggtgtgaactgagctctgcaggacagacagatgcagagatgagaaggggaggcagcacctgctggagaagagcaggagcagaggcttagggtctgtaagggcctctggctgcaggggaggattttcgctgagagctgagagagatggaggcagagccatcccgggcaaagagaaaaagccccaccctggcatgtttattcctcagtctctggttgtgatgtagtattgagccagggatccaacccagctatacttagcaccatttccagaaggcatgagggcgggagatgggtatataaaaggcaggagtctggggctcctcactcagaggcttctgaaacctgagtggcattttcagtgtatccctgtggaggaaatctccgaaagaaggtagctgagtctgtgaccaaagagaggcttgagtcctgtttccttttcactcycaagagccttcaggctcactcaccccttcccttacagatactttgctggagctcctcctgacatgattgtattagtaaagagaggcgccaataacaaatggcccccaaatctcagtcggattctgcaacaaaggtgtatttcttgcttgtccttcatgttctgtataggttgtactgaaacccctgcttctggagccattttcccccaagattcttcattttaacaygtccttccatttgccatactgcaggaagaaaacatggagaactgcacagctcctaaagtttctgccaaaatgggacatatgccacttctgctgatgtttcattggccagtgtaggacccatggcttagcctaacttcagagggtgcagggtaatgtaatcctgctgcatgcytaggatgtgaagagcaggaaatatttgtcaacagcattaaacatgaccacagtgattataataaatgatttttcaatatccagttgaaatgatttttctgtttcttttctttttttgacacagagtctcactctgtcacccaggctggagtgcagtggtgcaatcttggctcactacaacctccrcctctcgggctcaagcgagtctcctgcctcaacctcccgagtagctgggatttcaggtgtgcagcaccacacccagctaatttttgtattttttagtagagaaggggtttcactatgttgcccatgcaggtctggaactcgacctcaaatgacccgcctgccttagccttggcattgggcctctcaaagtgctgggattacaggcatgagccaccatgcccggcctagtgtttcttcttcctctgtaatgctctgatggtctctgcatcagtacttatattatgcttggtaaatatttgtcttcccatctaaagtcaaaacattagggacaagatcctgttgaatgagggarctacaaatacttattgaggatccactcactgtataccaggcacagtgctaggtacacagagcaaactcccagtcctacaaggtggtggatctaatgacgtgacagatgacttgtctccgagttctggaacatcctgagcatgttctcatcccagcactgactagtccaactacttgttgattctctaagttagaattgggagatgtgggaagcttccagaaagaggtgacctgtgacctagcacaggctctacccacagcgggagcacaatgcattcttgaccttcacaatgcttttgacaatggttcattcaccctccatcacacttgttcctttcagtagggcagatattgttagtcccattttacagatgggaaaacagattctaagaggtccatcagcctggtctgcttagttctttgaggatgagtattcatctctctggctgtgtcagctgagctggacctgccgaattcaatcttcccatcactcagctcccaatgccatcagtcaagtgttatcaaattggtggagcttaaaaatgacagccatttgaaaytgagtagaatttggtattattaaaatagcattctaaattttaatcttgtgcatcgactttttaatagcttctactttcactaaaaattgtgggccatgctcacagacattcaatttaaatactgtcaggcaagactgatttctcttccaacattgccagatttttcttttttttttctttctttgcattcatcttcttttttttttttaagcattgagttaatttttcactacttggaaatttcacagtgtatgaaacctcagaaaaagaacatatctttgtgtacagctcttttattctttgtcttctgttctgtagccttctttctagcctatctgttggttagggcaggatcctctgtggaagctaggtaatggttaattttctgggacaccttttctcatcacttcttccttgtcatgatgccaaacaagtctcgtagtcaatatcagcaccctcccctgcatgtgtcctttcaacacttaatctatctagcacttaaaaaaatatctgggagatgctggccatctatgaaggaggtttctcccttgctgctgtgtccattactatttttttcccaacttccccctgcatctgctgtatgcattactattttttcccaacctgtccctgcatcttacctagttttcttcatcctctcattcccatcccagtttctcaccttgaaccaagattggtggagtggaaatggagggcaaggttgatgaagaggagggacaaggggtgatatgaagtgaggagcatgggtcttggagtcagamctgaccgggcttgagtttcttcctttcccagttgctaactgtgtgaccctggaaaagttgcttaacctcctagagccttggttttctcacttgcaaaatgaggttagtggtacctgtcacacagggttatcatatggatccaacgagaaagggtacataaagtgatgctgagtgctgtggttaatggcatcatagccaactggccactctttcctctcctccactctgcaatttctgcaccccagcccagcagttctcaggtctagttacacattagaatcacctaggagcctttaaaaaaggtgcaaacrtccctaggcctcactctagaccaattaaatcagaatctgggagtgtatacttgtggcatctttacttttaaaattttctctaggtgagtctgatggatgctagggttgagaacaactctaagtccccagggttgcctaaagtccaaaaacacttttcttttaagatcagaggaatcttattttagtgcttgtgggcagatctctcattagtgatggaatgggatttaaccttccttggctgtgcctaggagaaagagaagaagaggcagtgtggaacagggactctcagtgggtaagcccaaggtttccctttgttttcatcttgggacacctatttacccctgcaactataccgcttgtgcttccataaggatgaggacgggaggaggaggaagatggggaaggaaagagcaggaaaaggagggaaggggagaggcttttctcatgggaccttctccacactcctgtgcctgctgagatgtgtcccctcctctgtactctgaaaatcctttagtctaaccctgagggtccaatatgtggccagtagccacatatggctgttagacacttgaatatggctagcctgaattgagatgtgctgtgtcatacatgttccaaaactaagtaagaaaaataatctcattaataaaactttaaaaatattggatacatgttgaaattataatatattacatatattgggttatgcaaaatagtatcaaaattaactttacttgtttatttttcattttttaatatgagtaatagacaaatttaaattagctatatagctctcattattatatttctgtcagacagaactggttcaacccgttgtttgacactgagtgtatgtttcatgtgtaaatatgtctcaacgcttgcattagatgggcagtttgagaacagagacctcagcatcccattcattttctggcccccaaacacctattttcaaaatgccttgtactcagcaggcagttggtaaatgttttctgtaattgtgaatgataacagtgatggtagtgatgattgtggtaatgaagaagatgatgtaataaagctcaaatggtatgttggggccaaattacaaagatttttgtaagaaaacagtgcaaggtggaatggttacatttttaagaccaagcgccctcaaatacaccttaatttttgattaatttacatatataaagacccttgatacacagaacaaaaacatcttccatcatttctgtttagagatagagtgattcttaaagagtcttacaatgaactcccccacaaaatgctcagtgaactcttgctagggaccagttctaggtggtgggagtagagcggtgagcgaatgagataaaaatccatgccctttggactttacacagcatgtgaaaataaacacatttccaagtaaagtgcttacatgtccgatagtataataagcagcctggtggaaaatcaaacaaggcaaaggaaaggaggtgtggttggggcaggcagggggcatgtgaagaaggtgaacaaatctatgtgggcttacttgatcttattgtttcaataattcagctaatatgtttctttattcatttattcactcaacaattgcatatactgaaatcctattatgtcattcaagccatggtgagacaaggaagtgggtttcacctcccaaggagcgcacagcttactctcagaagcaggaaaacgtgccaattacccatcacactcacatcgtttctaaagtagatcctcaattaggcaacacttcagcagctgcggagtcactccgtagtagtctgaggcaacacaagtgcatctcatctgaaatatcctctaatgcaggatatactggagctgttgcctagggagatactgctcaaggaatatgggttccacaagcaaatgctatgaagttctagttattattttgagcccagaatgagttgaggcctaaaaatgttgccattccattaaaatgtgttagtttgaatttaggcacaaatgttatttttgaattataagcatgcgactcgtttatagtaatgtagctttgagaggactttgggttatttgccaggccattctttttccttttcttttcttttcttctcttttcttttcttctctttcttttcttttcttttctttctttctttctytctttctytctttcttttttyttttttytttttttggtagacatgggtctctctatgttgcacaggctggtctcaaactcctgggttcaatcctcccaaagtactggacttacaggcatgtgccaggccattcttgatataagctgtttctcacccatttggtccaaaaatagaggagacaataggccctctgtccagggcaatccaaggtataggactcacatcctgctctatgccatctataccattgctatttgccttctcgaatgggctggcagaaccgagaccttccttgaccagatgaggccattctggagctccaagcaggaagcagaatgaaaacatgtgtttgttttactaaatagctgttgcatgtgttggatgtaagagtcccccttgcttaaagagaaaataacctaagaacttgctcttcgtgcatttcacctttagaactagaaaagctgtctaattagattaacacacaggtgcatgtatgtgtgtgttagagtatagatactgctaaataagcccagtgtttctctgcatttgtctgaattttggaaaatgggatgaggctgattaagtggctttcatctgagagctgtgtacttctgtggttctgtttttctcctttgaatccctatcctatctcatttggcctccttgctgtgatcccatggatgtgttcaagtgtactgctagttccctaccactgcaaaaccctcctagctctgcctggtgaccccataaatccccagtgttccatgcctggtgctctggggagggaagcagatggcagggctgtccattctgccacccagtgaggcaggaggtcaactagggtaacagcagcaggtggggaggtggggtttctggtctgtgcatgcaggggacaacagatcatcaatgatccatgggcagaacagccctcatggaactaacactgctggcagaaggtggcagcagctggaggctgcttcagctcttgatcaagcacagaataatgttgggtgggtggctgagagttgctgcatttatgaattgtcactcagtggcagcactgaggtccccaagctctgtttacaaatggattttttgctcaaatgtttccttaactcagagcaactctctctcctttttttccctctcatcccctggccaactcctgtgcacgctttaggtctcagctttgggccccaaattcaggaaacatgttcctcctctgtgttcccttacccctgcgtactcagcctatcgtactgtaaatgctatgtaatctgtctcccacaatgggctgtgccctcgtaacaacaggggttgtgtcttgttcctcattgcattttcatggcctcaaaatgtatatctagtgctgtcaatatttgtagacttgagtggatctcatctatgtgcatggtctaatttcattaattatagacaaaaaggaagtagcagcttgggtaaccaaacaagcagataatccccaatgtatttctttaaggctttgcagtgctccccagggcaatttgggacaggggacaggttacctattttatatatatatacatatattagagatgaggtctggctctgttgcccaggctggagtatagaggtgcaatcatagctccctgcagcctcgacctcccggactcaagggatcttcacatctcagcatcccaagcagctggaaccacaggcatgcaccaccatacccagctgattttttttttttttttaaaggtwttgtagagacaggcccatgctggtcttgaactcctgggctcaagtgatcttcctgccttggccttccaaagttctgggattacaggtgtgagccactgtgcctggcccattgtcatatttattaagtaaatatgaggacttaagtggtatttgaatattgatatttataaaataccctycactgccttcctcttcagcatcatttcatccttactggctctacctactcaaaacaggaatggttgtttatggaagtggatatgtttaatggaaattcatatgtttcactgacccatkgttgccatcatgccatatatcataaagcacttttgtataaattaaatataaggataagcaagttattgctcagattagatactgtattcctcatgctcagacctgctgccagtgtcagaggcctgagagtatgccagctggggtgggtcaggccagcgtgggatttaaaagttctctagataagccacatgtgatgattgagctctctctctgctgttcaggcatgtggctggcaggtacatggggggcagggagaaagacactggacttagactggagccagtgtgttttatggcctccttagtttagattccgtgtggctctgtacgttggagagggaatggggctcccctaaccatagtaataataacaataggaccctcctatttaatcccatctctgtgccaaacacttggctcagtgctctcccacattattgcatgccccagcatcctgaatggaaaatactattttcattttacatgtgaggaaactgagtcctcacaggttaagtgactttattgaggtcatataggtaataagtgttaagattcaagttctcccttgaacttgagttctccctggctgcttttcccactaaactttgctgcctgaagagccatcctgggctgttctgattttgccattcactgatagctgtgtgaattttagcaagtcatgtcaatctctaggcctcagctacctttctgtataatcgggagatcactaaccgcctgctttggagggatgttaagaagattgaaggaaccaaggtgcatagcagtatttacgaaattattgtgagttccagataaggaggggtcattgccattgtttgtatttcatcctgactcctggaggctttaggttgtgggctgggaacactgaactaatattgaacattcttccaaggagcaaggcaatggagatactaaccttggtgatctgcacagcttgtgtgagccccgtgggctcctctaaaattgacagawtgatgaggaagtgagtaggagtggccccaagcatggctgggtaagggagtggagagtggctctgttgtgatgtggactgagggtgtataagctctctgcagctttttgggaattgtggccattatgtttttactatctcccattgtaagaaatttctgaattctttttatggtgaactcagtgggtgggtgggtgagtgaacaaactttcttcagatcttacgtgatatgtccacagttttctcaggcagaggatagaaggggttagatattagaaacagtacaaagaaagggcacctgtgcaaaccaatatgtggttacgtctaatttggaacaacaacaataataataacaataaaactaattataatattaacatttatccttactggggttgtacaatgtggcaagcactttytaagctattcgggtgcattatctcatttaatttttataataaccttatgaactaagtattatttttgttatcatttttatagatgaataaactgagggacaaagaggtgaagcaatttgcccaaggtcttatcctgattagtgatggatttaggactggaatcagaggttaggattgaaatctcagagccttgctcctactaaatattttctgycatgtctttgcaataaatgagggaatagaagaattaaattattttcaggataggacattcgtgttgttcaatttcttattatccagaccaacagaggggaggtgttttagttcatttgagctgctgtaacaaaaatacctagactgtgtggttgacacaaaaacactttttacagttctgaaaactgggcaatccaagatcaaggtgctractgatgccatgcctggtgatggcctgctttctggttcatagatggcagtcctctgactgtgtcctcacctggcagaagaaacaagagggccctctggaatctcttttttaaagacagtagtctcattcatgagagatccttctcatgacctagttagcttccaaaggctttgcctcctaatatcacattggatgacaggatttcaatatatggattttgaggggacaaaacattcagaccatagcagtagccaaagaccacacaagtgatttgtgttatttctggtatgcattatgaagggttttttgatgattttagagtcagggtataagaggtggggaagcccaatgactaaaaatatagatatatattgaccgggygcagtggctcacacctgtaattccagcactttgggaggccgaggcagggggatcacaaggtcaggagatcgagaccatcctggttaacatggtgaaaccctgtccatactaaaaatacaaaaaattagccgggcatggtggcaggcgcctgtagtcccagctactcgggaggctgaggcaggagaatggcatgaactgaggaggtgaagcttgcagtgagccgagatcatgccactgcactccagcctgggtgacagtgcaagactccatcttaaaaaaacaaaataaaacaaaaacaaaaacaaaaaatatagatatatatttattctcaataattttgtttatttgaacttgatgtcgaagagtctttctgttttctccttggaaatgtctcagaagtcatgacctcccatatatgttttcttctgttatcttttgttgataccatttgcatcagaagaggtcttcaactatttgcaaaagggaaaaagaaaagtcatgaccacccgtcagtctttgtccacttgtctctttcaggaccacggacaggggccaaggtgtctgagtagacaaacattttagttaagctacgcctgtgttcttggctcaggttatcttctttgaggccttttttctgacttttataggatgtcacactagcactgcctgagcacacacctgctgacatcagagtggatgatgctttaaacattttccaaggataatctgcggatgggtaactggtcctgtggcctcgttgggacttgacagtactggccctctgacttgcagtttgacctgcctgcctgagattttagtgtggttggtgccaagatttaaaggaagtgataagcacttacttgttcttcagcatcattaaatgatratgataacatgggtgatgacaattacatatttattgagtgcttactgtgcgccaagtactgttttgcatgtattgttttgtttaattcccaacaacaaatcttggggatatgaatagttttagatgaagaaaatgagacacagacagatatttaaaatgtgcaagacaacccagttatgtcataaacagtggagcagagtcccactttaccttgaggtcacgttgtgtgcactcccacaaggtcctcagggtggaaagggaggggctgacctcttcagagtgcctatttgtgtgctttgtgaatattattatactcaaagcctatttcctggggttgtgttgacataaaaatccccactttatagtagaggaaactgagagagcwtttaagtggcttacctaagatygcacagactatacatagagaagccaggtttgtctgtcttgaaactttttttttttgcagtgggctatttactatttatttcccagatggctctttacaccaytgtgggcagtcctaccttacagtggggtctggtttctcaccttataggaggatgtggttgatacttgataagatttgatactggtcaggcgaggtggctcacacctgtaatcctagcactttgagaggctgaggcaggcagatcacctgaggtcaagagttcgagaccagcctggctaatatggtgaaaccccatctctactaaaaatataaaacattagcaggatgtgatggtgggcacctgtaatctcagctacctaggaggctgaggtaggagaatcgcttgaacccaggaggcagaggttgcagtgagctgagattgcaccactgcattccagcctgggtgtgacagagcgagactccatctcaaacaacaacaacaacaataacaacaaaaacagcagcaaagatatggtgctcagtctcctcttctgcttgggattcaagcttgtctagacaagaagrtggtgaagctcttgatgacagggatggcgggtgaacttgtcttaggtgtgcaagtgtggacccagaagcaaaratgggtatgctgtgcagaagggttaataatcacccccagtctggatcattttgctgtaacatctgctgctaacccactgctaggagggggaatgccaaytgtagtgctgctggagtagattttaaaacagaaaacatttgtgtgttgaagtgaggactggcrttctgttggttggatgacataagtcccaatttcttccatttccccatggtgtgcttgcattttggggcccaggtatactggggagggatgacccatatggatggagtgtaggctcactttggtgtggactagtctcactaataaccacgtaattatcattgctagaaaggactacagatcattctggaaaactctggaaaactcatttatttatagctaaggaagctgaggcccaaagtggaaaaacaggactgaaagtctgcatttgactttgaatccaatgctctttccctggtaacgtgattaataccaataacatgaaaatattatcaatagcattaatatggtcagtaaagcttccaccagaaataagcattgggccatatgttttgaagtttgtcaagaccactataagcagtggccctttccctcaaagaaggaattgacattctgggtcttgcaatataaaacagagatatcatcatcattatcactgtcaccaccaccaccaccaccaccacgctcgtcctcaccatcagacaaatctattttcagcacttactgtgtgccagattctgtgctatgtgctttatttatattgcatcataatttaaaatttatggcaaatctattgtgaaccatccttgtagatgaggttcagaggtgtaaagtaactattacaaagcctaccgttatgaagttccacgtgggggatgcagttagagaagacaaaacagtgtagaggcttcatggtggtgagacttgtgggggaacctgagctaagctccagagagtgattaggacagagaaaacagatgagatgaggaagacagtcctgtcaggagcaatctgaaggatttttgcagtgagggaagttgtgggttagactcagggacaatttgtagagaggtctgagtaaggaatgaatggcttccaatcactactgagcacatttcctgttccataccccatgtaaggcacagggtgtgcagaggtaagaggcatggttcctgtccttagaaatgggggggaagaaaccaaaacagtcaacccccatcctggataataagggttgggcaaagggtaaactcaaaggaccatgtgagttcagaggaatggggtcaaactcattcctcagtggcttgctaagggtttggctttacattaaaagccagagggagctacagaagtattctgagttaaggagtgacctggccagatcatctaactggggagactctgcagatactgtggagaatggtatggcgacaaggagacctgttggggcagcagaggcaagcacagcaaagccccccagcaacaacagtgtcaatgtcaatgcagagataaggcagaaagaagcgatcatgagaagttagaatggatagggacttggtggagggaggaatggggatgggcccagtgggcatccatgggaaatgcatttggagcctgttggtaactggccttgaaggtcatcctccctccttgcctacctgttcttggcttgtgagtaagtacacggagaacatgtgttagtgccatcccctggcttagtcagctacccaagctgtagcccaaagcccagagctccccaaagtcagagcttgaggctgtcccaggatatcactccatgcaaaggctgattccactttgcggttggactggttgtgtttgcatttactgtgccagccacacctgctctcctcgacgcccagtgctgagcctaggtggctggtgaagggcagacttccaggagcctggactcactgtggcagggaaggaggggagaggcacagctggtgccaagaggatattaacctgacatttagcaaaagggtgaatctgtttattgttctgtaacaatgaggcatttgcatcctgagtcgccttctgttttcctattgtctttgctcctcagtggtcaggccaggctgcagtcttgacagtttaaatcagcatggtaatgaaggggtggcacctagtcagttcaaaataaaaaatcaatctcactttctttctctgacacacacacacacacacacacacacacacacacacagagagagagagagasagagagagagagagagagagagagagagagtctagagctatactgagtgtccagaagttcctctctccagctccttccttgatactcttaaaattgtagtatcccaacccagataacttggaggtttggaaaggggacccctgtattccttctgttgcctccaccatagcctggctttccagctaccaacagaacccacttgtaggcaagaagaagcatgaattgaagtcctgatgcatgcatctaggaatgctgagaacgtgacagaaaagctcttacacaagctgggcatggtggcacccagctactctggaggctaaggttggagaattatgggagtttgagtccagtctgggcagcatagtgataccctgtctctatacagaagaaaaaaatcagacattcaggttgaaaatttaaaaaaatattctctdtagcttcataaatattttagcattgacagggcttgtgtgcttttatcatctcacagtggtatagtragctgggtgggaraggtgtcatgctaggtgaagaagctaagacctaggctcttggatgtttataatgtaccaggcttggtactgggtactttaatggcatgacatcatgtaattctcactaggatacaatgggacaggtctggttttcccattttacaggacactggaaaagtttaagaatgttttcagctgggaattggcagagctgggaaggaagccatatctacctgaccctggagtggccactccactactgtgggttgcatggacaggtctggagagtgggcacagtgttcagttggtgccatgctgtctgctctccatctactccagtagcccacagtggcttgcaatgaarccagatgttctggagaaggaggaaacactcttttgcttctgtgcccatccttaccaccagaatccccacagaagatataacttcttaccctcttctttttcccaaattagatctggtaagtcagcatctgcataccgacctcaggatcatttagaagctcacagaatgttctgtctagaaattgcctccaggcaggatttacctatgacagccttggccagtggatggttctatatctttatgcccagttcaaactctggarcactgtcatccctgaatccctccccatctcccaggtccctccctctatggcaggaaaaagatccaacaggcctgacatggaacttgactgctagggtttatagtgatacaggaggcaggagagagaagtagaaaatgcatataaatacatctcatatacaatgtaacttatcttcagttactaaattagcactctttgctctccctaactatatgcacattgatatcactcctcttgcagctcaataggtatgtggtgaacctcttgccataaaattatgctcctgcaaagtgatgggcctgagcacagttgggatggggacagaggaaatctcacaggtccaaagctaagtccygctccttcagactctcaactgggttcccaagctggcatggatagaaagggcacagtttaccattggtaaaggctttactctttagaatttgccccccacttcaaactcactcttccatgcctgtaaatattcttccatggacttccacttgtcactaaaggaaagattcaactcttgagtcttggtgtacaaatgaggggacctattgcttctttaatgtaccagtctgtcctcaacatggagaccagtttcatctcctttgccttccatcagatgtggatgggagccctgtattctgctgagctaatagaatgcctgtgtccctactggaaggtgacagggaagtatgcatccagcaatctaygggaatatcaaggccacattcccttttttaaaatgaggatggcagtgtgttagaatagaaagagttgacatgaggaacagctgtgaggttatgaattctgatcttggtttggtcccagtcaattacgtggtcttagttcccatttaaatgctgaataagtcaatcctcaggggtaaattctttcaaaatgctcataaattgtgaaatcctrgtgttggtggggaccttggatattcctttagtgcaatgactgcaaaatatgactgtgcattggattgcccagggatgcttgctaatatgtcaatagccaggctctagcatagagtatttaggctccagcatgggtattttttttttaacagtcggtcctccttccagtgtttgggaacaatgatctggtttatctgccagctcccaggtagaggaaaatttgcaatgaaatcttcccagcatggctactcttagccagtccttactcccttcccctcattgacaactttcattctgtttctaaggagtagggctcttaccaaaatgtcaatgtgacccacctccagtccactcttttcttygcagagcgtaagaactagttctgtctggcactcctggaatagtcataggacagagaaaagagaggaaacttttgagttctgataaacacatctgcagcacacatcttgtgagttgctcagtgttctgtatcctcttgtcttttctggtgaggatttgatgatgaagttggagcatggtcttcaagggctgaaatccaagagtttctaagtagagtaacaacatcatgaagtctcttaacatcactatgagataacccgtgtaaagagagatttaataaccatcaaatacttgtggactctcccatgcttccaaggccccttgttgttgagtggattgtgcacagaaataatatatgtccctcctagtccragtcagtaaaatgcctctacctgcttctccatgctctcccttggcctttcatggtgattgcagaggccatgcattgagattgtagaccacaagatacaatcagcttgaatccctgagtcatctctttaaaggaagctgtgttggagagtcaccagacccaaagtgacttttcctgagtgagaagtaaatgtttaagtgttatgcctttggaattttaggttttagttgttactgcagcataaccttgtctatcctgattaatgcagttggtatcatcctgaagcgtactcccttgtggataaagcttctagttcttggcgtgtttgggttgcttttcctcctaaaaactgaatggaactagaactttctaggaaccctttcaagctgcagtaatgatttactgaagcagaaagaacatggttattttgagtctcagaagaaaaacacaaaacaaaacaaatctaggactgttgtctttccccaagaaaggaattaaaaatagactcatatggacaggggaaaaaaaaaccgacactgcctgatctggtgtggacatgttcttcgaaagtattaattgcacactcatgccatttaaaaatattaatttaaatgcacacagcttgtaaatctcttcttgttctgtctgctggatgacttgggacaaagcaagctgagaattaattgattaataacaagctgtgacckgtgtgtgtggttttactgacaatatcctcaggacttgggcttcttggagccatgcttctgtcagtgggaaaagtgctttcatctttagagaatgttaccactaagcagagttacctaatctgatgctttctcctctgggtatggcagaagtcgcttacttgagaatggatactgatatgttatttttggagctgtatttaggggatttatttggcacatgtggtatatattatagaatggcatgtagggtgaagccacggactccacaaagagccttctgtccattatgatctgttgcatactgaaaatttccactctgagtaatgcatatctttacactaaacatacatcattcccagaagttgtttgattaaatataaacatcttgcctagggaaggcaaaatattaagctgctagagtacatttggaattttcttagaaaggccctgaaagaataggatacaagtcagacatattttgatgggggatgtgaatgagggagatgaaccactgaggacagagtcttgaatgagcagaacattgtagtggaggagccgtcagctcaacagcacagattcctggaggtgsacaatgacgtaggttccagggataaaagatttggatttgttcaggacaggccgtgagtgcctgccttggtgtgttataaagatcctatgtggttggtttctttaacattcaacacaggattctcgaatattttagaaatgtgcttgggtttttttctgtaactcctaggctagagttacatcatatcatatttagttcaatgtgtctgctgttctcaagtgtggtggtgctggcaggtaacaacgaggaagaagtgaggcagggctcaaattggggaatacatayctgtgtgcatcctggcccagggagtgggctgaaaggagggcaggagtggactggcctgctcaggctcccacacctgtgtggcaagaagggtttgacccagagaagcagagcaccgagagccacagaagctccctcttccttctttgagtgtgcctagggtctcagcctcagctttggcacccagagccacattccaattaggttcttaggggagtagccccttccttccttgcagagaaacctgcatgaaagtttgggggacttcactttcttcttgaagacatcttatgtccaaattaatgctactatttyctgtgtctccactgttttgacacttacctttttcatgcacttcccagagcatatttcttttgtgccagacactctttccccagaattctttccccagaattcttctccaccattttgtttagaaaaaatatgttgatgagtctcatggagtaaggggtaagacctcaaggaaaatgctccaccatcaaaagatgccataactttccatccacagagtgtagattgtgttacctggagaatcttttgtttggtgagtgcccaccttggtttagtgtgaaagtctgactgtaggtcagagcaaagcagaawtgttctgcttcgaagagggcagtatcagtcaagtgaggccatgctctgctacagtaacagacagcccccacagtggcataacacaagaaaggtttatttcttgctcaatacagtatatatcagtcatgaaggtaggaggccagtaggagggtggaggctgttcatcagagtcactcagcaaaccagattgatggaaacttcctcttggtctttgcttccagcaccgtcttggcaggaggcagtggtgaactgctctggctaagagcttccatccagaagtgtcacgcatcatgtggctcatgttacattggctagagcaaaccacycagcactcagccacacttaactttaggaaactagaaagtgcaatcctacaattgcccagaaagaggacgtaataggagtatttgtgaatatccttaatgacatctacaaggggtgaagactgctctagtgaaaaggtgaggcttttggagggcgagtgaaggacttgggcttcttggagccacctttctacctcaaggaactctgtgggaaaaggtcagggaaggaaatccttggttgtgctttggcctggaaggaactaaggcaaactcaaaatctgttagagcatttgccatgagatatgtgatttaaattccttttctgccttacctgtgaaatcttcaacagtctgtgttgttcctttttgcttgtatctggagcaatggcatggggtggtgatggggtgggatgagggacaagagggagaagctcaaaaaagtgtaaccttcaggatgaaagttattcagggcaaaacaagatgctgtatacatgggcctaggcactggagaagccagagacagctgacacctgagttaatgtacctgttatttttcctcctagcttataaattcctcaaggtcaaggatggtttcttatttatatgtatgttctccgcagagcccaaaactactctggcctcagtaggtgctcaattgcttgaggcatgtttgtgggtgaatgaataaacaaatgcacttctgcctccttctcttgtgtgccaaggcttgcagcgggccagcagccaggggaggatgtggggtgggccagcactctctttgctcagaaaagcaacttgcctagttctgcatccaatcttgacttctaagccaaggaacgaagtctccaactgctctcagagtaggatacaaaaaccttcctcaactcttctcacctgtgcttagggacatttggcccttggtgaataggtccaccaagataccaagaggtggacagcagcataggagactaatttcaactgtcctttcacaaatcttctaggacgtgagtagggactgaccatcaattcatttatttatcaaacattgaaagggtgcctaccaggtgcttggttctatgtcaagagctggggctgcacccttctgtaagcttgcctatgagtgcaagctgctttcatactagaaggtaggatgataggtgaaccgccttctacaagtggagacccatggggccctctggttgtgcctccacagtagagtccatggtggtgtgagccgtaacaagcacagtccatggcggcatgagcttcagaatccaacacacatggattccatcactggctatgcatcttgagtctgatcttgagcctcacgtttaacctctctaagcctctattttcaactctgtaaattggcgatcacagtgcttaattgatarcttgttgtgcaaatgaaaagtgaaaatgcaggtaaaatcctaagctcagtcacatagaaagcacttagtgtcagtcaatattgcaatatgatgatgccaatattgttaatgataacctttctaagttggagtgacctcacctaaaaatagtacctccatcactgagcctatggtaattacaygagatagtatgagacacttagcactttctgggtacaaaacaatagtgagtaacatttacccaagactttattttgtaaatgcctctcttccatcactactgcctcacttggggcacctgggagtatccaggttraagatgcgggctcaacccaggagtcaagcaaacaatttctagtttttgggatgccttaaacaaaaccrtgaatctctaagctcctcaggctggaaatggctcactgctggtggaatcattaagagtgccagccagatctgattgctgcattcagaggtttattaatatcacctcgaatttatcttcccygatgaggaaattttgccagcatctgacaaaaatgaaatgtacagcggccttgtgccaacaagcatcctctccctgccatcggctgttagcagaaagccagtgcagtgggctgctatggggctaataaaaatataagatgaaaatgggcttcgcatcttcaattaggaatttgggcttccaaccctcctcctgaggctcccttccccacaaccaggctatgataataaatttcagaacytcatctccctctgcragtgtggattctctccccaackaatcctccaatactcatctgagcataacactcccgatgaaaccacacttgtcccttctaaacacttcaatgaattcccttatcttccagtctggaatgtaaccacaaaagaatatcaatgagaggcatgagtggagctggctacaaatgaaacrtgaacaaaatcttggtggagtgcaatagggtttcagcaagaargatcccaggttgcacttcccaggtggaagtgggttccttagactacattcggtgagtcaggtggtcacctgtggccaagtggaaagacccttcaaggccaaggaaccagacaatgtcttcaaggcagtcttgagttatcctgctggggcctggcagttggcagtctaagtggtagggggtgattgggaaggcactacaggtacgtgacgctgtgtgatagagtcaggagcaaggagctttggaagcttctagcgccaaggcaccttcagtccattatagaatgtccagtgtccccattttatgaatgagggcatgacccagaaagaagtcacttgtccagggtcacacagcaagtcagggtcgcagggctagagctagaatgcatatctggcttctctgaccagcagtctttcccccagaccatatccctactttcctttatgtggktaactttaattaagctctttctacctaccaagcacacccctaagcagtgggtgtcctcctttgaccttcataacaatctcgtgagaaagatcctcttggtgctttggtttgacacttgcatcttggggatgggaaagtttaaatgacttgcctaaaattattggctgaggtggtgggttcagggttccagcatagatagccagctctagagccttgcttgtaataagcaggctaaaccaatgcttctcaaagtggggtgcctggaggagcagcgttacctggatcttagaggtgcagattcctgaatcagaaactctgagggtgaagccaaccctctgtgcttgaacaatccctccaggagagtcccgtgcaggctcaagctcaagtttgagttggtctaaactacttaagctggtaaatcttctgtattttacaacgagtcttccttttcatgctttgtaaaccaaattgctgacttyccaaacctgaggacatttccaaggtcatcgttacctctcagcagcccattttcaggtggcctcttttaactgtgggattctttaggaagactgagattggcacaggttccctgctgcccagcagggctcctgagcttgaagacagcaaaattggtgttgttgaaccttctgttggccagaggggattttgagagtcctgtctgctatcacgtggacttggaaaatttggtccagtcaagtggaaaattaataaaccagaaaggaaagggacacagtattcaagacactaaatgctcattgcaaccagggagcctccaggtttctaagcattgctcttctgaatcccacactggagatattttcctcttaattcaatagatgtttatcttgcgcccaccaatgctgagtactttgcttagcactgggaatataaagatgaagggatgtggtccctgcccacagagaacccacagtctagaatgattatgtggtgatgggatcctccactggggaaaatgcagtggcttttacttgatgcagtttatgatgtttggytaatagaatgtcacataaaaacaaatcccctgattatcccactgccaatgggtggyactgcattctaataaaggcagcacttctttggtggtgtgggggaaaagaattgcagcccagtgcaggagagcctgatgaagactttattatttaatgaaccatgtcatatgaacagctgtggtgtaaaccagccaggacaattatgcaagttggattatgtctccagtaaattgatgctactttatttgattaggttggttctccaaagacaaattcttccaagttgggttgggggaaaaaaatcaccattctaactttgcttctgactttcaatcttcagattgcttttgctttctaatcctaagaggaaacaaacacaagatggcagctatgttgttatcatcaacagaaccgagaataatcacgtatctgtaatagttatcagcatgctctgtacgagactcacactgtcttttctcaatgagcttgcctggggggcaataagagacaggcaggaaactgtgaccattcctttgtgagtccccaaaacagcctggctgcagctcactaagccattrtcttcctttacacacaaccaaacgtaggcacatggctaaataaacataatgaaaagaaatgggcttggtgtgaaattcttcccagatgcccttccctgccttttcagattattaggtactatctagttcagtgtcactgtgggtcatggtccatcagtagcttgtgaaatctatttaatgggtcatcaccaacatcataagaaatgaagcagaatagaataaaacatcatagtacatcccattatatatagtaaaggtaaacattgcttcgtgtgtgtgtgtgtgtgtgtgtgtgtgtgtgtgtgtgtgtgtgttgggggtgtggtggtgtcttctgaaccatgttgtaaagtacatttcttcctgagggttgtggtcaaaaacatttgaaaaatactattagttcaagctgtttattcacagacgagagggcagggatgatgaaattaccctgctaggtggatgcaggcttttgaacagataatgtgagagcttttaggaagagagttggtgagcaccaggagctaacatgggttcacctcagccatcacccagacaagcttcagaccagactcaaatgtgatggtcttcatgccacacaccaggggtcatgaatgggctggaacttacataaacacaatcaagatggataacgagcaggtacaaagcaacatcttaggagcaattgttaggataactagaactattcctgctcttctccaagccattcagcaggggcgcaattgacattctaaaatctttgaatgtttgtcatgtggaaaatggaatcgatctcatctctatggccccagcacttagatgggtgttttgatctaggaaacattttctttttctttctataacatctctgatttgccctaattcctgcagccagacagtctgtaagtgaaacaggctgcttctggatgaaattcatttcctgtaacaagaggggatcaaaaaggaaaattatttgtccctgatgtggcctctgagggcagtgaaaatcactggatgaatggttagattcatcagtggcttttggccttaagacacygtacacccaatagacacacactcatgccctgcaagtacaagcctaattttcctgtactcacctttactacatgtgatgtactttgatagtttctattctggaatattctattatttcctgctagttccatctcattccatcccactccactccacttcatttcattccattctcatttcatttataaaatgacggtcaggactcatgaaactgatctcatggtccactaataggttgcaacctgtgattttaaaaataccagattgggttatattcaaattccctttaacccccaaatcctgtgagtccaatgtaaattgctactmcagtattagggtacaaaattctgtgcacagcaggctcacagataaagtttttgacaaactgaaaaccatgtgttattaattcacttactcattgattcacttcctcatccatcccgttcattacttaccatgtgccaggtactgtgctaggccacattgatataaggtaaataagacacagcccctgttctcaaagagctcttggttacagggacactgattaggtttcctggggttgccaggatcctagcatctgctttccstgagtttccttggaaggaaggtcccatgcatgacacatcctgttcgctgttcttgggtgacgtatgtagccctaaagtcttggcccagtagcagagaatttcacatccttcagtaaataaaaaccaaagtcaaaatgaacatatgctagaaaacagagactggcagtgctgtgaaggccctgtcccctcatggactctgtcgtgagtggcttaaggggaagagaagtgctcctcttaccggcatcaggagccctaattactgttgtatattgattcctttcttccgcagaccgctaatcctgcagagcaacttgcagggcataataattgggattgcccaatgctgggagctaatcagatttcttatgtgtagaccagctttatgctagcgtttaaggaagctcctgattcaagcacagaaatgaactgtttaaccatttccgagccagagatgagccatcacagaccaacgcggagtctgataggttaggggtgaattgcgctggagaggctgaacgtttcttaaagtccactggcaacaggaagtcctcagaagtccaatttgttgttgttcctccctgaacttctggatttctgaggatggttgtgagagtggccgtgtgtcaatttttaaatcatgtggtaatttgtccatgattgtttattttgtcccccagcaagattgtatactccagaaaaggggtagctgacctactaggtgaaatcatgctgtagttctgagttgctgcttcttcatgcatacaatggaaacaagtacacccccaccaggctcatgtggagggctcagtgactaacctggccctcagctrtcccctgctactcccataaaagctagcactgggcatgtggcttgtacttccaacaatgagtactccsttttctcccctaaatccagccctggaagcattgccgtgtttttatgcctcttggcattctttattttttgagacagaatctcgctctgttgcccaractggagtgcagtgtcacgatttcagctcactacaatctccgtctcccaagttcaagcagtcctcctctctcagcctcccaagtagctgggattacaaatgtgcatcaccattcccagttattttttgtatctttagtagagatggggtttcaccatgttggccaggctggtctcgaactcctgacctcaggtgatccgcctgccttggcctcccaaagtgctgggattacgggcatgagccacygcggccggccatctcctggaattctttgtccacttttctgtccttcctctcttcccttctctcatgctacactcctctttccacttttggtcaatcagccaaaattacaagtacttttccaaaccttggggtattggagtccatggctcctggctgctgtgcatggtttccccttttcctgggaagcttctgtcccactccctgcccctcacctcaccctagcactcttcataccaaacaaaatgacctttctgggtgttctccctggagttccttcgcttgcgcagtcatagcaggctagcgcctagtgggctgtgtgcatctgaattgcaggttgaatccaacaacatcagtgaggtgggaggcaagtggctgggtgcggtgccatgacattctggctcacctgtcatgttggatggcttgtgtgagccccaggaaacccgtgcacccttaggaaagcatgggatagatctcctgagatgatttcagagaaatgacagcagaccattgtgagggaggcagcatgactgggggaatggataaggcttaggtccctgagaggcagatccactccagccttgcggaatgtcatgctcctgcagagggctgcaagaagaggtgaacccattcccaatcactggccaggttagacaaatcaytggattctgggacatcagagctgaaatagctttattggatcatctctggcccagctcgcttgctctctctctcaatctcttgatcttttttattyatttatttttttaaatgataaaaacaaagttcagagctggggcataacttgtccaaggtcactgagagctgtaaccatcaacatgtggggcagcagctgcctgggtttcaaagaaaggggacttgctgccattcctcctccccctagttgccactgtcttctcatgggtttccttgtccttccctggtgccgagaagcagggaggagggagcatctgttgccatggaaacaagcctatagtatgagttcgctctccccaactggctgtggtttctctgacaggggctgctactggtcctgctgttgggccctaatggggactcagggaccaccactgtatttgccaggggagaaagctggaggagcagcagacatcccctarcatgagttgtgcaggcttggtaatgtggagtgggcatgcattgtggtgattcttcttgcttttttaaaccaatktctcctctgctggagactcttcacagaatttaagagtctttctcagaaggtgatcagccttggacagactttggtcttcagaccccagagccaaacttttgaactgacagcagctgtggcsraaaatggtgtttgtcagacctgcaggaagaaaatctgcaatgaagagttggagtggtaggaaaagaggaaaaagagggaacttgttttgccttcagacatatttaagtctcctaagtacttcaggagttaaaatggggctttgaaaataaatagacttttctgttcatgtggggctgaagtgttccagggttggaaagggttttattaggtcatttcatctctccctctgtctctgggcctattctaacccctcttacttataaaaatcgcagaagagggtgatttcataagctgccacgacaacttgttccgctaacaattcatgatcttaaaacaatctccatagcagggagaaattcctcctatttcctccaaagctcgtctgtctgcgggccaaggctgctcagaggcagctggggttttaagaagtgagctctggacttggatttaatggtctttgttcaaatactgttattgcatccttgaacaagtcacataactgctccaagcctcagttccttaatctgaagaggttagtgtgaaggggagaaaaagtaacatatgttaatgtgcctaagatggtatctggcacacaggaatgcttgttagatgtgtggtgtggctttgggctgactaggatcaccatggtatgggcaccttttggatcgagatctcagaaattaaccctttggttgttggatcatggggttgggatgggggataggcactgcagcagcaggggcagctgagggggcactcctaagtcaaggccattggctgtttaccagccggtacaaaaggtttcaatatttgagagactggtttagttgtactagtgcacgctgtctaaattatcatccctagtggttccttcaaagacgctaagcacattcctgactccacttctttgtttatgccactcatgtccccccaygccttcaatgcctttacaaatcctcccaacccatgaaaatccaactcaaattctgcctcatacatgatgcaattcagcaccaaacccataaatctcatgccccacaagctttatccaggctggaagagagaagaggagaggttgtttctgtgtggctgattgagctgttggctgactcaagcaatcacagagcctcaggtatcattcaacctgcaaattatagatgaggaactgagaccagagaggctgtgggactcatcccaggccatcttagtcatcaacaacaggtctagagccttggtctcctgactctctgcctatacttcttgtccatgactgaggctgttccttgagcctggaatgagaacagagtcgtcccccaccctaccagcactcctcctacccagcacttgcttgctgagtcacacggagggaggtgggtagggggaaaatatatatttgcctggagaacacaccagtctggaaaagtgaagccagccaggttcagtgtgggtggagtctcccaccagggatcccaccctagcactaaccagggttgaggtgctggggaaaatgaaaagcattggtgtctttctgacccacctaggtgagtgaccaactttaagccatgtgtcacaacgtggcggttttactgtttattagaaccttgcttggcttagcttttgtagaacttggcttttaaatagaaattccttatactaacttgttctgctgtcagggagatgctggccagcctcgaagcacctggtatatagagacatctggagagcgtacttcaggctgggaggctttgaagtagatggttgtgggctcgtgtgtacatgtatgtctatgatcccctttgctggctgcaaattctrtcatcacatcatggaaaaattcttcttaaggaaagttgcaggtgcaaagatgctgatgttggatcaaccgaggaaatacagttttggtcacaaaagtggtatttatgcactctgccrgcacgtggttggcccagatggcgaaaatactgttgagatggccgggctcctttgggtaagggaaatacagggctttaagagcagtagggaacagtgaaggatagagaagcttgatgctttggagctcacaggatcagagttcaaatcctgacttggmggccattttagctgtgtggccttaagcaattctccagcaccttgagcatgctttatgggtaggggctcagtgttaatttgggattctttctcatgaggatctcaaagataactgtagctgggtatctcaggggaatatggcccacagttttgagtcctccagcctcagacatcagagtagactcagggcaggtaatgtatgtgtgatggtggacacacattatctgcatggcggtggagaaacctgcacatgagtgatccctcatgctgccattttggtcatgtctcagtgttaggaaacttacagctgctttgcttcatttcctgacaaggcggcagctggaattgtcgactttgctgttatctggaacagctgctgggatttaatagtgcacttagaggaattacctggaatcacagcaggcattatgaaatgggaatgcatttctgtaagcccatctaatgtttgagggcaagagagcaggggctttccctccatagtgagtgagacataaaagggactggtttgtctgggatgttgccctcaagatgagcaatcatttcatctgggctatgctcagcatggcactcagcttgggcagtgtgtgaacttcagtgacaaggtctgcttaggggacctattttcagatcaattgctcaagaaagccaccatctctgggcacctggggagtgacagccatcttggctaggactcaagggcaactctagatagttcagtgctgagcctgtcctcccactcactcctctctgttggtctggcatcaccagactggcattttcctctcttctgggcccagtcaattcacttctttctctgatatttagtaggtgctcatctacagcaccttgtcgctgggtatgctgtgcttatcttaaggtggcttaaagtctttttggaaaacaggttaatgaacatgcaattattagacaacaatggcagcctaagttgtgattccaaattgaatctaagcaaggtagaatgagatgcttctcaacgtacaatggtgttacatcctgatagcccatcataagttgaaaatatcataagttaaaaatgtgtttaggccgggtgcagtggctcatgcctgtaatcccagccctttgggaggccgaggagggtggatcacgaggtcaggagatcgagaccatcctggctaacacggtgaaaccccgtctctactaaaaaaatacaaaaaaattagctgggcgtggtggtgcgcgcctgtagtcccagctacttgggaggctgaggcaggagaatggcctgaacctgggaggtggagcttgcagtgagccaagatcgcgccactgcactccagcctgggtgacrgaacgagactccatctactgaacatcatggcttagcctagccttaaaccttaaatgtgctcagaacacttacattagctcatagttgggcaaaattatctaacccaacacctattttgtgataagcgttgaacattgcatgtaatttattgaatattgcacttaaagtaggaaacaaaatggtcgtatgggtacttgaagtacagcttcttctgaatacccattgcttttggagtattgtaaactcaaaaaatcataagttgagccattgtaagttggggactgtgyctgcatgtacagggatgatataaatgcccttggagcttggaagagggagaaatttctgaaggccagaagagactggctttggatgagctatgtaaaaccaaaacccttgtagccttgttgggattcagggagccatgccccttctgctgatcttgcaattgatgacctttgaactgaggcagtagtagagcttgggttaaattaaaggaaagggattctacctcatgtgttcttttgcaagttgagagtgtcaactggtctggggatgacttgagctgcrtgtgctrtgttgcactggtgaggtggtcacttgacctcgtaccaatactggcttctgagtggcttccaggtattgaccttggctaatgagattggattcaaagcatttgcaagtgccagtaggtcagtgatcaccattatctactgtgcacctcctaaatgccctgccctttttgcgtaagctgggtctgacagccctaatcggtcctacctcctagatagcactgtggcccatttattcttacctagttcaggccaccatcacttcttgtgtagacaactgcaatagtgtcctacaaatctgctgacattccctcctaaacaccccctctctgtcaaatccattcttctaactgcggctggtagaatctttctaagatggttttctgatcatgttaattcttttcttaaaactcttcatttatttctattgcacttggaagaaaacctaatcttattatatcctatatgtgttgtctgacccagaatttttgtcattctttatttgatactcatgtggctcaactgcaacagcagcaaacagctgggctctacccatgtggatccctctacttggaatgtctctcctcttctccctttccccaccttttgcttagcctccacttactcatccttcttgggcatcacccctaccagatcaggttagctgctcctgttccacagctcatagcttgctgtactttccctttgcattccctaatgaacccccatgtgttatccatgtagttttctgtttagtgtctgtctcctctttccctttcagggacccttgcaaggtccctgagggcagagaccacccccattttgttggctactgctcaagacctagcacagaagcctgcagctcagcaggctctcagggcatgtttgtagaggcagtggctgctttggggtttccagagcttccttgggaggtttcttctgtgtgtcccattgaccagagcaccactgggggtgaagtgagccccagacatctttaggtttccatctttaggtgagctttatgcccaggcacgtagcagaagaaactgtttctactcataaaccaagcaaatttatagtggaaatcagtgggagaaaataaatatgaatccccatgatgtcattttatgggctgctttatagattgtaatcacccatttagagtttgcaggctattaattttgtttgcgcagagcctcaggactcttggggacagaatttacagggctgtggtgtcagacacgtggttctaggtcttaaacccctgaaaggttttggaaagagaatgacaggtagcctatggagcagytggggcttagggctctttcctctagctttcctcctggacatagttttaaaatatttgttcactgttttatcatcttaattttaccctagtcttcaggcctgtcctttccgtaagctaggtgactatgtgggtyttgcattaaacctttggtagagagagctcccctctgagaacctgaagagatgtaaagaggaacagcacaaggtcagagagaactgggtagaatccagctctactccttggcttgtgatctagagccaattttcattgttgttgttacttttttcaaccttcgtttctttctctatargttgagacccatgccctcaacctcaaagggtgattataaagataaagaagaggaaataggaaaagcatttggtactcaaaatgagttatagttcataaaatgactatgacgattgctgttttaaggtaagctgrtagagtgggaacacagtggaaactaggagtcagggcacctggtcccaaccctgtcactgatgtgctgggtgattttggacatactagttagcctctctggtcccaaattcttcattggtgaaataaaatgtttggctcaaaagattttcagacatggtgcttctcagtgtggtccatcgaccaccatcccctggagacttgttagaaatgtagattctcaggttcagccccagctctcttggcccagcagtcaaaattttaacaagctctccaggtctctggtgggcatagtgaagtctgggaagcattaccttggttctagcactcatgtccgatattgacttcccaagcagcagtcacctctggagccttcctctttggggtcttggaccgcaatggcctttggcaaggagtctctgctggatctgtgctgcacacggggtgtgggaatctctgggcaaccagaagagcagtagtaacatctttaggtaactgaagtcaatcctgcccactgggcaaatattaattggttgctcagggctgcactgagttcaaatactgagccactcaggggcttcgaacgaccaagatcaggcagttttcaacctgtgatccacttttggtagatttaaggcaaaagcaaatattttttgccattttttcccaaattattttaccattatggcacgtgttgctcctgcctaggagatgcattccccagaaccaagcaaacaagaagaaggtcctccttcagtgggctgtcatcgatcattccccgttccatggccwcaggactgactgctgatgaaatctaaaagaccagcttgcagaaggcatggaaatcctggggttaggggcccctctgctatggaggtatgactcacagtgggtcagggaacctgartgggatcatccctggaactcagaatctctaagacacacttattggctctctataagcaataacagatggcaagataatattattcttctaatcttttgctaaaaacattcagtcatttctcaggggcctccctagtagaggaagacacctgcagggtatctcattctttcttgttctcattttcccttctaccattttccccttagtatatttctggccctatgtgcaggaaatcaggtagctgaggtgtggtttaagggacccattgtggttcttatggcccatcaacacaattccttcgtgttggcctgcagtatccatgtttgttacccttttgggtcaaggcatgaaaacatctgtccacaatgccagtcttacctctgatatcaaagatagtatctgagacgggtgataaacaaatttaatgtgaaaagctgatgatgttttgaagtcagtagaggacggagctgacaatgagcgtcttgcaatgagtctgttctcaatttcattgctgataaagagaaacagtgtagtgtggtggcgaagagcacagaccctgaagcaagaatccwtgggctcaaattctgagtctttaagtctgtggcccaagaattcacatttctaactgacttcctgggtatgctgatgctgctggtctgcaggtcacactcagggtggcaaggtcaggcaaggtcagagcacagcatgggagggactgtgctgcctgtagtacacagtggaaggtggaggaagcccaggggtgacatggcttacttatatcatctatgagttttttgtttcctttaggaaatttactgaaacattcttcattgcaaagtataaaaacaaatataaaatattcaatgggtattagaaaatcaggtatactctgtttacctatgggtttttctagaatggggttaagggtgggaaagtgatgggagacttaagtagtagaagtctatcagaggccccttcagattaggaaatgccctcaatgggcttcagtatcctttatgagataatgcataagtgagtggaccctgaggagaggagagaagaacaagaccttcccctaaggactatacaagacatgtacccatggaaagatggatgccatgatacagtgaccctgtgagacagtactggtggagtcaatatgaataatgggagaaggaacattcacttctgtccactcttctaaatgccatcgtaaatgagctcatttagtgttcagagcagagtaggtattattatttccacctcaaacatggagaaactgaggccagagaggttagtaattttcccaaggctacacagctggcaagtggtagaatggggatttgaactcagtgatacagcaggaggtagacaaatccctaggcaaacacaggtgagtccccagtgaaaccccccsctgcaaaccaaagccagtttaaagtctgaaagccaagctacaagtcttggataaatccacagactggattgagaacctctcttcccatttggcatgctttcctctgattaacccccacctcttcacctatacccacccttccccaattggtttttacactgttgcctttttttgcatactcacagaccaatcagtatccaycccctttctgagcccataaaaaccctggactcagccacactgggacacagagactacctgactttgggtggtagacaattctcacgtcccctctctgctgacagctgtttcatcagttaataaaacttttcaccttgctcacccactggctggcagcataacctcattctttttgaatgtgggacaagaaattgggaccctggagaatgtgggggctgaacaaacagtcatggtagctgtgagatctgcaccggagtagtcagggtgtctcctacagtgggcctggacccgagcaatgcttgtagggggaattggcagctgsaagtctgtggcccacagagtgaccaagaaaaactgcatcatcaggactggccacaggacaccattaattaagtgcttaaggagcagtatgggggtgggcagcaacccagggatgcaaaaaagagaggattctcaaccaatagctcctggagctcagagaagcagcccctttcccaggtctggatccatrgattgggagcaagttactccaccatttggtggaaggaagcttggaaatcagagggaccagggctaagtcctaggtctgctgtttactatctttgtgaccttatgcgagcctgattctaatctctgtctccccacttactgtgagaaggaagttaaaggagatggcatgtgtaaagggcccatccaacatgtaggacatggcgcacccctaatatttggcagcttgtctccactttgcccattcctactcccaagccttggagtctgagatgagaggtcactccacctggctttagttgggtttgttttgagtccccataggctctctgggactctgctttctgatgggttgaaaacattaggctgttgtgagatgcttccattactgtgatctaaaagcatctaggatgcctagcgtagctttctcactggattgccaatttctcagagaattaaacatttagtgcccaatcagatatttttctatctgcatacatgtggaaatgtatgcttacccacctccggggmgtcaattgaagtgcagttgaagccaactcactaattctccagtgcatggtagaatcttcgtggttggtgaaatgagtcatgtgtatgatttgatggactgtatctatgaaagtagaagatggagaggaaacaaggtctgccataaagaaaagagcttggtatggatgcaagaggaaaaagaagggggaaatataatccttcaaaagtccatcaagtttacctagaaacagatttacttaaaagttttgagaaatttatttctgatgatgatccttatgagtcactatttcttatggaatcaagccagcataaaagttatcttgcattctcagcatagctagtttagagaattaggtcatttgtaagtcaaaagatttctacaaagttcaaaataaataaattccaggtatctgagcttaagatggctgggaagaaggactccatttgaggcaggttttctcatttcccagcttaraattgccttcaaggtctttttctttatctcagaacaacaaagacactgcctgaggaagaacctctgctttattatggtgttctgcaacctaagtcagtgaagttttgattctcctggaagaggctggccagctactcattagctgcagggattgaggggatttcaggcatcagatggaggtggggacagactggagccagagttcttgattccactgcatgttacaaccatctggggagcttttaaaaatgctgatgcccgggcctcacttccattaatggaatcagaacctgtggggccagcgagtgccctaggatttctgtgagcagctcgggctcagaaccacttgttggatgctccctaaggatctggcaaggattttatgagtttaggtttgagagcacctgaaggagtccagaggggctggagaagaaaggagatggtggcttggtaggcacctacatccccaggggtgctggtagagactatgctgcaaaattacccaggaagaagtgagtctttaacattgcagccattactatgcatgaaatggtaattaaaagacyatattttcttaactcaaatacgttgatgagaaagatgcaccattgatttaatacctgctgttttggaggatgyggtgggagaaaactctattaagtatgtattaacatatggactgattataagatctcagtttcacaaatcattttatgttggaaaatgtgcttcttgaaactgatctaacaacataatgatagagtgccttatatggattactctgcctagtcctcacaacaactctacctgtgagatagatgctaacatcctccccattgtatgggggagggagttgaggcacagattgaatagcttattcaaagtcacaggtagtccagagctggtcagtgatgggactggaattcaaagtgtggttttcagaagtagcccacaaaatgtagtgagatccaaggctgttgctttctcaggtctcttaccttccccagagccagggaggtggctttcccttaatcagggtaccgaatctcccaagtgcaggggcgtcctgtccactggctctcatgccctgcacagggtacctggcttaggaagtgaatgggaatgaaatctggcttgaagtcccttagcaggccctgaggccaagggattattttttctaatgccacagaggctcagcatgagctgatggagcccagcccagggagagaagccacactgactgggctgaacagtggacacagcctccctaccacgcctggtggttctttcacctttctgagcacagcatgttagagaatcactctattgggtttgtctgatgatacgggaccagggagaaggaattggagagccttgtagctctggggaccttgatgctatgcctttaggacaaaagcccctacttcccatgccagtttgccccaacagcatggcagaaatggaaaaggggagtgtaggctgaacaggacctttggaaarcaccaggttctgatttccagaccctcggtcttcttgtgcaggctttccccctctttgtttttcccttttctcaaattccttgacgtggtggcaagctgaacctcttagagctgcgttccagaacaacctgggtaatggaaagtacaaaaacaacttaaacttgtttccaaagcttgataggttacaccgacttctcagaaagtgtccatttggacccaaaatgtgaaataacattttgaggcacgttggaggggggccagagggttacgcagctgcaggcgtgggccagatgggaaatccagatgctggcctagggagcaaggtcccttctgctgctcatgcaggctgtcaaagcagcagcctccttaggaccctcactgcaagctttaaaatgttactccttagggagaatttcagatgggagggaaggcttaatcaatacatgcaacgtttaactggcattagaatgatgttttgttttgtttcttttaatgggagatgatgggtggtagtagtaagtcagggagggcgttgcagggtgtggtcttcaactttccccatctttatcacatgccaaaagttgctccatttcagcatgcaaatctaaatttaaatagtcttctggcttttaagaaagccccctagctcacctgtgcagtacgactgaactactatgaaaccagcactggtgaacatatatgtgtggaaacacaacaacaacaaaatcagttgttcaaaagacatatttattattccttcagcagagaggcccatctgatgctctggggcgcaggtcccatgaatgttcagggcagtctctgcccaggccagctccttccccgattgtccacagtgatgatctcttacagactgtcctgcctgccctgcacacaatgggagccagtctggaggaaggtttggtggccatcactctggygggcactggaaagaactctgctggatgccgagggccatttctctctggacttgctggtgttcagtgtggaagtgggagggaaatcaaatgaggggacctttgggaggtcacctaatgtggtaggacctaaactcagctgggtattggaatcatctggagatttttttttcagttagggtgccccctcctgccttatcaccatagatctgcagtgcagcccagacatccatttaaaataagctgcaagtttgggcacggtggctcacacctgtaatcccagcactttgggaggccaagttgggtggatcacctgaggtcaggagttcgagacgagcctggccaacatgacgaaaccctgtctctgctaaaagtacaaagattagctgagcgtggtggtgaatgcctgtagcccagctactcgggacgctgaggcaggagaatcgcttgagcccaggaggtggaggttgcagtgagccragatcacaccactgcactccagcctgggcgttgagagtgaacctctgtctcaaaataaataaataaataaaataagctccccaggtatttctgaaggttcaggtagcctttctcattagcccgttccccaggattcttctctcagtcctttttgttgacaagctctctctggtttagcaggggacacaaggttcaattattgttccattcttacgatacaattcttggatctggtttggatataaatgtctaggttgccagtttcttgacaacttcaagggccttgaagttgactggtgaggaaaaggcaaagtaaatgcctgagggatggataccaattgctgtccccaggtttagtcagcaacttttgctgttgctcctgggtctactgtgtgcactcctttgagggccagttatcacacaggtctccctttgggtytccatcttggaatccaggcaggagaaattaaccaggaaattaaagacatcttcccttctccactcctgtcatgtttagatcttgggagtaaggagaggaatgggagagcaaacatagcttggctggagaaggaggtggttttgatcttttcttctccccttcctttcataggtagaggtcgtctcctttataccakctgtcttggggagtagtcacattaattatgcrtgtatttagagctttacaagccttgccaccagacgtgtgtagtgccttacagtttaccaaataggttcacatactaatctcttttgacttagtgagatgatgactcagctggttataaatcatcaaagcagcaccatggaccatgcatgacaaccatggagctagggcaaagctgttacttgaatgaaggaaaatgataaaagcttatgttccctgagccgcaaaagaaaatagccgtaaaatttccattgaggctttttctgttatatctttagctctttaaaaatctcatattgaagatacctaagaagtttggcaacaatgtcctgtagatgaaatgtgggtggagccaattgattgggcttcaagttgcataatgttgggtatggtgaggctatttggtttggctctactcttgggacaagagacagtgggaatgtgtccttgttttgtagttctctggaagccagaggaaggttatgattataaatttaatctctcagttttctctgtgtctcagccttcttcacagggggtaggacctccgtcctcacaagttacgggggtggtctcagcttctggagcaatgaggcaagtctgcaccctgttggatgtcttgggtacaaccagattaatgattcaaaggctgggggaagtccaggctcacaaacggctttcccaaagctccagaaggaactttgttcttctctacattcccccaccgcccccccscccacacacccaggcattcctcttagattttataatctctttggagcagatcggcaggtaggacctctcatctgtttttttcataccgccatgtcatcagcttgataaatgagacagacacatgctagagtggagatagcattctgtgaagagcatagtgatgaggccagatggctgccaagctcaccccagtgtgggtctgggatggcagttctatccaggagactgctaccatcagaccaactaagggagatgtttttcatacatcagctttcattggaactgatagtgttatggaaaatctgtcctgtccccagcagaatgatcaatcaagggtgatgagcctccacttgggtaagcatggctgatggtcccccttctgacacatgaattagttggttttaaaaggtttacctccatattagttccctgttgctgctgtaacaaattaccacaaacttagtggctgcaacaatataaatttattgtcttacagatttggggggtcagaatcccaaatcatctcactgggctaaagtcaaagtgtcagcaggactggaggctggctctgggaagactctgcttcctttccttttctagcctctagagactgcctacactttttggtccatggccccttcctcacatcacttcttacttttgcttctgttggcacatcttcttctctgattctgaccctctacctcccttttataaagacctagtgattacagtgggcccacctggataatcaaggacaatctccccatttcaagatccttaacttaatcacaccagcaaaccccttttgccatgtaaggtcacatattcatgggttcttgggattaagatactggcatctttgagggtcattattttatctaccacaacttccagtcagtgatttctcggtttwtttaccagagcctcagggagcactgcattttgcccttttacaaaattacttttaaagagattatgtacttgtaaaaataaaaaaaagttaatttgtttgaaatcatatactttaaaatatctcttcatccccagtttctaatgccccatttttccttcccagagctgaaaactgttttttttttttttttttttttttttttttgagacggagtctcgctctgtcgcccaggccggactgtggactgcagtggcgcaatctcggctcactgcaagctccgcctcccgggttcacgccattctcctgcctcagcctcccgagtagctgggactacaggcgcccgccaccgcgcccggctaattttttgtatttttagtagagacggggtttcaccttgttagccagaatggtctcgatctcctgacctcatgatccacccgcctcggcctcccaaagtgctgggattacaggcgtgagccaccgcgcccggcctgaaaactgtttattaacaatctctagtgtacactttcagtgagaatctatgcacatacaagcgtatgtgcacacatatatgcgtgtctatgtataattttcccatttaaaaaatgatggtgcactttcacactactctcttttttttttttgagaccgagtttcactcttgttgtccaggctagagtgcagtggcatgatctcggctcactgcaacctctgcctccgggattcaagtgattctcctgcttcagcctctggagtagctgggattataggcatgcaccaccttgctggctaatttttgtatttttagtagagacagggtttcaccatgttggccaggctggtcttgaactcctgtcctcaggtgatctgcccaccttggcttcccaaagtgctgggattacagtcctgagccaccacacccggcctcacactatttcttaatgatctattcacatcagacctatatacctgcctttaaaaacagctacaacatatttttactttgcattggtgtatccaaatatatgtaattgggagccccttatcaatagattgtttcttttcttttttttgagacagagtcttgctctgttgtccaggctggagtgcagtggcacaatctcggctgactgcaacctccacctcctgggttcaagagattctcctgcttcagcctcccaagtagaggrgattacaggcgtgtggcaccaggcctggctagtttttgtatttttagtagagacaaggtttcaccatgttggcaagcctggcctcgaactcctgacctcagatgacccgcccacctcagccttccaaagtgctgggattacaggcgtgagtcactgtgcctggccctgattgtaacattgtttctaatcttgtgctgtaataaacaatgtaacagcaaatgcattcttacattggtctttgcacacatgtgccagtgtatctatggggtaaactcctatgaatggcatttttgggtcccaggttatgtgcaccttaaataatgatagttgttgctgcattgccttccaagatgtatatatgaacatatgcttagagaccatggcacctgggcctggtcaaacaccatgctcagcagggctctgccatgttattcactaatagctctggggacatctcattatagttctgcctctgacaaggtccaccctccaggaaatagctcactagttgggggttaagtcaaggatgataagtacacccattgggtgagccactgcaaacctgggcccagagttgaagccaggacaaacatgttcactagwaaggctattcattaaacatcatattccaagctattctgtcaaattctagggacacagcactatgtcttcttgaaaacctctgatttcttttgtctgtccacgttgctggagctagacagtgtcgagactttgatttgagtaccgcagtggcgggctattctgggaggaacagacctgaaagaggcagcacatttagcagagactgcagccacaccggctggggccagggtgcttggatgtgacacagctattgtttgtgaaagagatttgatgcttcattagagaaaaactgtgtacagaaacccggcagagatttcttaatggcattctgattaaaggagcaaacaacctaaatgccagattagtcgcattttgggaaagaatgcatgatggggactgcatttctatttccttctttccctcagccttgcttggcagcatacatttgtcactttgaggacatgagaaaggggctctctgatgtagcagagaaagagctggaaagcagaggcatggaaactttcagctttctggcaggccaaggggmaggttggaggttctgatacagtgtctgcaactcccagggtccagagataaaagtctagacggtccagtggatcaccttggaatgcaaggctatgtggatgtgcatcagtcctttcaccaggaaccttccagaatggttaagaaaggaacccacaatkcccctkagagtcagggctgtcatgcacatgaatggttacctcttctgtaccatggcctcagaacatggtagagctgatatcaagggaaccaccgtttctccctcagaaccatgctttaggagctatggttgtcccccccattcttgttgtgcaaactcattaggaggggtagctctctcttagaccttcaagatggggatatgcctggacagggtgaggcattaagggtctctctttataaacaatgaggaaaattccctatacattggccaaagtgatctttttaaatgtaaatgaaatcaattgtaagttccaaactccttcccatggcattggcccctgacacatcccccattgctcagatgcattggccacattggcttctggaggctcttgaagcacaccaagctagttcttcctgggagacctttgacctactgttccctctgcctgccatgctcttctcctggcctttcaaaggtagatccattgcgttcttcagatctcagcagagatatccccttaccagctgatatagctctccayccccaaatcctgccacctcgatgctaatttccttcataatcctaacatgatcaggaactgttcttattcatgtatttgaatgcttacttgcttattgtattcctgcccactggaatgtaagttctaagagggcagggatctggytagtcagattcaatgcttgtagaggtcagaacccagccaggaaaacaaagtggctcaagagagtatatttaatgtagggaactattaccctagcatcagaagagtggaatggctaagtaggtcactgtagggcaacccggaggttgacaagagaaaggagctggggcctggaaggacaaaaagaggaggtggtatcatggaggagacctaatcatggctgaagaacagacaggagagggacaggttccaacttctcccttccttccgccctctgggctttgcccagtgcttccactggccaaatccagtatgatccagttggcaacagtgccagaaaacatagtgggggccgcccctgtgattaagaatagagcaggcaataggtggggaattcatctgaaaacactgaaatgactggtgccttgctctatctccagctgtcttgacacatactaggtcctcagcaagcaattgttggatggatgaattaatggaaygcaccactccaaaggagtcagctttcaggtcaactctaatggagtggatccctaagagggaagggctttgcaggctgggtttaacagtggagacttcctgaggcccggcggggtctcagccggctgtgccttctatctctgctgccctgcccagaggaggatgaaggattcttatctctggaaataaccctctttcatgagccctttaatctgagcctgctgacacttttatatgtgcagggttatgttacttgaggaattcctttgaagacaattttaaactttcatcscttagttcaattttaaagtttgtaacatttgggacccttctcagagccctgratttactcctggcatcaagatgttcagggcagrgctgagctggaggggaattccgcattcctagtgatccttaactggtgcccctggggaatttatctaacatactggagcctccactggtctgtaaggcagaattaagaacaccttgaaagaacatgaaaaaatgaaataaacagcccaagtaaagcamcagcacatatgaggcacttgaaaatgttcactccttttcccccagacgctgggaaatagttcagatgccccctrtcccaggacccatgaagcagctcaccgcagcctctctatgttgatttttagatttccttctgttgattattctccacggaaggcgactggagcaaaagaggtggttggccacccattaatacatctccttcttattgggacatttcgccctgctaaaggagtaatcatggattttctgtgaattttcctttaagcgttttctgtgttaaaaaaaattgtagtctgcctaaactgatttatgtgggtaatttatggagtacctgtttttcttttttctctcttcctttttcttcttgctgaggtggtacctttgctgcctcatccctggagttttgcatgagagttgaattttgagctgcaacagtttttcccatttaagtgttagagttgactggtactttatcaaagttccgtaagtacatttcatacaagaaatctcagcaggttagaatccggggactttttatttaaacctctaatgacagtgatactggcctgtaattaaggcatttctggaagttacttcaattgacttgcagaaaggaaggcagaaacccttggaggctggtactaaattcatggggaagagaggcacgggaagctgtggtttgggaggagggctcatgtgtagcgtggggcatatgtgtgtgctaactttcctgggtttctgtctgaattgctaatatgacattaggtgaaaggcatcttgtcaagaatgctgcatgtctggtggacttcctgaatatcaaatctscgagccttctttccaactgcccctcctggccagcctcatgagacactgatgagaaaaatgccacagctttcaaaacagttaacctctcctttggcaattcacagcactgggtttattcaagcttacgatgacacagaattttcctccctttgaaaagtactggttaagtctttctgtctcctgcccttcaaaagcagtcattgtgtttgtttttttcagaggtaccatcagggttgtcagaaagtggaatttcccgcsagatcagaatttcttcagccttcattcatgacctgagtacttttggttttgagggacaaacttgctctattttgagcactgaaggaaaacatctaactcccaattatgggtctgtgcacgtgaataattgggtaatgggattaaagtgcttgaagayacaacccttcctcaggtgccccttttcacacataaggaaagtggagtrcgaagggcactggctcacgggaaggartggtggggaccccaggccttcagtccctcatttaacaaggttgtaaagtctgatytgacttcttactgcaagcaccgctacttctatgacatcctccatgccctttttatttcaaaagcagtttaatatgttatttcatttaatctccactgcaactatttccatttaaaattttgttagataatcaatagtgctctaaatatgaaccaatttggaagaaatatgaagaaaagtcatcttttagagacaacccaattcatgggccttgtaaacatttttattttttaggtaatcataaaataaaattgactttttaaaaaaatttggtgtgtaggtctatgaattttcacaaatgtatggaggcgtgtaaccaccactataatcagtggaactgtgcctttaccgcatcgaaccrcctccttccatctctaacccctggcagccagggatctgtttttcatcaccatagctttatcttttcaagaatgtcaaataaggagaatccacaggatgtggccttttgaaactggtttctcttatgggcttactttttttttctcagttagaacttttatttaaaatcaacaatcmattgaacttgcctatttgccgaacaatatctacaggtagaaatttgcaagrataactctggataagcatagtaggccatctatttcatcatgaaggaaatttttgatgtactattttgaagactctatttacagtcccttatatttaaactatatctattaaattagtgttatattgaaatagccattaaaacaaaacaaaacaaaagtcttacatggaccaggcacttgtgaagtactctattatttcatttaagcaaatatacatcctttatgggtcatctgtgtcattttgttatttactcctcttgtacaagcttggcagggtttgagtggttctttaaaagagaagttggtgatagggagggaacttcatttctgtcccagatgctgacaccttgtgggyccttggtaacttccgctgctgtccatttccctcatgtaagggcagatggcatttgcatacctggagggacgccggctggagttacagatgcctgctgatgattggaatgttagggacttagtgacatgtgctgtagtcatggggtcctctcagacacttagggcatgcaggccttaggggagccctgtgcctttggggctggctgatgctggggagtgggactgtctgctgggttcaaggtggaaagggaactgctcctgtgtggtttgcctgccaaggagctaattaggagaatgggtttggtgatcttgatctgacagccaatgggagacttcctggggagctggaggagataagcctgtcaagaggctcccagctgtgttagggccaggattgtcattgctgctaggcagggctttggtcctcccaaaatgagagtgagcagattgcagcattctttctcatagcaccaaggaatcatagactccatggctaagtgaggtggaaccaaccacattgtgtggtcagccagtgccaacctttcttcttgcctggccttgtggatggtgttcacttttgagatgcaaactccaggttatgttatgaaactccacttctttgtctctcaaaaaaagcttgttaaaatgcgagtatcagtagccttttatttcaagcctcagatctcctctaatcaggccatcaattggccatactgatagctattattaaccattattgagaggcactagattatgaagagttgagtagttaaaagcagcatttctggagacagaccacatgattcctagtctcacctctgcacctggctggctgggtgacccttgcatgttgtcagcctttctgagccttggttaccccactggtaaaatagggatgataatagtacctccttcacaggtttattgtgaagattaaattagtcaatacatgtaaagctactgacagataccagcctttggttgtaagttaattttgaggattctatattcggccacctctgctactctgtcatcacattcagattgagaactgctgatcagtctaagtctcacagggaataaagctgaggtctacaaaggctcagtgatgtacacaggcagaaccagaactaggagtgtccctggacccttaatctcttcacactgcaaagcagaaagctggtgatctgaataaactgtttgctcttggggactttgctaactagaaatctttattaacttggactctgattttattgtcaaggcaagaataagcaatttttagatcaacaactccaagtcactggagtcacttcagcagagtttcagtgtttagtgtgatttgctgtgcccatttctctgcataatggccttccatgcatgtatgaggggaagtccatagttaactggaatgcatgcgtaggcagagctttttgtttgccaaccaggagtgataacggagtttattgccacttgatcccctctgccagcccatctgggtcaacttgtttttctctggtgtttgccctttccatcaaattgttccagagactaacaacctggcttagtgatgacaagtgtgttaatagtggagctcaagataaggcagcagtaactctgtttgctctgagagtttgctgcctgcctgctgagtgatccagggacttgtcagccctttgagttaatgtgtgtgaggtgctggatgcagagaagagcacttggtgtgctttcagcttgcacatgtgtcttggtgctcagcactccccatcccatgccaggaaacctctctctctctctttgcaggagatcctcatgccaactcccatctaaaaaatgaatgcttgtgatttggaaatactttttcatagatgctcagaaggtgtttagagttttggcttttgcttagttcacaaaccaggtaattcccagttgtccatatgaatgctctatagtcaaatttaggatcccaaattggcttctttcatcactgagcaagcttctggactagacagtctcttctgtaataaaattgctaaagtgaatgcaacaggaaggagaggaggaatttgcaatgacctctttgtgtaggtagatagtctgtgctttcctgatgcaggctcccttaacatgaggattgtgtatggggcagtgacgtactgcttctgaattatccatgcaaaatgtttggctctttgagtgtgaagcagcagcagttgcttgtattttcagacaagggtctcagtgcacggagaggactccctccaagtgttgtctttgcatttccattcatcttattagagcagtgcaaaccctgatgcatgaatgaactgggtttgtggctgaatgagtttggatttgctgagcaggctgattcaggaarttgtccttgattcccctgctgtttcccatgtatacacacccttcctaagtgaatgtggcatttgtattggatgaaggccatagctcagtatgaaacgtgattatatgtctactctaatcctcaacaggcaatgctttccacttagggtgttttagaggacatgtgtaccattggacttgcatgatatttgggtcaaaggcatttatggacagagatggaaggtatgatctatcagcttagaaactcaacctcaagagagaggagggtgtataaatgaggatgcrtaaagtaagaatggaacccccccccygcacacacacacacaccgtccctagtcaaatttgcaaagacttacggatatgctaataagattgctgctggctaggggaattcacaggtctgcaaattctatgaattctaatgcctcactcagcaattttaaaaatgaatggactggaattaattgggagcctccttccatgggaattttggaagtattcttaggtatcacagaacactgtctgtttatgcataaaactccataaactacaatggaaatcactctagataacaacgtgagagatgggtattaccaggggcatatggcgtaattttaggtggtggcctgacccagcataggatgacacagactccaatgaggagagggttatgttttcttttacattctctttaacacagagagaatgtcttccctaggttctaccaggtctttaacacctctctaaactttggcaatcagcctccgctctcaggctctgagtctttgttggggtgacaagatcgaggtggcgtttaaatgatctgggttttcttttttgctgtatgtttagaattaccttctagttatagcaagtgagatgggctttccatttgtggtagtgaaataaagttcaatttaaaaattgaactttaaagaatgagatttaaagaaaaaaaattacacaattaattgtgtaggtagagtcccattataaatatgttgtcaggacaggacatgagtgatagagataaggaaaccctggcaataggagataatgactactttgattacacagggaggcagtaaggactggttcctccttcatcttgtaaacatggccactgtttccaccaggggaatactgatcgctgtcctttacagaggcactgtgctaagtaagtacttttcacacatctcatytaatcatctgaacaacccatgaggtatgcataataacaaacctcttcctttaaagatgaggaagctggaacttagagatagtaactggcttttccaaaaatacatggccagtaaggggcagaggcagcatttgagcacaggcaatttgactccagagcctggcacctcacccctatgccatgttggtaacacccagtaacagccccagagaaatctaatcagagaaaattccagtcatttcagtttactacctggggcaaattgagtttatggtgggggaaaagaaaaacacattttaaagaagggcaaaacaccatcctaaacttaatgagtcccatatgccatccctatgtaacatcttaattttcacctgtttcagtgtctgttctatttctctcataccactgcctgtagaaaatagatgcatgttcttgaaattcctactttttctcattaaaggttagattttattattctttctctcaaagtttggattgccaaagcttttggatttggaatatatttggcttgcatagatgccaatatttatacattgatacgaagattaaaaaaaaaactttagaggagagatccttttacaactagacttgatttagagtctatcagaaattttcttacatatttagcataagtattgtgagataatgtatgctttctaaaaatatacatgatgttctgctcagtcgaatgcatttatttctttctttaaagttttctgggtaaatttcaagagcatcgggatattacttaacttggtagattttattaaacctccaaagaacataattaactcattttacaaactgttaatgcttacagaaattcatgataaatgagatcacttaagactgtttcgggagaacaggaaaagccagtttgttaatgctggtcctcttctctattataatattgtgagaaatgaaggaatgtttatcactagctgttataaccttaatttgagagttctttaaatggcaattacatatatttacagaagaatgacactggcatttagctcaatattttcagcttaacagagtctcgttgggcgcggtggttcacacctgtaatcctagcacttygggaggccaaggtgggaggatcacctgaggtcaggagttcacgaccagcctggccaatgtggtgaaaccccatctctactaaaaatacaaaaattagctgggtgtgatgccatgtgcctgtaatcccggctacttgggaggttgaggcaagagaatcgcttgaacctgggaggtggaggttgcagtgagtcgagatcgtgccactgcactccagcytgggcaacatagagagacaccatcttgagcaataataataataataataacaacaacagagtctcccctgaaagagggattataaaaccagggcaagcctgtcaaagagaaatttgatttggttctgctgttttacattttaatatgcctgtatgatgacctagcccattraawtttttttctttaaattatcaataggctgtctcaacctctgttcaattgaattttactctactctcccagggaacaaaatgacagagcattttgttctaggtaccttagttcttgttgcctattgtggcagctctatttccagtacagagtttcataggaaacctctcttcttctggtcatgcctatcacccagtcacctttcctgaacaattaggaattgactttctcttccccaatgctgcatttcactctcaccctcagtgtccagccctggtcatattgtctttagcccaatttttcaccacgccatagtctttcttgccactgggctttgcatgtgctgttccctctgtttgcacatgctgttctctctttctcctcttcttcccatccctttcccacagcacacgcctttcacccaaatagcacctactcattcttcagatgccagctccagtgcgactttcttgagaaacttcttttcaccttgatcttttgtgagcagctcttctagaattgtgttatgttcttccatgcccttatttcattttgggttcacattcattggggatgattatgaatggatacctgtctcccccattaactgacattgttaagttccctgaaagcagctactatctgktttttgtctcagttctatcccagcacaggatgagcactccattaagtatctgcagtatacataagtggacagaagtgtttgyaaacacccacgttctgccattcttccctcaatgccaaaggatccaactctacmacctcatcaaattcagagacagcttctgattttgagccataggggtgtcaacagcacaagtgcctgaagggcccacagaattcctggcatgtgctgtactttatcaagaatctgacagggaatgcggctgtccctatcaagctgttgtgcctgacaggcaccatctyggttagctgtgggaccactggtgtttctcctgaagctgcaggacagccagctgcaatgggctgactgatcttgaaatgaaaccctgcctccttctccctcctcctcgagccagagtgaggtggttttaacttctatctagacagttctgagattggtagaggagaaaatagaaagttcttacttaaattattggtgcagaaagaagaaggtgtatgtgaagaaagaaaatggacatttactgactattctgcaacacagcctgtgcagtgtgttaggatacacacccaacatctcctttaactcatctgttgccgcagactagtcaatgggagcaccaaaaactaggtaaaggctggtagttraactaagtctgtttggctccaaagcttatgttggcaccacaacttcttcctaagacgaaggttggccttcactggtctgactcaaaagtagagaacatttactctgccagaggcaggaacatattcagctagcttcaggggtcctggtgctacaatcacttgtgtttctttcttttgtttttttatgtcaaaagtaattagcaaagaaattctgttttgattgtttgttttagagatggggtcttgctatgttgccccggctgaatttgaactcctgggctcaaggggatccttgtgagtagctgggactacagagcacaccacccgcccagccacctgtgtttcttatcagagcttctatctctttgttgttgcagattggagcctgggaggctgggggctggggagatagtcaggacccctagaagggcaggaaggatgcacaattattccacagaagaagcctgcctctgtttcccttgatgtcacctagtcaacaaagtcccacagtttatgagtttaacctacagaaattctaatatacctgccctgcacacattctgctatgagagccaagggattaaagatcaacaaaggcttccgagaagaatgcttggcttgagattaggaggaagaataagagtcatccttcatccatgatgaaagaagactggtgggaggagaatgggagagaatgttgcagataggagaaacagaatttgcaaagtccacgtggtggcacagaggaaggttcacctgagtcatggaggaaagtgcagcctggctggggtgtttagggagaggaagcctgatgccagaggtcaaggccatgacaggtaccaaatctgcccccacacattgttctctttccatcctgttgggtaaaacatacagatgtgagagatgggatctaagggatgggaggaaagtgggaaaaagctggggagaaagactaagtgatagttactaaaaataaaatttgctaagagcatgttttaaggatcgtggcagaaccagtcagtaataagggttgaaaaacaaagcatgaaaatgaggttaacctccctgttaacccaaactgaggtctccctggcttttattatcatggttatcgtaacacccagacacatggattggagtgtctggggaaatcccttcagtccgctccccaaccaccgcagctgtaggaaaccactaatctactttgtgtgaacctatttttaggtttctatagatttttctattctgagcatttaatacaaattaactcatacagtatgtaatcctttatgtctggcttttttgtatgcagcataatgattgtaaggttcctccatgttgtagcaggtatcagtagttcattcctttttattaccagtcaggcacttcttgactccctgaaaagggcatcccatcataaggcagtcaccggttcccaggcatggctggagcagggtgccatagagttagtgattttcctcaatcgtattggatctcagtggtctagataaagtcagcccggacacagccctctcagtttctctcatgccctgcttagcagcagctgttctctagctatatatccctgttatggttttgggtcctgggtcatgagtggtccttccattcatggccaccatgtacagttgtataggttgagtactgcacaaaggtgcccagctgaagaaggtacaagaaagcactcaaatgcaacctgtaccccttttgctaagccagaggctccagaatggtgctgtgtcagccagaggggagagtactttttttctaatgcattcaaggcttcctaagggcttcctaagggcagtcctttggatagcatgctgttgtctgtggcacttgccagggctcaggtcctggatccagttaacatgtcttatatttgagttaacaagattgaagtggtaggaagatagaggataaaatcacagatattttctgatttatggatttgttctcataagaaaatcttttccaatttgtgttcggagatctacacccctattttctccatcagtcctcttgtgagttctaacatctcttgctgttcccatctgtgtttctaactttgaggttgagcatttctgagattgaattggtattamaaattaattttcacaaaagaagaaaatcatgactttcagatatcaaaatgaatatgtgttaaagattttattctactcctattcaatgaggggaccaggcagatgttataaccagttgaggacaggcaggacatggtggctcacacctgtaatcccagcactttgggatgccaaggtgaaaggatcacttgagcccaggarttcgagaccagcctgggcaacatagtaagactctgcctatacctgaaaaaaaaaaaaaaaagccaggcatggtgatgcctgtctgtagtcccagctactcaggaggctgaggtgggaggagcccttgagcctaggaggtagaggctgcagtgagccatgattgtgccactgcactccagtctgggcaacaaagggcaacaaagcaagaccctgtcttgaagaaacaaagacacaaacataaacaaaaaagaaaagaacagacacttacaggtcagtaatatttaaatgaatgtggaaacagaggcaaaactgtttttttccacaaaggcaggagagaagtcaatggaacttctcttggacaggacagaattttcatgtccatggacaggaattatttgcattgctgtcacttatgtacaatttacagaattataaaataacttctatatggtcagaatcagcttaccaagagtggcgttctctggagtctgtcaatgcatcccttgtagcagcatacttcattttcccctgcattggtaatttgtggtgtttctagcgcattgatgaacctaggtaagtttttaccattccacttgagatttcaagataagcacaccatttctttcatgtctgaagtagtctttggtatgttggtgttctctattagaggaggaaggatctggaagttttcaaaggaaactggtttatggaaagagcaaatggtggggatgtactgtgggttcgaagggaggcatgtgttagtctgttttcttgctgctgataaagatataactgagactgrgaaatttataaagaaaaagaggtttaacagactcacagttccatgtggctggggaggcctcacaatcatgacagaaagcaaaaggcaagtcttatatggcagcaggcaagaragaacttgtgcagggaaacccctccttataaaaccatcagatctcatgagacttattccttatcatgagaacagcatgggaaagacctgccccatgatttaattacctcccattgggttcctcccatgacatgtgggaattgtgggagctgcaattcaagatgagatctgggtggggatakagccaaaccatatcaagacacctggtaggccaccaactgggaaataaggtctggattttattcttaaaatcatcacacccttgctgtgtgacgtttgggcttgscatttatctccctgcttctgtgagacaggaaaataagtgttatttgtaaagtgtgttgaggttccctgatgaaagttaccagttaaccacaaagtagtgttatgaatctgccctttgtccgcttgctgggattggatgccctgggtacatttgtcttccacatctttcatctcttctcaccattcacttccgctgcagcaagtgggcaccctgccatgggcttacgtgttttcagcagctgcatttggatttttctatttacccttgaaacaatctgttataaaaagccttaaacatctcccagtttctttcctttcctctaaaatgtttaagtaaatagttgatggaataattattctaaatgtagtagagttcacattgtcttaaaagactggctaaaaataaaaaattggtcttgtcgaagcttaatgagattcttcagctttgctgtcccagtgctgcaggtggtgaagaggaaaatgctggagcttccaacaacaacacaccccccaaaaacctaaaaacaaaaaaaagtgtggaaacacttccaaaatctactcatctaaaatggactattcctattcatcatgaggggatcttcaggtgtattttcagtctatgaggaaaaagccacttttacaggaatgtctgtaacaaatttgtgatgtaatacagtgtctactccagtagcttcacttcatgaaactgaatagcagagggatggataatagtagctgaaagacttatttttccttttagctgtgacgctttaatgactttgctatccctcaactgtccccttgggtggaggttatattctttaacgaatcgtcatgtgattcttcacttttaccataccaaatcctatatactttgctttaatttttgctttgcttttggtgaccgcatatggcagagaaaatattttttgtcttcactgccattacaaatttccatagtcctgggttgaggctggatttcggagaccaccttgtttttttccaaatgcaggagagaggaaagtagtattagcagcagttcaatccagtgcacgaaatatttgttgcctkttgggatgcaatactacaactcatttacacttcacacatttatcacttttcttacttytgatagattatcttcccagccattctagccaaactgatcatctgcttctgaattcccaaggtgtttaatatctttcctactgatatttccatttaaccatatggaaatggttaaatggtctgatatggttgtttgtctatctgttgggcatttattttgtctctccatcagaaaaaatacattccttaaaggagagaatcatattttatatttctgttttgtcctctatagcacctatcaggtggccagagtcatagtagggtctgagaaaattcttttccatttgcttaaatgcaaatgacattgggtaaacttgtactaagtgacacagattgtcacaaaggtctacaacagagcatgctgattatatacatatcatcagaggacagacttgagaaactcagcatgctcatttttggatttgagctgcatgaacagctcttggtattgattaatggaaagatacaagcctttagttgtttggatggaaagaaaacatctctagcattcttttttctttgaactcttagaaactgaaaagtcccaacagyccatgtccaaaggcgtaactgcagacttcccaggcagctttggagatcatccttctccaattgtggtacttggggtcaagtgtagaagcagggagaccacttaggaggttattgtaataatctggtgaaagaccatgacactttgcatccaggttggggcagtgggagtggtgagaaatgtgatctgttgcatcgactttgatgtagagtcagttacatggagaagtgattggtgattccagaagttcagagaataagccccctggggaaggtcattttcagtgaggaggtcattcatgtccctgaaagtcagttgtctgtggcagagcttgggtgctggtgcttttgctgtggtccgtcccagcttctctggcaggttggcatgtggactgggtgttggagaaactgctgaggtcttcctttccctggggaggtagtatcaatgattcggaagttttaaaaatgcatcagcttgctggacagtgccctcaatcctggcccagacccatcgtggaaaagctatcatggtgcagcctctgcattttgcattagttgacctctttatggtaaggggccaagtctgaaccccagggagctgaggcccaggaatgctccttctcattagagtttggcctggaggtatggtcctgaaaactttgcaggtgagccctgttagtggctcctcaccccttcttctcctcccttgaaggagggagagcttcccccaaccatgctgggaaggcaaagctctcttaaggcaacgaccacttgctgagcacatctcagggcagagacaatgaagagaaggcatgaaccacacagccagctgacatctcaggaaggtgtgggagtttgaagaatccccgctgtgtgtcatttactggctacaggacattgggagaattacctaacagccctgggcctcagtttcctcagctataaagtggggataataataatagaactatcttctaaattttttgtggggattaaatggggaaatataagtaaaatatttagaatagtgcctggcacaaaatatgtaccatattttgtttgctattaatattttatagtattattcatttataatatgataggttatrtagtgtgtttggctattataaatatattgtgtgattagtatattctcaagccaggcccagtccccagcctttagaaacccactccctggggatctggttcagggtagttactgggtcaatctgtgtatgaacaaacctcacgcataatacagacatctcgaattgagtacctgctgagcctggatctgtgttggtaacttcacatccatgatccacaaatgtctgacatttattttagaggtgaagaagttgaataccagagggttaagtgacttccgcagggccacacagcaaggttaaaattaggtcccctgacgccaagcccctctctgtgatcaatgagtgtttcctgatgtctgcagtatgccctttgctgtgggaggcactctaggcagttattcctgaactggctcaagattctgagtttgcaagtcagggattaggcctaggcatctacctgttagcaggcccctgcaggaacttccagagcagatggcctcaatggcccaatggagacacaatgctagaaggtagacgaaggatggtctcagctcctgaggagtcttattacagaggtgatcatcaaattacatgaaaatgcccagcaggtgctgattctgtgcgtgtctgtgaggctcactctgagatgcagcagcctggttaagcggagaggactgtggtactcatgttgactcagcttagggaattaagatgccctgtgaatgtggagaggtggggcaagggcaaggaagkggggacmccgtttgaggaaggttcagaggcataaagaacttgacatgggacagggctggtgaggattccctctgggacatttcccccatcttccwagtgaagacccatcctgcaaaatccgtggatggaaagcagcgggcataacctcccagggtggattacataactgggctgggccttggctggggctgggcctcccttgccatccttttctcctggttctcaggtcctgtgctcctctcatctacctctctacctcctgctgagcrgtgatggtggagcagggcaacctgctcacaacttcctgcaggagtggatgatgtgcatgtgttttgtggggtctgttgtagtcttatgtcttttgcctgtgagtggttaggccagctgtgccctcactaggggagcaacaattgggactatggcaatggaaggcagaccctgtgggcttttggaacttccttctttttcacccatcctcctaattttgcttctgtccataacacacaatagggcgttggacaagtcaattcctctctgggtcccagttttctcctctaaaatacaggcttaygactaggtgaycttgcttccttctcaaagtaacattcaatgacttttttgaacccaatctttggaacccctcttggtgttctgttcttttggctttgagaaggcttcctcctcctgtattagacagatactggagtaagagcccaggttttctgggtacattttcctttaaacctccaggcaaactggagctagtcaagacatcagaaagagtatcctgaagctcagggttgtgctttcagatcctacctcacaaatattcagttggtataggctctctgaggtctaagctgtccaaataagaaggatctgccttctgtgtggttgatccagttgcccatgaaggagactctgaaaagaaaagcccctccacactcaagataatgattgccaaggttttgcactaaaagcacacatctgcctgggactttatgagtgatggctgtgtgttagctgcaggaggcaacaggaggcaatctgcccgaatggtggacaccatggccagccaaggctgccccatctcggtcttcatcacttcccttctcagtttctctccccacaaaactcaccatgagatggcttctgcggcagtgaggtttaccatccaatagaaagaaaacccatggcagttggctaaccgaccaaacttactccatttcctctgacaatcgatarttattaatcacctacattctccagaaggctgtaaaccgccctcccttctgtgtctctgggatgacaaatggagtcggggttagccagcccggctttgtggcatccaatgtgtttgtgtttgtgctttgggcttgtcagttgcctttgctgggatgaaatagtggggcttccactaggcatggttcagcagctctgctagtgtctgtgctttattgggcaataaattaacagtgagcactgccaaggaaatagataaatggatagggtggcaagcacatttttaacaaggaaaatggcttcrtttctcagtagcatcatttaaatgattagctcagttgtgtagtttccttgattaggggatggggaggagatcttaaataaacatgtctgtaggaagaacattgtgggggcatcctcactgcccttctttggaaggtttagggaaggagaggggatttgtttaggaccctaggtctgggagagtcttgcattttagtcatgtgtgatacatgactaattctgcctrtgggttaagcctataaatagtgtgtgattctggctggccatayctggaggctataatcaggatagtcatacttgaaagagttaggagaaatcttttatggcttgtcatgatccttaactgcatccccatggtaaacagtggcaagrgggaagagagggaactctttgtttgcaaggcaaatctccacaaagctaagaggaatgctagccatcagtacaaaggaaaaccttccaggctcaagagaagggcagtagaaaacaaaaacatgaatgcctcctttccatgtatgtacacgtaaacataaaagggtgcctgctttttcataactaatttctagaagtggtgccttccccactagaatatcatctgaataaggggtctttgtcatgtgttctctgtgatagcccctgtgctgggaatggtgcccagcatatagtaagaaatcaacaaatacacgtggaataaatgaacttacaggtggactgctttccaccctccaaattctatccatgattcctttacagcttaattacacttccaccaggtccttccccagccactcctgcctgaaggactgtcctctcctctgctcaccagttatctcttcttttcctttttattggaaattgagaccttgttttggaccatgttttctattgtttcaatttgacattaaaatcttatagtattgatctcttttatatccattccacaaaccttttcaggttgctataaaattttttatctgtgtttctctaggaatagatgagttgcctgaatgtgaattcaattcatcttgcaagtataatagcttatcataataagctcttcatgtaatgtaataagtacttcagaaaataatttagcctttactggattttttttcccttcaaatgattggtttgtatgcttaatcactcaagaactcagctttctggtagaaattgaacttgtatttgcctgtgaccaacctactgatttttgttttagaaaaacagaaacaaagggagaataagagagaggcaggaggaaagaaaatgagagagagaaaaaagatgaatgtatatttacatctatagcttacttcacaataggttttgaggacttatttacagctaccttatagaagatatttacaaaaagtaagtgctataggttttgaaatcagagaaaagggtagatgaatagatgcttctgctttagggaatgtatcttggtaacttctgataaaggaagctttttaagctttctcttctctggcgcttataataggtccatgttttggtagggggtctagaagaaatagcagctctttgccaagggattgcttattggaacaaatcatttgcaatagaaatgtgtttactaagataagtgccattttaaatgtagtgtgctgtacccctggcaaggaatcttaaaggtgactcaaagcctttttgaaacactgccatataattaaagaaaaccaacttaatgatctaacatttagcattattctttacagttttacacttggactggaaaacagttgcaaaaatagcttcatttaattaggatgagaaacataatacacatatatagatgcatgtgtatatatatatatatttacttcattttaaaaattattatttgtagaaatagtctagtatgtgtgaccaagaaaattaatttaagatttgtgctttattcttcccagtcattcatcaacaagtattcattgaggatgcaagaggacctcaggagggatgtacattcaagacataccatcaaaggggcttattgtctagttggggagataagacatatacacaaaaatagttaactgtatgtatcaagtattatggaattgactgccttcaaaatatgaaagatggaaagtgctttggaatatcaagcaaggggaaataggaacctatactttaaggagggtattcattcattcattcaacaattgtatataaagcatgtactgtgttctaggtactcacacctgggtgctagagatacagcaaggactgaacagaccaggtctgtgtccttacagaatttattttcttttgaggttaggcaagcaatagacaagtaagaagtaagtcaacaatgtgatttcagggaatgataagccaatgaaggaaatgaaacagtgtgaggggacaggccagtgctgtgtgcacctaactgcatgtacttgcttgctcacaactcagtcgtgctttagaaaggatagtcaggaaaggccttgtaggaggagctggcctggactcagacctgaataaggagaaataacctggagaagggatggcattctgtcctcaccttggagggtcaggaagatatggtttggaggataggaaagggacagacattctagaacatttcagagtatctgagctttttttttcccccagggtgtggggttgtggtgttttgcatcaggtaaggctcaggtgaatcaatgtataattttggcagccagaaggctgggagctgttcacaatgagagattttttttgcatcttccagtaaggccattctgggatgaaagatgtcagagtgtctggcaaccaactggcagccattgaactggggatttatttagcacttacttctagagagcttgctatgtgccaggcactgttttgagtgttttacaaacatattaacttactcaatccttacacctctttgtggtagatgctcatcttcggctcctctgtcagagrcaggaactgagccttgagagttacctgctctaggccacatctctgggaggtgttctagttatgctgttctagcccttaactcttgtgcttcttttttgtgagacgagagagcacccatgtcactcaggacacttctaagtgtctctagcctggaccagcagaatgagagttgggaccttttctaattatttaagggatctaaggactttccaccctgatggaaacattctcagtctgcccagtatggtacccacttgcaacatgtgcccattgggcacttcagtgtagccagtgcaactgaggaactgagtttttaatttgtgtttaactttaattaacaaaaatataaacctaaaaactgaaggaatataaaatgtttgtctgttaaacaatactttgttgttttggtaggactaattttcacaagatgcaacaattgttgcaacacatgaaacactgttatatttcagtgggggtgtcaggtgcatgaagtatttctagtatctcattaggaatttttaatattaatgacatgttgaagtaaaaatattctggatatattgggttaaatatgaaacactttacacactaatattatatgtttcttttttttgaaatgtggctaactgggacattcaaaattacaaatgtggcttgaatctttgaatatttctattagagggagctgggatgaagtttaccctcaagcctctaaaaagagcgcttgggccaggcacggtgcctcaacgcctgtaatcccagcactttgggaggccgaggcaggccaatcacttagtgaaaccccaactctactgaaaaaaaaaaaaaattagctaggtgtggtggtgtgcacctgtagtcccagctacttgagtggctgtggcatgagaaccgctggaacccaggaggcagaggttgcagtgagctgacattgcactaccgcactctagcctgggcaacagagcaagaccctggaaaaaaaaaaaagaaagagagagagagagaaaagaaaagaaaagaaagaaaggaaagaaaggaaagaaagagagcttgaacaaagaggaaataacggctgtgttttgggtggacattgagccatcatcctaagcaccagttctcccggacttctgggctcttgctgagctcactccagttcccagttccccgggaccaacatgcaccactatttcttgggttttgcagatggaattgccacatggatagagattggtgggaactcatacatgaacacaacccccattttgctcaaaaatggtgtggatttagttggagttagagagtctctcaaccatatgtgacttctgccttctgcccttgcctgttccttgacaaggaatgaggcctgcattgccactggcaggaagcagctatccacccagcacaatgcttgagggccaaatcctgcacctggtcccagaggtgcccaaaagcaggaggtgagagggctgtgcttgcttgagggaccccacagagccagggaacagcctgycaaagcaactcaggctactgaaatccaagtggcagcaaatggccaatcattgtctgggtctggctctgtcccagcctctacttacctgtatctcctcagaggtacagcttggggcagcctccctatcaccgtggtttcaaggagaggtgtgggtttgtataggggagatggggctcctccataactgagtcaactgaagactcctccagggtcactcaagtggggacattgaagaccaggtagctgcccacttygccagtgcagagacctgagtcccaggcagcccagatccctggagatagtcacatgttccatttgctctgctgtgttagcattaagatcccacccattggctgttcaggtggccacggccctgactgcacactggaattacttggggagctttctttttctaatacatcagaaaaatactgatacctggtcttccccacagagatgctgatgtaattgctctggggtgtaacctgacaatccaggttttaaaaactctgaatgaagttatctttccctgagaggatatggtgcattgaaatgaactttctcaaagtgcttcagaattacagcagatgggggtgcagggtgcctgttgaaaatgcagagttctaagctgttcatcagacctttggaatcagaatatttggaaatgcacttgtaacctacagcccaagtggatattcagtaggctgccatttcaacatcaccctgtgaaatcattaacaactcagtatggatttgctccttattccttgtgctttttaagaagtccaagaaagagagttaaggtaaaattgaaaggaagtaatctctaatggtgaaatttcaggctcttagatagagaatacttttcggggaaagggggtcttctagaagcccctgaaatgaagacaaggagtgaccaccaactccttgagccagaactggggcagttcttcacytggggactctgcccttgtgcagtgggaaagcagcttatatcaaggcttggccaggcctcctttggtcccaggctggggactgctgggacttctgccacaagatgcttggattgtgtttctttgcattggtgcagcgtctcctggagactgcttttgttcagtcactactgaggcgtgtattcattaaatcactgtgcgcactaaggtagcagtgcagagacaccctctctgtcaaaaytgagccagcccatcctgcatggtcttaagttttcctgagaaaagtagccataagcgatgggctcccactactccctgctttattacttgaggtacagagagcatatgacacattcgaaccccatgtgagttagagttcagtatgggatcagaggctggtttactcttttcaccgggaagcgatcttgagaagcctgcggatgccacttcccatgacctgaggggctgtgttttatggactgcttttgatctgaaatctagagatccctgttttcatccttgtaagcctccagtaactcaatcacagtagagcagtccccatcatctccagcaatttattaatcatgttcaatgccagacaaggccttaaaaaaacaacacttactcatcagcagaccactrgcagcatggaaatgctactggcttctctcggagaatctcctatactctgcgaacagcatgagtgtctgtgtgtgtgtgttttagtgtgtgtgtgcctgtgtgtaggcacagaactatggaggttttagacattgtcgttcgcctgctggtatatcaggttactaaacagagaactagaaactctcctagagtggctacaggagcactgcagattctcaactgtgcttccccatcttctcctggatgtttggcagccagtgtgtcaggatgtattaggcctctctccaaggacccaagtgcaacttaaattggatgaccatattctttggcatctactcagggcacttgtgagagtggaaaggaggtgctcttaataattattccaggacatcaagcaaactgggaagtagagtctccttaggcatattcacttggcagggtctactgtcaagaagcgtctattcttggcttattaaaatgccatcagaaatcagtcagcattctgatataacagggaattccttttatggtattcttggcaggtgatctcctgtgtcaacttaaatgtccccagggactgaaagctcagtgccacatgcagcagccrttctattgttggatgattgtcacattagattgggactcattagaagacttttctgatatgagattggaaaatatgctaataatatgtacagtgatgcaggcaacttaaaattttcttggagagaaagagagggttgctatggtttgggaaaatgagtggggccgatgcttaccctttgtgaacccatttttggagggtgcagccatcacagcgatccaagaaaaatcttcctgccttggatgctctttcaccaaataactctggaaagctgatgagatgaaacagagtttcacaagggaaagtggagaagaagtttctgagagacaggaggatttatacccaccaattcaggaaggagctttggagtcatggattaaaagaacaaaggcagggagtccgacctggatttgagactaagctctgcctcttatacagggcatttaagctctctgggcctcagttgctccacctttagaatggagatgcctcttcctttttgaagacagtgggtcctccctcaattgaattcagtgggacttcatcgcttgctccacacagagctcctccccagtctgtcacattgagtgcaaaactctgcctaggtccatccagtcactcaacaagcatccatgggggaagcattaaggagctttagatgcactgggttctgtgagagcaatgttagtcttcatcttcttcactccttctcatcctccttccatggaacacccctagactccacagcctgcaaagctcattgccccttctctggagagtcctcctaattcatgtgcaaattttactcactagtggggtcatttgttgagtgtctgtccctacttcagactgtaaggttcatgagggcaagggctgtggctctttggtcctctgctgcatattcaggcttagcacaaagcttggtatacagcagtcatttaataaatatacattgattgaataaatgaatgagtgaatggtggggccacagccatgattgataccctttccatcctcaaggaggagatcacagacaagagactcagaagaaaactcatgactacaataaagagtaagaagtgctttgtttaaagcatccttggggtctttcaagaggtcccttgggtgaagtagcagattcagggtaattagggaagcctaagagttgatctttctgtgcctgaatggattgattattcaatagaagaaaagaaaagaaacaacaagacttaaacctattcaactaccctgtgtacttgaaatgtcatttaaagtaaaatctagcatggcaacttcaaataacaaacataggtaatgctggagagggtgcgccaagctggccagcattcttacgaagtttggctggcacagagcacacaagagaagtcatattattgccaaaaagttcttgcagtgggtggaacctggacaaagggagctgttctctcccctctaagtcttagatatagctgggaaaaacagacagagtcatgaccctgggttcctttgtttttggaagtcatgtggacattcttcttttttagcactgtttctttctaatgatraaggaaacagtatattgatgaactcctatttttcatttgtggtgctttctgaatgctttctttggaacccaaagtctcctcagccacacctttacaagttttatggttctgggtggaagcatgttttcagaaatctaagcctacgaggtatttttttttttttttggcaggttttcactctcattgcccaggttggagtgcagtggtgctatctcagctcactgcaacctccgcctcccaggctcaagggattctcttgcctcagcctcctgaatagcagggattacaggtgcccaccactgcacctggctaatttttgtattttttatagaaatgggatttcaccatgttgcccaggctggtcttgaactcctgagctcaagtgaactgcccatctcggcctcccaaagtgctgggattataggcatgagccacagcacccagcctaagcctatgtatttttgttttgttttgttttgttttgtttttagcagccatggcatcatggttaaattcatgaggtacctttcaatggagatgatatttcaactttaattaaaaaccaaacaccttgctggcattgtccagcccaatgaactagactctgaaaatgattttgaacaataattcaagataaagagctccagccggttttctcccctttggaagccttcaaagtatatttttatagatatattaaagagattttgtccaaatggcacatacctaaacagtttaaaatgtttttatacccatgttcaaagaaaaagaatatcttgaaagaataaactttttatcttttataaataaggttaaaarcagtaattctcaaaatgtggtctctgaaccagcagcatcagcatcacctgaaacttattagaaatgcacattctggcagggtgcagtggctcacgcctgtaatcccagcactttgggagaccaaggcggttggatcatttgaggtcaggagtttgagaccagcttggccaacatggtgaaaccccgtctctacttaaaatacaaaacttagctgggcgtggtggtgcacacctgtaatcccaggtacttgggaggctgagacaggagaatcacttgaacctgggaggcagaagttgcagtgagatgagattgtgccactgcactctagcctgggcaatagagtgaaaccctgtctcaggaaaaaaaaaaaagagtcttttgatgctatgaacatcatctggcttctggcatcctgctttgcccgagaatgaaaattccagttccagttccagaaaaaaagggcattcttcagttttgtgtcccctgccaggtcaactctgaacctgtagtggatactcagcaactttgtgcactgaatgaatgaatgaatgacttgtaggctggtgtgggaggttaagagaaatttattctagcacataaagatcttctgatggagtggatgagggatggaaattggtgatcaggctggggctgtgctgaaatatgcaggcgggttatgacagcaagagaccgtaaaccctgaaaggatgaaggttctcctcacatataaatttgacacatggaaaaaccatgcagtaagcttaagggagcccacctcaattctgatttcttcctgataactatgtcaaagctcttaaaactgtgcaatgaaagatctccacgcattttctggcccttgtcttgccaattctttcactgtgtacctggtgtgcctggtctgctgaactatgaagcatactcgaacatcatacacatgatcttcctttttaaaaatgaccttgagaagataacaagtgacattctacagacagactccatttcttctcttttgtttgcaaaagtgtgaggctgaaggaggaaggaaagcttgggttacctgaccacattctcatccacccaccctcaaacaaatgccccacacatgtagaggatgtggttttctgactgtttatctccagtgagccagagctctaggtcccctgtgctagagggggcacagaggcattattatcacccagtcctcactgggtgagagggagaatggtgagaccattgtaggaagcaaggtggaatcaggggctgtgggccaggctttcgaaacttgcgcgaatacacatgcagaggtttatgctgctgactctgccttccaactttccaggctgtaggagtgggaatttattgagcatgagggatgctatcttgtgaaactttctacttcattcgggaagggtagtttgtctgtaagaattcaattgtaaatacaaaaataccatttatttctgaggtgagggcaggaaggagagatgtcagaagtagacaggttagggctttctctttggagacctggatttcaacccactgaaagtcttaacaaagaggcatgctagtatcattcttagcaagccyagtccattgttatggtcagattcgattctgcagaggagaaaatggagtgtgacatgtttggtgccaggaatgtgagcatgcacctgcacagccgatgttggtgtcatatcgtcagctgaatggtcatttagcaattttggccaactcccttgacactatagggcttagatggcattgctttctgggatgcactgataagccttttacataagccttttacaaagtaagaccttggtgccaaaatccttgctgtagaagatgaaaattttatgttatttctaggggtgctttcaatgttccattaagccactgaggagctacaaccaagcttgaccttgaggtttagtcttagggaccagatgccctctgtgtgtttcattatcttccagaggaaattgttgagtgtttgtaaagyggttataggatgaagggaacactcttttaaagttcctaattatatcttggactttagctacagttaccgaaagacaaaataaggtctctaaaaaaatcatagccaactttgggcattggttgtagactagagtgcagtgcaagggaaaggcgggacacacataacatctctgtggctacatggggatagattctggaaatgaaaggagaaattccagcatcctagggggtaagatcaatgctctagagagggaagagtcacttgcatgtaatacaagtttcttggagatacccactgccattgaattgagagatgtcagtattcctgtgggagggttatgatgtttgagtttttaaatatacatatgcttctgaattctacttgtgggttctcagaattttccttccattttgtaaattgcagtaaaatatgcataagatttaccatttcagccatttgtaagggtacaattcagtggcttttagtacattcacattgtgcaatcatcatcactatctgtactagttatttgcattgccataaaggaatacctgaagatgggtaatttataaagaaaagagatttatcttggttcatggttctgcaggctgtacaagcatggcacccacttctgcttggcttctggtaaggacttcaggaagcttacaatcatggcggaaggcaaagggagagctggtgtatcacatggcaagagagggagcaggagcaaggggacaagaaagaagtgcagaggtcccagactcttttaaacaatcatatctctcactaactcattaccactggaaggacaccaagccattcatgagggatccacccccatgaccaaaacgcctcccatcaggcctcacctccaacactgggggtcatgtttcaacaggatatttggaggagggaagacatccaaaccatatcaccatccatatccagaactgttttcatcttacaaaacagaaactctgtacccattaaacaataattccccacttctccctctctcccacttccaaggaaccatcattctacttcctgtctcaatgaatgtgactactctagttacctcctttaggtagattcacacaatatttgtccttttatgtatagcttatttcacttagcataatgtcttcaagggtcattcacgtcgtagtatggaccagaatttccttctttattaacactgaatagtattccattgtatggagagatctcatcttgtttatccattcatctgtccatggacactttgggttgcttctaccttttggctgcaacaaacatgggcatataagtatttgtttgagtcccagctttaaattccagttttgcctttaatgtaatttaacaactggcagggtttgagaagtagggcaaagatagccacaaatttagtccttggtgacagtgagtggcaacttctgacctgactacgctacagaagatttctcatctcataaacctaattaaattaaaaatccagttggccaaacccacatgcacttaagtcagacaatttcttaaaaagctcattagctgcaaacttgagcgctccaccagcagatggaactttttcccctaggtttttcaatacttggacaggaaaggtcttccaactttagacctcaaatggaagattttatcatgcttgccagtgcatcggttttaatgtcattggtaaaattatgcaaaaagcaaccttttaagttttatgatgcaatgatgtaagatttcagtgtcattaaacctcggcttgcaggaaggacacaggttttagggaaagttttctgacttcctgttacaactgctttccctcatttcagttataataaattaagccctaggaggaatatattgaacttttctgtatttttaatttgggcaaaatgagatgaacatcatcaacaaaatccaggatgtaggacaacactcctgcgatgtttggggaacacgaacctgcagaagttcacataactctggccctatagttatgtcacaggcctcagaagggaagagattgggcaattggcttgtagtaatcatgtcccagattcttctttggggagcattaaaaaatgagaattcagacactgtgtctatctgcatgagtcaagttttcttctgccctctcaaaaaaaagtccatgattgcagttaactttgtctatatactgatggatgcatgatttatagtaaacttatagtaagagggaaccctgttgtttcccagggtttcgtatgtatttatagtcactttgaagtgacctgatttgaaaatggacagagacaaactgctggggggcatgcaggtggttaataaatactgatagagacccccaggtggttrataaatactgacagagacccggtctttctgattagaggaatcacagtttgtctctgtgccccttgcagcgtgtttgtgtgcatacaaatacacacaaatatattcacttattattggaacgttggcatttccattattttatgcctctccatctcactttcttatgacatctgttttcacagattcctagtcctgattcaaatctgaattctctgcttcttcacgtaatgctccctrtatctgycacctcagttgaatctgtttttcctagagacatagttgtttccctcactcctctctctggaggttgctgtttctgtttttgtttgttttttgtttgtttgtttgttttttgagatggagtctcgctctgttgcccaggctggagtacagtggtatgatctyagctcactgcaacctccaccactggggttcaagcaattttcatgcctcagcctccccagtagctgggaatagaggtgcacagcaccacgcccaactaakttttgtacttttagtagagatgggttttcaccatgttgcccaggctggtcttgaactcctgacctcaggtgacccacctgcctccacctcccaaagtactgggattacagacatgagccaccatgccgggccatctttgtaacccaggagtgctggacactctggcccttcattgcccttctgttcttgtagaaacctgttttctccaggctcctgccatccgaccaaatccttcctctctctgtccttcctgatgctgtcacccatctaagtccaggcccctccccctattcagggatggccctgtcctcttctattctcaacctcagctccccccatcccctttgagtctgtgtgcaggactgtccttgctatccctgtgtgtgtctcagaccctcgacctctaccaccgcggtgctcttcttcctgctccactttcaccagggatcccctggatgctgccattacctggaactgcatctcacctttattccgggttataaacttcagggtctcactcagtgagggtaatccatgtttctcccacctctcttttgcttccactacactcagtcttcaaactaattctccagccttttctccacatatttatttatttaacaaatactgattgagacactttgctactttcttggaatttcgtgataactaaaaatggacacacacccggccttcatagaacttgccatccagcaaaggaaagaggagagcaattgatcaaaatgattgcacaaagacatgtaaaattgctgctttgctaactgctacacaaaacagaatacctgtgggcagggaagtgacagcagagctgatttctgaaggatgggcatcccatgtgagcaggtgaggcttctgggaggaggaaagtgcttgtgcgaaggctctgtggtggttggggtgggaggaggcaaatggagaatgagaataactgcaagttagattcctggagtctagatgtggaagcatgtgaaataaagccagagaggaggaaaagaccagagctttcagggccttgtggactctgtcaaggattttttttttcttcataccaaaagttatggaggacatttgaggtgatttaaggagggattctctccgatttacatgtgtgtcctaagaattcagtccattgcacacagagtatggcttcatagtattgcacttttggaagcaccagatcctaatgcctgtaaaatcatagagatttttactaggtttccttacatgtgaacaaaycagttttactcttatctggcaatcccatgcattttattttaatgctataatcccaaataccaactacaaagcccctctttcttcttcctttctttcatcttgaatacatctctacttaatccgttgtttggagtcttggtttccagtgaatcaatttacagcatttttgtgcatgtgcttccataagtcaaatgtgatgtttcatagtgctagcttggtaatttaggggacctatggatgattaaatggctctgcagaaatattacagatatttttaaatgtatgataacaaaaatccttttttggtggcaagattatatattatatatatwtttttttgagacagagtctcgctctgttgcccaggctgcagtgcagtggcgttatctcggcttgctgaaacctccgtttcctgggttcaagcarttctcctgcctcagcctcctgagtagctgggattacaggtgtgtgccaccacacccagctaatttctgtatttttagtagagatggggtttcaccgtattggccaggctggtcttgagctcctgatctcaagtaatccacccgcctcagcctcccaaagtgttgggattataggcatgagccaccgcacctgrcctatatcttcttctattgagaaccattcatgacttaggaatgacaagaacatatcaactatacttgctaaacagtaaagagaaaaaaatcattttctttttcccttaggaaaacactgagactcagtctgagcttctggaaggctaaagcctgcaaaaacatgrgcttttcaaagctcacagaggcaaggagagggaggcgatgggtcagaccaccactcaattttctgtagtgatggcagagctgagacccagactcaggagaaagctgatccatggcccttctatgtcttgtgttagttttgtgggatgacattctgcatgagcaattgattgtgctgctggaaacacaaactatgaatctgagtgtctatggagtttattcttgtgatcttatgaaacaagtctcctgcatacagatttagggacaggcatattgtcagcatgttgaatcagacttatgtatacatggtttacagttagcataagtgagggctaccttttcaagccaaaagtttttagttcctaccaaggtcccatctcataatcatctgtttcaatctcattatttcacagattgggaaacttagacccagagagattaggtgacgtgcttaagagcatgttgcttataggggcagagtggagattcacacccaggtcttctgtgtcctgtgctcttccttctccacatcactcatcctgtgtgcctggttatattagtccgttttcacactgctgataaagacatacccaatactgtgtaatttataaagaaaaagaggtttaatggactcacagttccacgtggctggggaggcctaacaatcatggcggaaggcaaggaggagcaagtcacatcttacatgttggcagggaagagagagagcttgtgcagggaaactcccctttataaaaccatctgatcttgtgagacttattcactatcacaggaacagcatgggaaagacccgcccccatgattcaattacctcccaccaggtccctcccacaacacgtgggaattgtgagagcgacagttcaagataagatttgggtggggacacagccaaaccatatcactggtgtctgtcctttcctagaacagccaggtggacttggaatgtcaaaaattcttcttcctttttccttggttttccatttctcactttctctccccgttccactttgggagtctgaaatgagggtggtgttgcttctctgcctgatctgatccttcctttatatcctggagatgactgttgatatgtgtagcgcttcttacattcagaagggactcttgagtaatttaaacttctagatcccatgctccctgagggcaaaggccaggccagacttaactgtttcagttttgcrtttctctgtctctcactctggcccttgtgcataggtgttcaataaatgtttgttggcattgttattaataaattcaccaggacaaaaacattataatttagatgttggaatgatattatctctcaaaaaacaaaatgtcaccagattgttttgccttgggagttctcacatctatttttttcttttttgtgtgtgtgagacagggtcttgccttgtcacccacgttggagtgtagtggtttgatcacagctcaactgcagcttccacctcccaggctcaagcgatcctcctgactcaccctctggagtagctgggattataggcacatgctatcatgcctggataatttttttaaagttttttttgtagagatatggtctctctatgttgcccaggctggtctcgaactcctgagctcaagcaatcttcctgccttggcctcccaaagtgtattttttaatatagtggattttattatatgtaaattatatacttcaatttaaaaagtcctatgcctttgggatcatatatagaaaattgtccattttctgagaagggtctctgccttcagtaggcagataaaccctgatcaaacatgcagaatcattaattagggtcatttgttctgctgtgagctgagaagaatgtgtaaaacctgctcaggagagaattaattcatcctcctctctgtactttttctagtactcctagcacgattctctaagcctgcaggcctcatacatatgttctaatgggctaattgttaaggcgacatttgtarattaatctctgacttgagctaagtggtttctcctaatggctttaattcagtgactcccattgtcagattcactggaggagcttgttaaaaagaggtgcccagacttcccctcccccagctcatgatttgctggccctagggtgggatgagggcatctctgctttggaaggaaagctcctcaggtgactggattctggtggtagccacctttgtgagccttggctctgaatctgcctcccaaggccgtgaagcctcacacacccgctgaaagcatatgggcctaattgcagcaactccagtccaggttctagaacaggaaatatttctaagagccagctttcccractcaatcacctctatactcacatcactgaatctgcctttttcctgaagtgctccatcacctgagggggaatagtctatgcttggctgtgctattgtccattttcatgaactttcatgaaccttgtcagacatttgaaagatcttcatggtccaccgggattttcatctagcgagatggctatggacttcccctctctcctccccattttgcaccaggctccttctttgcatcaggtgttagggacagatttttttttttttttttttgagatggagtctcactctgttgcccaggctggagtgcaatggcaccatctcggctaactgcaacctctgcctcccaagttcaagagwttcttctgcctcatcctcctgagtagctgggaatacaggtgagcgccaccatgcctggctaactttttatatttttagtagagacagggtttcaccatattggccaggctggtctcgaactcctgacctcgtgatccccccacctcggcctcccaaagtgctgggattacaggtgtgagccaccatgcccagcccacttttatatttttttattttgctttttttggagacagagtctcacttcgttgtccaggctggagtgtagtggcatactcttggctcactgcaacctctgcctccagggttcaagtgattctcctgtttcaacttccyaagtagctgggactacaggtgtgcaccaccacaactgctaatttttgcattttttggtagagccagggtttcactgtgttggacaggctggtctagaactcctggcctcaagtgatccacctgtcatggcctcccaaagtgctgggattacaggcatgakccactgcaccctgcccttaaaaaaaaatacaccgtgtatgtgtgttcctggcattcttttgtgcaaacacatgtcttgtttgatcttggagttttgaaaatagatgactcaaacaccattgttccaatgacatttatcaaattgcttttgtttttaggaatctggcacaccgagtactcaatatctccacacagtatatgggtgttttcagtaaatctgagaaggtgacaattcatactgtccaagatggctgaggtaatttgttgagctcagactatggcaagtttagcaaccaggacaggctctcaagcaagctagcagaagtgccctaagaggcaatgctcaaattatctgtgtatcacactgctgcccccaagcccttgtgtgggacaatgctttgttacatgcttggttattgtcttattctatgactcagctgctgtagggcagggatgctttgctttctggggtactgtgctttccttggcctcattttaccatgtcccttgggcttctgtcctccttgtccctgaaactatagaagcttgcaaaaggattcccaatggcctcagcccttcgtgaagagatattagagtagtggtactatgtagaaaggaaggacattttgggaaaggagaggatattgagataagggccctactttttctatctttacccagttactaatgatccatctaggcaatagttcattttatattggctaaacctgtactatatgatttatcactaattgcataatagcatgggattaatctacagaagaatgactctataaaaaagagtatattttgccaggtgcagtggctcatgcctgtaatcccaacacttggggaggctgagccaggtggttcacttgaggtcaggagtttgagaccagcctggccaacatggtgaaaccccctctctactaaaaatacaaaaaattagccrggtatggtggcaggcacctgtagtcccagctacttgggaggctgaggcaagataattgcttgaacctgggaggcagaggttgcagtgaactgagatcgcgccactgcactccagcctgggcgacagaacgaggatctgtctaaaaaaaaaaaaaaaagagtatatttcatgactccaagtggcctcccatcttctgtttttcttgggccttatgtataggatatgttaaatacttaggtgactatttggggtgctctataataataccattaccatgcagactaaaatgtaatcattttgtgttttcaaacttagagttctcagacaatggggatttgttagagagatagagaaagagagagactaaactgacacttctaaggtggctttgctaggggcctagagaagacaaktctctgatggggattctattttcatggccacatccaaagtattgatgtgttttctgcagcacctggatctgggctgacaatgtgatcaagcctgacacgataaagaggcatttagcaagtttcaagactacgtgcacagttaccttaatactgagaggcagatcatctccccagggagcatttcatcgtacatcatggggcagtttgcctatcctgtatctcattgagaggaggccttccagctgaatacgtggacccaaatgcatgtccattcaacagagtcttcagggccagggagctgtggaggttatttccctcctggatttcttccctctcttaccctatcagagagatgctgatatttgagttttcatcttcagagggtagcaggattcctggcctcctcctgtcactggctgatttgcttaaataaggaatgcattagtccccatcactgactccaagtggaggcagctggagcaaattaggatcagctacattggccatctggatgctgcgaaatcattgccattgcaggggtcttagattttgagttccttacagaatgatgtagatgccatttgcaagggcttctttccwgtccttttctgcaacagtggctttgggtggcataggcctatatagccagctctgacagatgctcagcattcacagatacacacacagggagccaaatggacagggattagtcttaaatcagctgtttatgaatggagaagaggcccttctcctgggttctggccacaccccttctctttgcagctttttgagaatgaggtcagggccaggatctaactgcttatgcctcagaaatagcagcacagatcaaaattaatcttaagctttttgttttgctgcctcctttagataatagaggaaaaagcgaaggcctgctcatgtttttgtttgcttgtttttgtgtgtacctttgaaaggaacatatgaatgaatatgtgtgatgggaggggttgaggtgaggcagctaagagggattagtgctgggcgggtgataattactgatagactgcagcattcaattggagcatgttttagttgtttttttttttaaatggcagaatgaaataaacctcagtggtgtattgttttagcacctccctttatatggagattttatcagttgctatgaaactgcatattccttttacagtgtccaattgtttttaatggtcattttctgggctgtgcaagccaccattctgccccaggagctccatgcagttttgcaatgctttaaatgagtatctcatgcagatttcattttctgtcagccactttggcacacataaaaaatacaggggtgtgtgtgtgtgtgggtgggtgtaaaagagagagattctgtctctcatacatacacaggcacacgtgcccgcacacacacacacacacacacacacacacacaaagcttgatcatgcttagtctttacataaattgggattcctctctacccaccagccaaggcctgagagatgtcaatagatggacactgaggagactgacttccaatgcccttcagcctgcagtctcttcagggtattagcatacctggaaaggttgacctagcagccaggcattgtgtgtaatggtggtgcttactttttattctcaggcttaattgttggctgaaagcatcttctttatttctgactatcctttatttgcattaatagtctcctctgtgaaagattaaagaaagtagaatgtgtactgaggacagaagtgtcagtgtcagcctaatctgctacatattcattctatggaccttagcatgacaggtatccactgaaggagatgccaaaactgtcttccatccatggagattaattttgagtgaagagtgtaaagtaggacaaggattgtcacataactggcctaatggattgcctaattgacttcctgaactggaactactttcctaaatatttcagaagtgttctaatcatatagatcatacatgcagtgaatatatctttatgtatgtccacacatacacacacggacatwtgtacgagcaaatttrtgatcttcaaattggtatctcttatgtagtgacagaaagtagattagtgtggtctggggcttggaaatgggaaaggggattgatttaacaggcatgagggatcttactgggatgatgaaaatgttctgaaactggattacagtgatgattgcataacttagtagatttactaaagtcattgatgaattgtactttttaaatgggtgaatattgtggtatgtaaattatgcctcaatgaagctgttaaagttgatattcctctattggagttcctgcagatcctagactacatataatattaaaaattgtatcaccctaaattttcacctgcttttttcccactgaagtttatcaactacaattgcagagaagctggacttcgagataacagggtcagataaaaacccagtgccctgagacataaaaggctaccctgacccctattggcaaggagcgaggttgctgcccattgctgtatgaagagccaaacctgaagcagtaatggggggctggggatgagggtgagatttccaagcaggtccccaagggcaatgggcaccgtatttcaaagctgcttcggtatgtgtcaaaaaacccaaacatcctgaggtccaactcttaagtgatggcattctcctcttcttttacaggttgtcttagtctttgctctcagcatcggtgcacttgtaatatacttcatagattcatcaaagtgagtattcaaatatactttcttgccctcgtttcataaacaatcatgagcctttacaytgatccatttatttaccttgacaccaacctttgcaagaccttctgagtgcagaagattttggaggaagctagtgctgtactgtactgattttctaaatgggaaagaaagttctcagaaggaaggctattttgagtctgctggcataggagggtgaggtatatgaggtcaagtcttcttgctgggtattacttatttttaaagagctgtttcctaatgatgtatttgcactgaagatgtcaagtagttaagatgacttgatgggaatttgcaacttctgggagggtgacagtttcccacagatgagggtctgagccattcttgctatggttgtaggatccttttctcaattgggtttccaatgctttgatcttactggaggtcagattagaaagcatgatgctatcctttcacctgccaatcgggtattcagctgaagcattgcacgctggtgcttcttgacttgtgaaggtaaggagatggatggaggagttcatcatgacccccagaggtggaggccctggccatttgaggacttctagagtggacactcatgcagactccttgggtgccagccgaatggactggtgctccagagtgagcctgggtgacagatgataaagaccttgcagaaggatgaagagggcacagactagaactgcaatgttgcagccagttctgccctgattcctgcaggtgccaaccctgaggaaataatttgttccaactatactattgcaaatcatgaagttgatggcatctgggaaacaagctggagtctaactcattttctgttgtggcgtgaacttggcaactctggtgacaatggccttgagcttgttgcctttattgtccactgtgtgagtgttttsaactttaaactctatccctggcatggttggctactagactttgatactaggaaacctgcttggtgtgcctgttggctcagactctggtgtgcctgaattctgagcttagtgctcctttcctgtggcttgggatggtggtaatttcatgcacagctaaactcagaatttctcagagccatctggtcaccggccaaggattttgtgcatttgggtggagaggccaaaatgtcagtcagggaaaacaaagcaaatatctcctttaataacctgtctctgggaatcagccaagtttaagcctatcagaggtccttcagcccaccccacatgcgaggctgggctgccctcacccatctcagatggagagtcctttaaackctgtcaggagacaagattccacatgctccctccatcagctctcccgagccaagaaagagaagagcttgtttaagtttggaagactcccattggcatgtcattgaaggtaagcccccttttaaatatttactgttaatgattctggatcctatttgtattgaactgaagatcctctaaagcccctggtcttatttctccaatctctctccaggggtgttcttacatgtcrtggggtgcagaccctgccaacttccatgctgagactcaggaaagaggtttgggcttgaagcttgtatgtcccagagaaagaaaaccctaatgtggaggtgagtgtgttgatgggttagaagtccagatgcctcagccagcaccttccttcccttttcgtttttttattttttttatttttttaaccttttgtccctctgtatttctcagaaataaaatgctctttagatggatttggattgtgtctttttttacagtctactatgaggcagtcttttgttctgtagatcctggtgttctctgtttccgtgtgagaagatgaaaaggaatgaaattccccaatgcaccctcttcccctaatgtcctacaccatctcaatgtcctttggctttaattgtgatccttctaggccttggcgaagatggcactgggagtcctctctgattctggtttcttttatgaacttgcaaatagtctatcccaaggatggaacttcagtcctgtcctcaccttttcctggcaaaaatgcccataaggttagaaacaaggctattcccattctgcctgaggactgtcgtagcctcatcccagctttagcctttcttctctgttgctaaactgtgtgatttggcatagcaaggctttgtttataagaagaccttctggttatttatatagaaacttttcattttcatgacttcattttgttctgagagcatatccgaagattctgtccggtggcaggcccaatcagtggattcagcacaagggagttttccatcttccttgggaaagacggcaagcaagctcagttttagtttgggagagaattagtgtagaatctctaaagccatctctatggtaagtccatagatttccaggaataaaacacagtgaaacctattaaaaaattataatcgagcttagtgaatgagaaaaaaaaatgaagttctatccacatataagatgcaaatggaaagaaagtgagaaagtagaatgtacattcttaaaatccatgtctttcattcaaaactgttaccagttttacacattcatggtttggctggccatctgggtattttggaaagacagctttaaacttctcgtggaagttatactaaatcatcaccctggaaaaaaagcacccagaattctccagatgaattgtagctagtatttacacccttcaaataaatgaatcaggggacagtctataggctttcccacaagtgaatctaaaccaacagacatgcgtgaaatggcttgtctcagtgaattttagccagagctgcccctcccctccagaatgctgaggactatcctgtagcacaagtttgagattccaggctctctgcacccagccctttgaaaagtgcaaggaatgccgattaatgtataaaacaggctccctaggtctgctggaccagctatgtctcgaggcaggccagctccagttgtgcaagtggacaagcaggctaggtagttattttrcttctgtccattagcaatacagctcagagaaaggtcatcattggtggtttatgatctttttaaccttttaaagctctttttactatccagaggtgatggataagtcacttccaaagacagctgcacacctttcatttttggccattaggcaaagacagatcccagcatagggcgttttctttgggtctgatcttaatgaacctagggtggttgtgagggaagactcatttgtgtagctgcaagtgattactatctggctaagacagattgtcctcagagctcctggaattgaaaaccaaagataattacgttaaaccttactaaaatkatgctttatcatcccagcagtagactctctagaaacacccaagcagaggaagatgcctctggactgagtctttggtcagacatcatgttagtgccttaacaagcacagacaagcattgagccctccacacaccatctccccaaagatctccaattagccacacgaggtggattgtgtacaaaaagctccctttcttttgcattctttttaaaaggactcctgcccaatttatgtcacacgtcactttagttcctaattctgatgtctcccgacaccaacgccaaccctgtcctcccacatattctgatccttgtgaagcaaagattttttagaaattgtacaaccaagtcaagagtgcctgcagacgccctgtgggtgctaatgtcaccattgctgcttccatccttgtctatttcctccctttgacacaagaacagcaattcttatctaacagataaggaaaaaaaacaaagacccaccagtgtcagcatgagagcgagattcatggattgcataatgcagcagtccctgtagctttcagaatttcaagagaaagttggaagagacagaggcccagagctctgggtatttgcattttcaccaggggcattctgggaaaggatgactcacatgtgtgaagatatttattcctttgattcatgtttaaacgctgctacttcttatgctacggttacgcggattatgaatatttaatgtggcgtatactgaaaatgaaggtcaagtcctgctcactggtgacttcaatgcaggctcttgtctctgaaagggaagctacctgctgtttgcagagtaaagctgaaaggttatacgttgttaaatgtttccttaatgactttatctgctccaaaatggctggcacacaatgggggcacttgctgattttgccagtctttgctcttggcttctggtatcagcactgctgttttggggatatggacgttaggaaggagcaggaaatggcagcacaaattttgtagagcatctcatccaagggcacaattgccaaggcaacagtggggttacgattggaaaatgrcctctccccagtcttttaaaatgttacttttgcatccactcacccatttattcattttgtattcatttattagtttgtaacatcttcaaatgtgataatgctgaatattttccaggcagtaaaattgcttatggttaaggaaaactatctttaagattgcgatagaaattgaccagattgttttcatagtctctgaaaataaaactggcaccattgatgtattggggatgtccagagctttagcagaactggtttagttgcccagtagtttctccctcccctgtcttcacatagcctggtctctcatcccttggcctagaaattctgtttcaaaagggaagagagggcaagtcgttggagggaactaacattcactgattatgtactgtctgtgagctacagagctaggcactttaccaaaaatagcacatgcaacckcattgaattcccctaacaacttcttaggataggtattactattcccacttacagatgaggaggctgaagctgcaggcatagcccaagctatgtagctagtaagcagtagagccaggattagattccagcatggctcattctaaagccatctctcttctaagtgtcaagaagtaaatttccagattgtgkaagtaactgatggggtttaatgagatgttgcaagaatgggaagttgcatcacctcatcctgccaatgcactggtcttgttttctcttttgttctccctttctccatttctcaccctgagaaccaagtgtgcagttgtgggtacgtaggaggctcctatcacaggccttccatgtaagacactgccctgggtcaggtgctgtctgatgtctgtttgggccttgattcagttcttcctaataatggcttgatgagaccagcttctctgttatctcagtggagtggcagcattttgcaatgagataggatcaaatgaacaaaaaacaaggagagctgattgttcctcattagcttccaccacctaggggtgtctttccaagtagaaagactctttggccttcctatccttacctaatctgtccttgtgatttggcatactgaaatagatatgagaaatgctgtttccccatgagatacattcttttatctcttttagagagttacagaattagttgatttgttatagttttgcattatgttatgcaatgtttatatgcccagagagttggtattatcaaactaatggacttcaggaaaatttggccccaaagaatggagccacataggatggaggtctttgaaatgtcataaagtatctggcttccttctccagccttgttcaaactgactaggcacaggtgtagacccactgcctctcctgtgctcagccccaagacaggcacctgggagagctgtgaggacagcacagatsccatcccattcatgacagcgcattttaaactgtaaaggactgtgtataccagctttcactatcccctttagtgtaccccatcctgcagcatgatgagatgggcagcctgtgacatggaaaaggaagctcaccagcctactctstaaccagttcctttatgraatacagcctttctaggtagtgttctggaaaattagctccagctstctgccttcatgcccttttttgagaagtcacggcatgcatttaacctttgttgaagaagtcaacacaaatcactgtgtgcaaagcacctccctgtttttttttttccttttaaaatactccccccagttttctccatccctcactgacatttttattgccaggctttggtttggaaaattatgggtagggaaagttcaagggcaggatgttcagaamggcactgcacatctgtgaagggaacacaacaggagagccagcagctgttgaaagaatggaatgtcagatggtagaggagccgagcccactcagggatggtggaagagaagatgccttcagggcaaagaggctgtaaataactccaatgggaagtccttgtctcccttcagaatgtaccctttaatagcaacacttggtgctctgatatgagagtaactctaactcagccttcctagctcatctgaccttccatattgccatttgttcaggaatcgagtgaaagcctggtagagaagacaggtggagagtatgccaaggaacagagtcaacttctttatatgtccttgtctccatataggtagattttggggacaggatctgttctttggttgtcaaacagattggtttcatttacgtcaaagttcagagcattagcacccttcctccttytcccttccacattggtgaggaaatcttgtcttccttgcttatttgtcattgcacaagtggtacctaggcatcgtaggcaatggcatctagaagcattaagggaactgcttatctttggctttcattggggaaatcagggactatgctaggaaaggacaggaggactgagctgaacctttcaggtctgccacaaaagacaactgtagaatatagtattagagtcaaagaggcattggatcccaactggtgccactgttctctgagcctcagcatcctttcctgaggaatgaggatgagggacctcctcaaggtcatccgaccagccaggggcagagctggagctggaagatagaacttttctctcccagtccttttctacttgatctcctgggttctttctactaaatacagaaatgaacaaagacatgataacctactcattgaatagcaaagtatatattgtctttttatgccaattctggacttctaggcccttatcatgggggaaactttagggccatgggaaagaacaaagataatcccaggtggaaaagatcaaatccagccaggtggctgcgtgggattagtttatttcatcctcactggtgagaggccttgaattccttgattttatgaccctcctactaatctctctctctccctccccactgtctccctctcttttttgtactgtttcagcatggagttggggatggrtaagagttaagagttcagctccactgtggaagggtaacacagggctgaacgcattgaagagcygaacacattgttttggcctgtttggaatttgttatgcataacttttgaggacattttgcccaattgctcacttgtttcccctgtggaaacactatctgataactatgtctatacatccctatctactttgccttccaaaattaggatgaattatttcttcccttctcgccactctccaaaacttaaaaagaatgctttggacaacctggcactctctcagccctctcttattctttttaaaagaataattgtttcagggcaaatgaagaaatgcattccctttcagacccactagcccactagttacttctgtcctctacaacaagcctgagtttataccgcaagagggctgcatctcctccctgtcacatggcactgggcctttccctatagtcacaggctgacatgcattcagagactgctgagagatcaggataggagccagctggagcgaaatgttatagctcagaacagtttaatccaaacacaagggcagtgcttgtgcctaacacaactgtggtaggggtgtggtgtggtgtgtggtgtgtggagtggtggcagcttttacagctttatcatggggttcatgggctggaggagatgtgaactcttccttgtcttttaccccttgtcttttgacctgacagcctgacacatgtagctttggggagaccctggttggtgatgagtcatttgtggcttaaaaatagaactctcaaagcaacaatgcccttgggactttttgatgcatatgtctttgttcatagaatttgggagaaaagagagagagggagagaaagactctgtgkgtgtgtgtgtgtgtgtgtgtgtgtgtgtgtgtgtktaggaaacaattatgtcctgcctaaaaattaagtggagaagaagagcatgggggaattggccaccaggctcatcacagtagcagagatgaggctgagagctgtctgtgtacctgtggccttaaaggtaccaatcagataatagctctccactgagtacaaactgtgtataaggcattttgctaggtactggggaattttgagtacttatgtataatgctagatcttttccattaagayatttaaattatacatatttttacaaggggcaggaagtccagccatatataaaggaaaaataagataacaaaacaagaacaagtaaggcatygctaagcaatatatcaatgactaatatgagcattgcacacagtaagtgctgaaggttgaggagttgaaaagatagctggatgctataacatgttttggctgtaggggagattttgagttgaatagacagaaaactcwgtctgccctcaactctaggagtccacaagagaagactctcattatggcctgtactcgggctttgtgattttcagtatacgctaaagtcaagcaaaaccttgccttgaaatcagctactgagattagggattgagaatgcttcagggacggcataaaataatcagagaagcggactctatccagtggcagtaatacctgttgtccaatgatagatgattaaaacttttggaaatttttatttggaaatttccagaagcatctgaatggcatccactccatctttttgaaactgaggtcagtgtgcgacgtgctttgcaggggtcttgttacgaacttgccacatacagagcatcacaggggcatgatggggaggagagtctgcagtaaaatgagcttgtgctgctcgcaaacaggccacagtgtgggcatggttgttggcctgaagaccagcatttgcctccagctccgtgctgtgatttccatggactctaggtacgttggctttgttgagccaattcttccataagaatattaaatattatattttgcrgctgcattggtataagaatgaatataatccaggctggatttattattgttgttattattactattatttttagagacacggtctcactctgtcacccaggctgaagtgtactgacatgatcatagctcactgtaaccttgacctctttggctcaagtgatccttcagtctcagtctcctgagtagttgggattacaggaatgcaccaccatggctggcaaattttttttttttctttgagacagggtctcactctgtttcccagactggagtgcagtggtgcaatcatggctcacaacaacctctgcctccagggctcaagtaatcttcctgccttagctttcmgagtagctgggactacagctgggcaccatcatgcccagctaattaaaaaaaattattgtagagatgggggggtctcactgtgttgcccagactggttttaagctcctgtgctctagcartcctcccacctcagcttcccaaagtgttggcattgcaggcgtgagccactgtgcccagcctggattcgttgttattattcgtcatttattattatatttattttcttctgattttaaagaagttaaaatttagacttttttgtgtcccataagtacagtggcctcaggcactgtgcctgcactgcctgctggagaaattgactttatttctccctttccaacagccccatccttctggaaattttcacagataagaaaacatgctcagagacagatgccttatactaaaccccttcaatgtggtctaattgtttcaaatgagaaaattaaaataagcattttattttaagccctgtctgataacttggctttgggaaataggaacttcagcaacccagcattcaaaacaatggatacaacaaaaattttaagacaacttaatagtcttgcttttctcccgagttttggaaaaacatgtgccttttccattcttttatctgacaatgagtcttactggtttaagagatctgttcgctgagagtgcaacagtacaaaataacatttttttcatctgatgtttgcaaattcatctggacagggaagggcagacattggaaatgagtgaggcggatctggtgaggactgcaatgagagctgaagcctcacctgaagtggcttcccaggtccagctgattgttcctatgcagaaatgcaggctctagtggccagatcttcctgtgtttcaaagaggagacagaatactgcattttatgttgaatctccaattttaaaatattggcctcaaatccaaaactcttaaagtacttgcaggccaagcaaaacacctctgcaggccagatttgggcctcctgttttcagcctctattctaaactgtctctctttctggtcttgaattggctgtgctccctgagtgccaggaaacgttcttaacccttgctcctccatctgccaaaaaggaccccttctctctctaagatgggaagcctttggtctcagggtgccccgggtcgtttgccatctaacacattttcaaacactgcttaaatttccatttttctcgaggcaaatactgtatgccacaccaataaatcatctacagcttactgtaagccccagagctacatatcactaactctacatcatctctgaaaataacgtygttagaagctcataaacatacactctgtttgtttaagaactgcaagagcttttaaaacatggttgctaagtcacagggcatattttccaggacataaatggaagtgaacatatgccccttaaattgtcagattctttttttataagaagagaggcccaaatctgtctgttctgccaggatattaacttgaccaaagaagagttgattatactaagtgtrtaagtgttagtaattattggaaactatcctctgacttacttagctaaatgggcacattgtatgaaacttgatttagtttctagcatatgtaggtataaggtacaggttgacatggataaatcctggctttagttttcatgaaccctraagttcacaatttgctgaactttgtatttaatatttactgatgaaattcttayggtgtcgtcccttccaaaacaaaatcggaggcatacttagacttttcccctgagacatggtcccaagtctaggctacaacttcatcactgaccctttttcatggaaatttggcagttagtgataggtagcgtctgagcttatagctcagatattttcaaagtaggaagtagatggccctattaatatcaactgccatttcagtagagctgcctcatcagtctcttttccccgtggaagacactcacaccaccttttacctatcaggacactctcaggaagaaatagtaggtagggctccaggacctctgatggtggaatctactagaakgcagttgtccttaacaaggatacctatctcatgttgctcatcrcacccatgcagagacctgccaccttgtaatttgagagctggaatttccatacacccgctaccctcactccatgccagaaaatgcagaaaatgaacccatggcccagtttgagatacaattgatcttgaggccccagagagaactgcagggacagtgtgcagagaaggtgaaaataacgtggatgctattagatgactgtacctagcatgtgcttttcctctagcagtgggaggaagtggcacaggagtgcattaaggagtttgccctcttcataakarcatgagtagaaataataaggcaaggcctttaaagaacagcattaataattgaaaggtgctccaggcagccatgtggtcttccagtgcctttgagtacaatctgttatcaggtacgaggtgaggctgaggagtagacaaggagggtgcatttggcggctgtgtctgtgtgcatgcatgtgcttatgcttggaggaagtatgaataagatttggcagctacagcaagtaaaattatagaaggcaatgtatgtatattaccatgtagactggtggtggttcttttgtgggtcaaacacccatttgggaattggatgaaagctgcaaaaattttgcctgccaggtaccctatagttggtcaatgaaacccaaactaaggatttctattctcttaagatggattcatctgctcattcactcctgtttcttctgccatgaagatcaggtgactgccagagggccatcttcaaacccgaaggttaagcagaggttgactgggaacttttccctgcatgacatacaaaacatgtctaagtgaaagtctctgctgtgttttcccttcttgatcaagtgtcccttaacctgcaatgcattcaaaatctcaacaatgacagktgatgctaaggaaactctgggagggaggccctgggcttcctacctcttcctccaataacagacaacactaaaaggggtaggtaagacaagatgcatctattaggccaagcctaagagctctttgatttgcttctcttgtgtattgtgggttagcacttgtttgtagaggacaaattcctctttaggcaatgattccaggatgcaaacaatctccagccaaaatcattccacccgagacccactgctgttgcaccaggaactagggaccactgggkacccaaacagatgcaaaagctgccacttctgtacaaggccgtatttctcaccctccatyggagaggaagaggtgagtgtagagagtcgccagggatctctatgggctcatccaatcagtcttcagaccagtttgacagaaaacagaagaggagcttcagcacaaggaggcctcatctcatctgaattcccagcttccttcagatttcttcctgacctcacctgcctccaagccagccgactgtgacagtttaattggtgcagggaaggcgaggcagtggggaggcaggcaggggtgcctggcattctggaaggagactctcctgagatgagtgaggggaaccgcaacagacaggcctgagagcgctgccttcgggtagaaggtcacagagctttgcttgaaaagaatgctggctgaagaggaaacattgcsaactccctcctctttgagcccactgggccagaattgtatattcatatttgtcatctgtgccctttccactctggggcaaaaaggtctgctgggcagctctggcggggaatgaaaatgggtgggaatgtagctgggcagggtggctcacatgaggtaagaggatcacttgagcccaggagttcaagaccagcctgggcaatgtagtgaggccctggaaaatgttttaaagattagctggtcatggtggtatgtgcctatagtctcagctactcaagagcctgaggtgggagcatgrcttcagcacaggagtttgaggcagaagtgagccctggttgcaccactgtgttccagcctgagkgacagagtgagaccctgtctttaaaaaaacaattttgcaaaaagaaagtggggaggaaggagcctagtggtgaacaccagggtttggaatcagaccagaccttcttggcttacttggctctactactttgtagctgtcctgggcaagccagttaacctttccaagctatgaagtctttcctttgtcacatggggtgaaagtggtgatgagagatgtcatagtggataatacctacctgatagtagtgtgtggaaacaattagacactgcatggaaaggctcttagtacagtgcccagcttgaacatgaccaaaaaaagtattagatattattrgtattgttctttttgaggtctgttttgaaacttttaatcaggtcttgagagagatgagatataaacacagtgaagttaagaaacaaaataagatgtattgtaaggcagtaaagagatcggttatcagaataatggacgagacctgtgcttctgaaaactgcaatctcaactcattcatggtttgtgaaaggaaaaacaagcatttaaaaaagatgacayagctgggcatggtggcttktacctataatcccagctactcaggaggctgagtcaagagtatggcttgaggccaagagtttgagatcagcctgggaaacagagtgggaccttgtctctaaaagtacatacataaataaataaaacatgagattgatcagcccaagatggaaatatagctagagaagttcaatttgattttatgaaacttttgtttccattacatatatagatctatgtactgtataaatgtatatatactgtataaacgtatgtatactgtataaatgtactgatttgtgacgtaaactctgtttcttactgtggaatttgctaaaaagcgtttaagaaacactagcttttagtgtagaagccagcatacttgctggttgcagtaatccagggaactttaaggaaggayggcaggctagagttgggtcccaaggcatgggtagaatttggatgctgcagaagaggggcatggggtgagcagtccccaagaccatcctccctctgacatcaactgcaggtttggcacgttccccaagtcaccttcaggttcgataatgcataggactgcagagctcactgaaggctattatactcacggttacaatttattacagggaaaagatacagattaaaatcaaccaaaggacaaagtacataggccagagtctgggaaagatccaaatatggtgctttcattatctcctccaygtggagtcrtggatcgtgttacctcccagcatcaatgtgtgactacaygcaaggagtactgtcaatcragaaagttcgcccgggcctcggagttcaaagtttttactgggactggatcatgtaaacttgaatgactgccctcatggccagcctcagtcccctgctcccctggaggtggatggataccatgtaacccaaagcctccatcataaatgacattgttagactttctggcatggtcagcccctacccaaaataacactgttactatctggccagcccaagacccctggaaaagacacttttatcaggcatgacactccaagggcttagacattgcctcccagaagctcaggacaaggccaggcctctctttgggcaaagttaatgtctttacaaaaatagtcagtgaagggactttgttggctggaggagaggyctctcttgaggaaggctggaagtgggtcctttgatcacttgcatgaatagcagaggagaggaaaatgctactccatgaagtggatgcttccagattctactaatgtcaacaaaatccctgttgaaaacgaagcgatttattccttcccttggctcctctgcatacccgggctgaataacctgttagccagtaaggggraaatgaggcacaggaaagaggaaaggggtcagcctggatgtatgcttgccatgtgggtgagtgaccttgggcataatggacctttggttagatctcatttgctgccacctccgggtgaccaggacttttcctgtgccttgtttctttgcagacctgatgaatggtcctctgtgtgcccgtgacaactttagtaaggagaatatctgtctccctgctccaatttaacttcctttctgtaaaacttgatgaggtcaaagccagaaagcactgaaacttcaagctggggatcaaaagcatgtcatccagccatgctgcccccttgcaacctggcaaatgagacaacctccagccagggacagtttataattgtgcaatcaaattaacttggatttcagcctaatgaagtccttaatgccctgaatgaggccaagccctaatatttagagaagcagactggaccccaggaaagaaaagaacaggcttcagttaatgcctgctagtattaattatgcttcttccaaaattcatcttctcgtaggaggcaacctgatagcacccagttctgctaaggggttttcctgctgtggctcataargagaacagtggaaagaacattttattggaaatctctrctgaactctgcgttctgggccacatttcttaacttcacaggatcttagctttctcagttgaacaggaagaaaattcctcctctcttagaagtgttttattgtagttaaaaatcaatactctgaaggcaggtaggcttggttgcaaatcccaactctgtcatttgttagctatgtgamcttgagtgagaaattaacctctctgaggcttagttcccttaactgtaagtatggttaatgatattcttggttgttagtatggagaatagtgaatgagatactgtgcatcaarcacttaatacagcacataggacatgctggcatttattaaatctaatgatgatgatggcataaatgtaaaataattttcagtatggattacatgtcactaatttggtatcagtagtctttattttcattaagccaatgatttagctcttgtttagaaaattgctgctgattccgtaattaactcaataaatatttattgaatggctattatgtgcctgacactattttaagccctaagcacttacattccagtatcagaaagagacagaccgtaaacaagttgacaagtaaataagataaattcagttgatgccatgtgctgggaagaaaataaaactggtaatggaaaaagcagggtttcttaaatgttttgtgctgaggacttctttggcagtctggtgaagactatgacccctttctcagaaaaatattatttataaaggcataatataaaaacattggattataagaaaatagattatgttraaatcagttatcagattataaaaaacaaattatgataaagtctgcttgcttcttgattagggcatttttatgaagatccagcaataattctaatataccaccatcattttaaagtaggattaatataagtaatactttgagatacctgtaacaattgtaatcttatatgtaaatatctgagatttctgttgctaaaaaaagttacaagtgtcattaatactgttctaatttattgtagaacacctgattctgtcactgttcggggtgccacttgtaacctgccatgatccctggtggactgaacaaagkggggctaactggggaataaaagtcaaagacaagagagtatatttggaagaaggggttgggggcacctcgcctctagtggacaagggccctgagctgtttcggtcctccgaatttattaggtaaaagagataacgagaaaggggcaggtggttgtcggccagcagtttgawtcacagcaggcttgcaagactgcattcttcaaacaataggcactagatttcccagtagataactttaaggagcccagcaaacctcctggcccttagcaaacctcctggaggcatgcgcagtcctgagtttgctcacattctgcattcacgataaacagtttgctgtttgatcatatagcctccagtggaatgctgagttggtcatgtcccatgggcctttggctccctacagtttattgctatattcataattaaaggaaatgccaaatttgaattagaggttaataaaaataaagatgtaatttttttggtccaaatcatggactccctgagtactgcacaaggacctcttggaagtatatggccccaagtgaagaatccttgggatagagaatgacttgtattgggcattaggctattactttagaaagagtaataatgcaatttccacttttaaacagtcattctggacatatagatcagtggaatagaattgagagtccagaaatacatccagtttttatagtcaactaatttttgagaataataccaagaccatttaatgaggaaagaatagtttttccaattaatgatgctgtccagtgtgggcaacatagtgagactctgtctctacaaatttcttttttaaacattagccaggtatggtggcacacgcttgtgaacccagctacttgagaggctgagatgagaggatcacttgagcctgagaggtggaggctgcagtgagttgtgattgtgccactgcactccagtctgggtgacagagtgagaccctgtctcaaaaaaaaaaaaaaaaatggtgctgggataactagataggcacatgcaaaataataaaattggactcttcacatcaattaactcaaaatagatcaaagatctacatgtgagagcaaaaacatttaaacttttaggagagaagacggggtagacctttgtgacattggatttagccatgaattcttaaatatgataccaaacacaaaagcaacaaaagaaaaagtagataaattggacctcatcaaaattaaaaacatttgtgtttcaatggaaggacattacaaagaaagtgaaatgacagcccagtttaaaaatggtcagtttatgaatacatctctctctaaagaagatatacaaatagtcaagaagcacatgaaaagatgttcaacaccttagtcatcagagaaatgcaaatcaaaaccatggtgagataccactttacacccatttggatggctatacttgaaaagacagatcataacaagtgttgacaaggatatggataaattgcaacccttgtggctgctsgtggggatgatgtagaatggtgctgtagctttggaaaacagcctggcaattcctgaaaaactgaaagacagagctaccatgacatgtacattccactcctaggtatttacccaacagaaatgaaaatacatgtccacacaaaacttgcgcttgaacattcataacagcgaaacaatctaaatgcccatcaacagatgactggattaacaaaatgtgatgtgcttatgcagtggaataccatttggctataaaaaggaatggagaactgaaacatgccacaacatatgtgtaccttgaaagcattatgctaagtggaagaaactagtcacaaaagatcacacagtatatgacttcacttgtgtaaaatgtcaagaataggcaaatatatagagtcagagaatagattactgactccttgcttgtggggagattgggggttgatagctgaaggctacagggcttctttttgaggtgatgaaagtgttttaaaattgattgtcccattgaattttaaacctcaaatgggtgaattgtatggtgtagaaactagaactcaataaagccattagcaaataatgactgtgatgtggagaatagagttcagggaaagacaaaagcaaggaaaatatttgggaggcagttttyttaggtctcaactgagaggatgctgccttgggagaggtccgaggccrttggggtgtgagcacatgctggaggcgtcacagacagagcagctgtttagttgaaaatggagaggaatcaagagtgactcttaggttgttgaccataacaggtattttcctcctagaaaagctgagcttcagttacaatctgcagaaatgctgggaggattagtggcaaacctaaaaaaaagaaaaacactagaagcttatcggagagttggtttgcaaagtttcactatcaatttcattgtaccttttagcagggaaaaatattcatcatacatgcacacaaatttacacacaacttcacatcttgaaaagcaacaatataaaactcacacgctttagaaagccaagccagggaagaaagaatgaaccccctgccttgtgacttctcatgctgatactcaatttgttcagtggaaacggatcagtgagtagagcaagtaggaaagaatctcttcaagaacttatgtatcttcgacatgtccatcacacataattttctcctagtcacatgtacaaatgataaaggagaggaaaatgtcatttcagggccttgagtatcacaggattttgataatgttagcaaaataatgggtaaaataactgatttctcaattaaagcccaagctaagtaacttgtcagcccaggtgtgttaaaatctgagttactctaggtccttctctagagacagtgtggcttcggtaatgagcaagctctggaaattaaagaagtaatcagatgttgattgaggttatctgcttcacttcaagcagaagcaaatcaagtggacttcccttgaagacagaaatttctctattgatagagctaagggtgtttcatgatgctgaattctttgtggctccttttcacataaaagtaggaagccattttccctggagtggaagggaggatgacttcccaggaatatgagctttgagccaaagaggcaggaactgggaggctctcagttacacttgagaaagaattatttctctcaatattgttcttcttttcctccagagccccagtgtgagcctgggtgcaagctctgataaattaattgacagagggttgayttctaaccccaacttcaccggcaaactttagctatgtaattccgcactggacagactgacagctcattttcctcatccacaaagaatgcagtgcaatagagaacttgtgaaatatcttctaactttaccactcttttgttttcttaatcctggcaaaattcacagagcataaaagtaactattagccattttaatgtgtacgatacagtggtgattcgtaccttcacaatgttatgcaaccatcacttctatttagtcaagacatttctgtaaacccaaaaggaaaccccatactcatcagagtcactccccattcctctgtcctcctaggccctgacaaccactgatctgctttctgtctctatggatttacctcttctagatgtttcatctaaatggaatcatatatttgcgacctttgtgtctggcttccttcattgacataatgctttcaaggttcatccacgttgtagcacgtatcagtacttaattccctttgatggctgaataatattccattttatgtctgccacacattttgtttatccattcatttgtcaatgaacatgtagattgtttctaccttttggctattgtgaataatgctccaataaacagttgtgcacaagtatctgtttgaattcctgttttcaattcttatatgcataggagtggaattgcagggtcatttaggaattcaatgtttagctttttgatgaatcactaaactrttttccacaatggctgtaccattttacatttccaccaacaacatgcgggggttgcaatttgtccacatcctcgccaacttattttgtttttgtttgtttgctttgtgtgtgtgtacatatatatatatatatagccactactcccttggttcgtctcagggagtatgctccacctacagcggcagcttcagggatggccagcagcacaatgtgggaagagcacaggctttggactcagaccgaggtggggttcaaatccagatctccctcttcccaggaaggtagccttgggcaggtgataatctctgcaaatcttggtttctccatccatacaacagcaataatatactggggtgaagagatgagtgaagctcctggcacatgcctggcagacagtaggctgaacaaatgctcttcctcctcaattatggatagaaacagagaggaagagatggattttaaacaatctgcttttaaattattgttactactatttttggtattggacctcattatagaaagttttttttttttttttttttgccatgggcttctctgcaaaatcatgcctgattaaattaatacccaaattgcaatatgtttattctttagmccagtttatggggttaagggagatggatctgcatggtaaattgggaagatttactgagctaaccattgaactagagattcccaggtggatgacccacctttgtttgcttttccatcgtgtccatatttcagggtggacttgaagtagtcattgttcctcaagttccttcaagaacatggmcttcttattcatcctagaaaacaaaaacctcttggccacaaactgctttgttagttttgtatacactgtgttacttgtgatggaagcacacattccctatgtaaaacttcagccacatctttcaaataacactaacaagttccagtgatgtcgtattcatgctgaattattcttttcttggtcccaagcaaagtaggttttcacgtagtgagtgctgaggatacctccccttagggttggcgcccatggtagtgagggctttggaccaatgccacatgactacaggtggctcaagctggaatttctgttcactgaatgtggtgaataatgagggagggaaagagcaaagcagtagccgggagagtgtttacactcagtgccccagttagctcagagcatggtaggccaagaagacacttgggcaggctcataattttatgtgccttcaaattgatatttgttaygtaagtattcaatatttatttagcagagaaactaacctttgtgttggggaagcggaggaggaagaaaactgttgtagaggtggctcagggaccctggcaagcctctttagcagttcagagactctttgtttatctctgatcttgtccttatgggagctttacctcctcacacctggctttttatagtgctcttctcgatcatgtatagtgagtgctcaccctgaaaatctcatttttccatcttgttacttttccagtgatctcctggggactttatagattggctaccaggaaaccgagtggttggcttaccccctaattcatctctggctgagagttttctaaaagatattttaaattaggccgggtgtggtggctcacgcctgtratcccagcactttgggaggccgaggcaagtggatcacctgaggtcaggagttcgaaaccagcctggccaacatggtgaaaccccrtctctacgaaaaatataaaaattagccrggcgtggtggcacgtgcctgtaatcccagctactcaggaggctgaagcaggagaatcacttgaaccctggaggtggaggttccagtgagccaagattgcgccactgcactccagtctgggcgacaagaacaaaactccgtctcaaaaaaaaaaaaaaaaattaaattaaatgcttgctttttggcaggcgctgtggcccttgtaagtatcacctcatttaatcctcataacatcttacagggtaggtagcagtattacccccttcttacagatgagaagaccaaggcacagagaggctaaagtatcttgcttaaagtgacagctgggaagtggcagaagtactcccaaatggctaatagaaattagccattttatgtgaacaattcagttcaaatggagcattttatcccagaactttaccgttaatgcctgcatttggcttgggcaaaatagcataacacttctttccaaaatagtcaggatttcagacccctgataatgacagagaaatgaaagcagtttgaggacagttttatcttaaagcatcatatgtgctaaacctggtgatttatttctgagttaagattggtataataatgaagtactaatgaagtactaatatccataatataaatatttctgggaactggtgggagctacccatctacaaaggtggttctgttttatttggttcccaggragtatagcattgatgtcataatttgcatctggcagtaccttctgwgtcactggttaatgccaaaacatgagaatgatggagccctgaaattcattagcttcttctggggcttggtgaacctcaaaaccagaacctgggtttaatcagacattcagtaaggaaagtgatcaattgcttttcctatctgtaactaattgtatttttaaaaaagcagggaacttaatggggaaaaattttccctcttctgcttttctccatgagcctcaaattgctagatattctgtttccagggtgttgatgtcagtggaaatggcatgcacagaatcattatctactatgccacaagctccatgctatggtctggcaaagaaaagactgccccaggcaaaggggaagtcagcttatataaaaaagcaataagcttttccttaattgctccctaagaaggaggattctggcatttaagatgagctaaaagtacaaaaagaacatgttttgtaatgaaggaggcacacctccctcaaagacccctacaactactcttctggtttttggctattagtaaaatagagactgaacaatctcccattgtgcactcaggagtatgtggctgtcccggtagccccctcctcttttacctgaagcccctcagagcagttatgattgattccacttctcttctgaaagcatcaagtcctgggctgggcaaaggaaagatgaatgactcccatggctctgttgtagattacttagtgccagttgtcagttcttttctccctgggaagggtttgaaatgagattgttttcgacaggctatccatgataaatgattttccgagtaagaaattgctttcactgctgaacttcaccaaatcactctgacaaatgtttgtggctgcagggggccttctcgtggctgtctcatgcttgaggggtgggaggctgggatctcaaaccaggatggctcaaataggacgtctcccagtgaagacagaaagagacaggaatgtcgtctcgttaatgtgcatttggtcagctcctttcaactgctgctaaaaatcaacaagtgagrcccaaaatattccagatccaagaaaaataggtaggctaaagggatgtatacatctcttagttctgattattacattgttttcatgttggttataaatagaacagcaatatgtacctacagcaagggcaagaaccctcccagcaatgttgcaatgtttgcaacctgttattagtccatgacccttcctgaaaaatcataaaagcagcatgccctcttttaatattatttggcatttcaaaagagattaaataccatgtctaaaatcacaaaggactgttagaatttgccttttccagctgcataaagtcccccttcctcccctagattctgggagaatagggccttctgcaatcacagacacatgtcacttggcaacaggggcccccagggcattgacgggaagatgcctcctaagcttggatctgcggcctttgtgggtagcatcattggattgtttactcagag[450 bp omitted]ggggagtcccctggggcaggtggagaaagatgagtcatgtttcacctctccacctgttcttgctgaaatgataccccatctttctagtagttcctgcctttgtttagacacacagatggccagactgaagcccaagaggaaatggatgtgctcaagacaacccagttggtgagcttcaatgccagtcttttttgctgtaatgcccagtctcccctggccattctcacattgctcagtttctctctggccagtgtgcctgcccgttgacattctgccctctttcagaacattgcaggggaggagtctgtaaggtaaccatcaccaagtcaagctgtatatagtccagcattgccaactggattcgctttattcattcactcataaaacattttgagccttttctgcaccatgctctgtgctgggtgctgggaccatagaagtaaacagaaaaagtttcccaccttcaaggggctcctggtctcacatggtatctgacaagtgggagcagcggcgccaacaacagcatgggaagtatgttgagtgcttactattctagtccacgttctaagcattttctttatattagctcttctgagccttacccaagtctgtgagatgggtgctgtcatcatcgacatttgatggatgaggacattagggtgcagattaactaagtagctcccacagagtcacatagggaatgggtgacacctccaagatctgaatcccagaaactctggctttggggatagatgctctgagttggcactgcaatgggagtgagtcaagggcagggatggtcagcacttcagcagggtaaggaagagctgccggaaggagctggtgcctgagtggggtcctgagtgttcccaaggtgtcctggttttcagttttggtgagaagcagcctggctttcctgagctctgggctgggtctttgggagctgggattgtcctgcagcccctttcttgtagtgtaaagactgtcatagaaaaggcaagttcatcagggtcctgcctttgcatccagggggcttgagagctatactgaaaagaggagaagatgtgaaatccacgtgctcagctccatcctcaaaactccacttctaaagtcactcatttgggactgaaagttttttagaaactgttcagaaggaatgtggctcctctcccagtctggggctatgggccatgggcctaggtcacaccttgctgatcaggacagaaactggaataaatgactctctattttgggagcagacacatgtaaggctaattaggtctgctgaaccccaggtgtatcagggtctgtggaactgtaccatcccagatagggagcaaatatggcaaagtgagaaggcagaagcagcagttgagaatggctgactcatgggcagcacctcttccctggcctgacttcagcagggggcagatggcagaggcgtggcagagcaagcaatctgagccctcctgtagctgctgggtccatgctggaagaggctcctctgttctggaacttctctcgtggcagttggatattttaagtcatgaaggcttccatatacttagcagatctctgactcattgggctgtttgattccttgcgtgaaccagtaccaccaagacttcacttttgtcttcacttcgtccatgacctctaccagatccargcacaccctccttgaaactgtgctatctgcaaccgtgcggtgtaaagaagtcatctgtggttagaggacagtgccccacaattgaggaaggaaaaaaggcatgccaatcagagagggcaaaacactcacatttgagaaaatgaacttgtgttctagtaagctccatcgctctgaccctcccggcttctgagttttctgtcaccatgtctgtctgtatgtccaatcaagactgtatcccatcttggatgtcatgggattctcattttttattcattctagatacactctgattattctgcactttcttttcaacttgtttgggggacaaacagcttttatagctggggagtgaggttgataataaagactttaaagacaaaaatacagatgtgcaggttaactgagcaggaccaagatgagcaggtggctgggttaatgtcatctgaaaagccaatacactgtgtgtcacaacatggtctgagcaaaaactacaaccactatgaatggcttccaaattaaaattctttttttttttttctgagatggaaacttgctctgtcacccagagctggagtgcaatggcatgatctcagcgcactgcaacccctgcctcccgggttcaagcaattctcctgcctcagcctcccgagtagctgggactacaggtgcctgccaccatgcccggttaagtttttgtatttttagtagagacggggtttcaccatgttggccaggctggtctcgaactcctgaccttgtgatctgcctgcctcagcctcccaaagtgctgagattacatgtgtgagctaccacgcccagccccaaattaaaattctttatagccaaagagaaatgatataatgatttcaatgcagttaaactctgcagtagcatgccccacaatacaatcataatataaaatcagatatgtagagaatggcaatcagcttcaatcctctgcctgtctcagataataaagctaaagttcttttttctgggagtgaggcaaccttgccatgagaaatagaaatgcaaaggtggggtcctcttggcctgcgttctgttggcctgttctctggaatcaggaatctagccsatacaacaggagcagattaatcgacttcaggatgtttttgaagtcattgatgctgttctggaagtcccaacagccaaaggatctagaagcctctaattgatatttaccccagagcagcgaactgacccaggtagaacctgaaaatattgggatcttgcagaaggactgcagacatctggctatgcgggcttcctgaggtcatttcagtgcccttactgtggtgcaacttcacattgtacatgattgaaatgtttaggctttgcttatcacattatgttgggagtagtaggtagagacagtaggagaatagagggttagaggcttattttaaatcagattgggcatgtcactataagatctataaaaaggtttataatctaatatgatgctcataaagagtgctcttccaatctgattcttatggatttcccaggggtgatcccaatctgattgtctttgtagtacagtgaccttcatctttagcaaagccagaaatgcagttcccaaagatgggagagcagcgtctctactcctgagcctagatctgcctttttttctctctcttgtagggaggattttcattttgccctttctatgtacaaatgctttgtgctttctcgtattattttgtatagtcacccaataatcctgtactgaaggagttatgatcaccattttacagatgatgaaataggctcagagaatttgacatttgtctaaattcatgcagctcgtaagtgacagagctgggatttgaacctgcatctgtctggctcctaagcctgggctgtctcactctgcatcataaatattccttgtgatgcagtgtttaggtgggtacagtctagtcctttaatgcttaatgctgttttagggggttggggagaacatagactttcttgagaatttgatgaaaattggacctcttgggtgggcagggagccaggaagtaccctaccctcacaattttttgtttgtttttaatttttaatttttgcgggtatatagcaagtgtatatatctgtggcatacatgacctgttttgatacaggcacttattatgtaataatcacatcatggagaatggggtatccatcccctagagcacttatcgtttgtgttgcaaacaatccaattacactcttgcagttaattttaaaaggtacaattaagttactattgactatagtcaccctcttgtgctatcaaatagtaggtcttattcattctttctgattttttttgcacccacccccacaattttgcatataatttcagctagctcatggggtccctgaagcgcatctatggattatttaggcstagggcagtccttggatcycaggttaagctaattagggtcttgggaagattcrttaaatttttttagagaaaaagcttgagtgattagaaggtcatttccagaaatttccttttggctcttcaggaataaagagactgggtgaggagagaggaggatggtgaggggaagaggaactggatggaagacatgaagaaattagcaagcagtaaaagcaatttgcatttgtgaataattaaggttgttaagaccctacggacttggctaacgcaccattcactagcagtttcttttcaggttaaaattaattggagtgttggtttatttatcttttcccttggtgaatcaaatgactcatcctgatttataaaccttccacctatccactctctattaagacctgtgggggctagcgattgataattttattgagttccccagggacattatttgtagaacccagttgctaatggttaggtcagtgaccgctagagacatctcagaaccccagaagctctggtttctatgaaaagagaaaacagccccaacagttggatgtcacttatatcttgaggcagactttttttagcagaaactggaatatatggctaagggggtaaaaaggaccagatccaagagcttggggatttttagatttcaaaactagatagtttcaaactccccaggaaaggaagagagggctactaaaacaatctcctccccttttgtctagaaaagaccccttgaaaccactattagaatggcccctttgtatgcacaaaaacgacccagattttcttcttatcacttatctgctctcctagaagttttaaaatctcctgacatttaaaaaataaatgacaaggaaatgtttttcccagcctagctctgagaaaggcagtacatccatcccagaccctgctgccagccgttggagccactgcagaggaaatctgaccccatgaacatctaagcaggccgcagagcacatggctgcccctgtggctctagattctgaccacatggagtagactcaaactccagccttaaccagtggtgtgactttgagcaaatcagcctagcagtaaaagcacagctttggtgtcaagctgcccaagttcaagttctgcctaattactcaccagctaagtgatcttatttcacctcttccctgtgcctcagtttcttcatttgtaatatgaagacaacataaatagtaacacaaaaagggtgttatgaggattaattgagtcaacagataaaaacactcagaacagtgcctggtatgtgtagtgggctagaagggcacccttcatgaattttagttattattattatttaagctctctaagtttcaaggtctccacttgtrgaatggagctgataatggggattttatgaggataatgagaagatacacttaagttcttagaaaacaatgccactgggcagagcatgactgctcagccagtgttcggcaatcatgagttaccatgttagtgatgagaaacaaaccagtagtcttcttacagttcctatatggattaagacttgaggttgctaaattagccaggtgtggtggtgggtgcctgtagtcccagctacttgggaggctgaggcaagagaattgcttgaacccgggaggcagagcttgcagtgagccaagatcgcgccactgcactccagcctgggcgacagagcaaaactccatctcaaaaacaaaacaaaacaaaacgaacaacaacaacaaaggacatttgaggtttctgagaaatcatatggtgggtggagactttaaaacactgatctttctttactttctgtaccctcataatctttggcactaactgcagctgctgggtttagggctcagggaaaagccaccacccctcttagaacccaagaccccaggctggtatggatatggaatgtacacgtctctcttcttccccactccgctagtttaagcagagtgagcctgagtgcctgagtcctatgtctattaactttttgttgtcagctccactggtaatagtgcttcaaagaaatgaacgtcttaggatccttcttagaagcatgtcgtcacgattgtattaagctgatggaaagcagaacaataacaacaacaacaaaaacaacattcctttctaagccctgtggtctaaagggtaaagtgaatttattaagcatgtctgtgaagcaaaagctctggaggcatsgctgctgtgctgattctctgggaaagtggtgatatggagtcatatttgtcactagacgaaatgaaccaggagggcacttcaagaacagaggatctgaaagaatttgggctagctctaaaaaatttattaaataataaaaaaaataaggccaggcgcagtagcttatgcctgtaatcccagcactttgggaggccgaggcgggcagatcacttgaggccaacagtttgagatcagcctggccaacatgatgaaatcccatctctacccaaaaaacaaaaattagccggatatggtggcgtgcacctgtgatcccagctacttgtgaggctgaggcaggagaatcacttgaacccaggaagcggaggttgcagtgagccgagattgcaccactgcactccagcctggtcgatggagtgagactctgtctcaataaataaataaatcagtaaataaataaatccaacagtctcatatattttgaaatgagaccacattaaagaaaggatgctcttgggatcatggatatttgcgggctctacatgggattgggtgagtcgtgtggtggtgacccttagctcagaggagacttctactggggtgcaagtgaaaatgcctgcaggagccaggctggatgcaaggcttaagaagtagtggggaccaggagacacgtcttcaggagcatctacccagctccagtgagttattccccagtgggaatatggagcatgtcttgcagatcttttattcattcaagtaattctgcaaatccattttaagaaatgtaacacttgatttttaaaacctgtatggttttaaatggtttaaatggtttaaatggtttaaayggcctgtatgggtggccattttgtaacctttggctatggaagaccagggagctagtgacgttgtaatttgcaaggaggccatgggagtcatttggaaatggagtgctggactccttcaacttctccctccctctcaactgtcaagagagaagggttcagggcttttggttacccaggggagatacttatctcctctgaacttccccacccacgcaaataatctccttcaatagtggtcctagaattccatccctgagaaggatcttctcaaccctcccattatgttgagatatatatttaaagtattatggaaatggctattataaatggcatagatagtttatatttttaagcctttgtaaagcattttggtctcatgacattcctgcacatcaagaatccctggtggttatcgaacttttatgtgcaggtaggctccccttgagaagaataacaagtaaattcaaaagagaggctgagaatcaactattctcagcacaaataaatttttctgattacaaaagtttccatcacaatgcttttgttgaatttatgatagggtttagttcataaatcaatttgatctacacataattttcaagaaagcatctgcagcataaattgaggtgcaactgcacttcataccactttttttctccttttgtttctcattttccactttgttctgtctgtgtcatctgtaagtatctccatgttttcattcggcagctcctggagacttcatggcaaaccaacatattgaatgcaggaaattccagggtggccaagaatattctccagaaatgtactgtaattcctattcctttaatacataccagttgatgttgggagaagttggccatgtgagaagtaaggcctgagatgatgggattgatgggcatctacatctctaaagctgacagaggaaacatttggcttagaaaaaaatttagtttttttttgtttgtttgtttagtttctttttttttttttgagacagagtcacccaggttggagtgcagtggcatgatctcagctcactgcaatctccaccttctaggttcaagcgattctcctgcctcagcctcccgagtaggtgggaccacaggcacctgccaccatgcctagctaatttttgtatttttagtagagatgggatttcatcatgttggccaagctggtctcaatctcctgacctcaggtgatccgcccgcctcagcctcccaaagtgctgggattaaaagcgtgagcgattaagattgcacctggccaaaaattcagtttttgctcacaaggtttctgcatctgaactgttcattcataacacagggacagagcagagacctggagacatggcttaggatcctggctgtgccacttaagaactatgggacctttctgtagcccacacccttatctataaaatgaggaatataatgtttatcttgaagggtagttgttgaagattaaatgaatgatgtgcacagagtcaaaaccatatataaagccaatatccagcttataatactcatttgataaaattttttcttatgaatgaatgagttcatggttaataaattatctttaaagaagtaattcaaatttagaagccttcagaagctggtacctagatctgacaacagctacgtgtactgtattttactaattctaagatacaattttttcatagtttaaaatctccaaaatcaggaagtgtctcatcattcatgacttcttatggctataattggtaaatattttctttcttggtggcatataaagcagtggcttacttttttgttggtggcaacttagattccatagactaactcagctaggttaactaatttgagctgctgctgtttgccttctcttcctcccgcttctctcacccttccttcccacttctcctcttccccccttcttcttcatagttttattgaaatatgttttatataccataraattcactcatttaaagtggtttctagtatagtcacagatttgtgcaactatcgctgcaatctaattccagaaaattttcaacacccccgaaagaaaccctatatcaattggcaatcattccacattctcccagtcccccagtcttctcagccctaggcaactactcatctactttctgtctctatagagttgcctgttctagacatttcatataaattgaattttgtaatatgtggctttttgtgacttccttctttcaattagcatgatgttttcaagatagaaatagaggctaagaagtctaagatcaaggcaacagcatggtcaatttctggtgagggctctcttccagggttgcagatggccaccttcttgctgtgtcctcacacggcagagagagagagagagagagagaggagagaggagagaggagagagagagagacaggtgggggggaggggcaagctcactgctcactggtatctgttcttacaaggacattaatcccatcataaggccccactcttatgatgacctcattagacctaattatctcccaaaggctccacctccaaatgccataacactggggactggggcttcaacatatgaattttgggggaatgcaatccagttcatagcacatcaagatnnnnnnnnnnnnnnnnnnnnnnnnnnnnnnnnnnnnnnnnnnnnnnnnnnnnnnnnnnnnnnnnnnnnnnnnnnnnnnnnnnnnnnnnnnnnnnnnnnnnnnnnnnnnnnnnnnnnnnnnnnnnnnnnnnnnnnnnnnnnnnnnnnnnnnnnnnnnnnnnnnnnnnnnnnnnnnnnnnnnnnnnnnnnnnnnnnnnnnnnnnnnnnnnnnnnnnnnnnnnnnnnnnnnnnnnnnnnnnnnnnnnnnnnnnnnnnnnnnnnnnnnnnnnnnnnnnnnnnnnnnnnnnnnnnnnnnnnnnnnnnnnnnnnnnnnnnnnnnnnnnnnnnnnnnnnnnnnnnnnnnnnnnnnnnnnnnnnnnnnnnnnnnnnnnnnnnnnnnnnnnnnnnnnnnnnnnnnnnnnnnnnnnnnnnnnnnnnnnnnnnnnnnnnnnnnnnnnnnnnnnnnnnnnnnnnnnnnnnnnnnnnnnnnnnnnnnnnnnnnnnnnnnnnnnnnnnnnnnnnnnnnnnnnnnnnnnnnnnnnnnnnnnnnnnnnnnnnnnnnnnnnnnnnnnnnnnnnnnnnnnnnnnnnnnnnnnnnnnnnnnnnnnnnnnnnnnnnnnnnnnnnnnnnnnnnnnnnnnnnnnnnnnnnnnnnnnnnnnnnnnnnnnnnnnnnnnnnnnnnnnnnnnnnnnnnnnnnnnnnnnnnnnnnnnnnnnnnnnnnnnnnnnnnnnnnnnnnnnnnnnnnnnnnnnaacaaaacaaaacaaaacaggtgcaatctgtaatcatgttcagaagataaagaaaagaccatcccgacagaagagggcactggcctgatctagtggggtggtgaagtagggaaattaaagaggagaaagacattttggacaggactccatgatgaattggatgtggagtgaatggaaggaggaatcagggtccttctagccttctagtgtttggcttcaatgacaagtcgctggtggtagcatttactgggaagggaggggctgcactgggggctaagggctgcactagggagaaatcaggatttccatcttggatatgttcagtttaagaagtctgtgacacctgaaagagaagatgtcaaacagcagggtagataattgagtccagaactcagaagagaggaatcatattacatttggaaattacaaagatgactttgaatgcctgtgagttgatggtaccatctggggaaagagtgtagggagaggagagaaggtgccccaggtgaaggcaagaggatgcccaacatttagagggtgagtaaagcaggaggaggctggatgggaaactgaggaagggcacacacagggcaaggagatggcagaagcctagggaggagagggtttcaggcagagggagtggccaattgccaagcactgttgagacagagggaaggtaagggtctagggtcatctgtggagtttgtgacagggatgttgctggtttctttgacattgaagctctagtgagtggagggagggcctgatcaaagtgggctaaaggatggagcctgcagtagtctctggaaatgtggttggctatggaggacagttgagcaagcttatattttggcagcagagctccagcagcaagggagagcttgctatagcaacacagtacagttagacagtacagggctgaaagagtgtctgtggagggcatggtgtgttatgaatgaagaggcagaggatgtgctgggcgcctgtaagtgcagtgttggagagctgctggtaggaaaaaaagtgtaactggcctgattcttttatgtgacttttaatgacatgatgaggcgaggccatccactgagcctgatggtgcagaaaagaacatgggaggttggaggagagaaggaaaactgtgaaatagtggccttggaaaattggaaagcaaaccaattcaagaaaaatagcagtttgccagtcagtatggagtgtcaatttgcagtttgagatcatgaatttaaagcgaaaccagtcatttcccttgtgtggttttattcaggaactttcagctttccagagctggtgtgaagtagggctgagggcttctgttatggaaggagggtgctgcccaggggtgatgacaatggtggactatgggaattaggctggacaaggagcgttgcaaggcaaggcagggagcagatgactggccaggggtgggatgtcgggggaggtgtccagaatttggagatttctctgaggttggggaagggtcccagtggggagcacgtgaacaggcgagcacaaggatgagaggttgctgttgatgaatggggtgtttgaggccgagatatcagaaacactatagttgctgctttcttcgggtccagagcaagatcatgggagtgggtgggtggcgtggaggaaaggaaagggtcaccgacaatcagcagagcaaggacctgggaggccagcacttctggtggttggtctatgtcctggtgattaagatgactggagttggggtggagagggcagactgagagctgggagctatgtcccaggccataatcactaggcccacttgtaattgtgtgtgtgatcaccagacattctccaaccctaactttttgtctcctgattacagtttcaaacttaaaactgacatgcaggagtgactgtttcagaaatgtgagtccatctcttgctgctcctttctgtctaagggctgattgtattggtgatttggttcttggagatgtgagtgctcctgccctcatgaggaccttccttagacctcgcctactgcctttgattcctgtggagtataaaagtcaaaggatacattagggggataaggatgataagcaagtccaagtataggtgctgaaagctactttccaggtctccaactttagctgtgctccattcagccagggttagagccgtttttgctcgttgcagagtaccctgtgaatgttatacatcataattgtatcattacacgtcataacaataggatttcaactgttattattgcacattctaattatgtaattactcagtctttcaccgattatgtaattagatttaattacaccaattgcagaaataaacgatagtcaactacaaattacttaaaaaaaaaatccagaactatgcatacgtcggcaattgtcccaaaaataagaatagaaaacataaggaagggaagaaggcttacgaaaccaattagcaagtgaaaggaatgatgtgatttggatagatctttaaggataatggcagggaatcatcttgtctagaagtttcctgtcattttttttctctgacgaagtgtggtagtaggaattgaagatgtcaaagtcaagagcgctgattcctcttggctgtgccttgaagcagagattgctctcatttccttaaccatacagcttaatgaggaagagggaagagaagacagcaagagagagaaaagagcaagagacactgagcaggggagggagagaaggagagagagagaatataacaaattggcatttcataattaaaagtagtatacatacagtacttttaaaaatatatatttttaatttcagyttttattttagatacagggggtacatatgcaggtttgttatgtgaatatattgcacccaggtagcgagcatagtacccaataggtagtttttcaacccacggtcctttccctcccctctctagtagtccatagtatatattgttcccatgtttatgtccatgtgtgctcagtgctcagctcccacttataagtgagaacacgcagtgtttggttttctgtttttgtgttaatttgcttaggattatggcctccagctccattcccgttaccacaaaagacttgatttcacccttttttatggctttttaatattccatgatgtgtatgtaccacattttctttatttagtccaccattgatgggcacctaggttgattcaatgtatttgctactgtgaaatttcatggcaatgagcatgtaggtgcatgtgtttttttggtataattatctagtttcctttgggtatatacccagtagtgggattgttgggttgaatggtagctctgatttaagtgttttgagaaatttccaaactgctttccacattggctgaacaaatttacattcccaccaacagtgtgtaaacattcccttttctccgcagccttgccagcatctgttgttttttgattttttagtaatagccattctaactggtgtgagacggtatctcattgtggtttaaatttgaatttctctgacgattagtgatgatgagcagtttttcatgtttgttagccacttgtatgtcttcttttgagaagtgtcatttcatgtcttttgtccattttttagtgggattatttgcttgtcaatttttttaagttccttatagatcctagttattagacctttgtcagatgcatagtttgcgaatattttctcccattctataggttgtctttttactttgttgatagtttcttttgctgtgcaaaagctctttagtttaattaggtcccacttgtcaatttttgtttttgttatagttgcttttaggaacttagtaaaaaattctttgccaaggctgatgttgagatgggtatttcctaggttttcttcaaagattttatagtttgaggtcttctatttaaatctttaatccattttgagttaatttttgtacatggtgaaaggtaagagtccagtttcattcttctacgtatggttagccagttatacccacaccatttatttaatagagagtcccttccccactgcttgtttttgtcagccttgttgaaaatcagatggctctagatgtgcggctttatttctgtgttctctgttcagtcccactgatctatatgtctgttttttttaccaataccatgctgttttggttactgtagccttatagtatatttgaagtcaggtagtttgatgcctccagctttgttggtagtttgatgcctccagctttgtttttttgtttttgtttttgttgtttagaattgctttggccactcaggctcttttatggagtcatatgaactttagaatagttttttctaattctgtgaagaatgttattggtagtttgataggaatagtgttgaatctgtaaattgctttaggtagtatggccattttaacaatattcagtcttcctatccatgagcatgaaatgtttttccatttatttgtgttgtctctgacttctttcagcagtgttttgtagttctccacatagagatctttcacttccttttttagctgtgctcctaggtattttattttctgtgtggctattgtcaatgggactgtgttcttgatttgactctcagcatggatgttgttggtgtgtagaaatgctactgatttttgtacattgattttgtattctgaaaccttgctaaaatcattgatcagttataacagccttttataagaatctttagggttttctaagtaaagagtaatattatcagtgaagagaggtagtttgacttcttcttttcctatttggttgccttttctttctttctcttgcctggttgctcwggctaggacttgcaatgccatattgaataggagtaatgagagcgggagtctttgctttgttcctcttctcaaggggaatgcttgtagctttgcccattcagtataatgttggttgtgggtttgtcatagatggtttttattattttgaggtatgttcctttgatgcttactcttttcagagtttctatcatgaagggatgttagatttaatcaaaatctttttctgaggctattgagatgatcatgtgtttttgcttttaattctgtttataatgctaatcgcatttattgatttgcatatactgaaccaaccttgcatcccagggataaagcctacttggtttgtggtgaattaactttttgatgtgccactggatttgatttgccagtattttattgaggatttttgcatctatgttcatcagggmtattggcctaatgtttttctttttttgttgtgtctctgccatcttctggtataaagatgatgctggcttcatagaatgcatcagggaggagcccttcctcctcagtgttttggcatagttgcagtaggattggtaccagttccttgcacatctggtagaatttggttgtgaacccatctggtccaggacttttttttttttttttggttggtaggttttttttaaattactgattccatttcagagcttgttattggtctgttcaggttttcactttcttcctggttcaatcttgggaggttgtgtgtttccaggaatttatctatctcctctagatttcctaatttatgtgcatagaggtattcataatagtcttcgagaatcttttgtaattctgtgggatcagttgtaatgtcatctgtgtcatttctgattgcacttatttgaatcttctttttttgttaatctggccagctgtctagcattcttgtatattctttcgaagagccaactcttggtttctttgatatgttatatgaaaaaaggtagtacaatatattttaatgtggagaacagagtccatgttaaggttcaaatttatgattctcccttggattagtttcctaaaccccttttgagtttgttatctgaacctagaacttcagagccagtactctatcatgttctgttccagcaaaatttgcaagaccaaaaattaataggtgagaaaccaagaatttggtacatgaataaatgtcatactctattgtttttcttttccattacctcaggttattgggtagctttgatctgaggtgcctataagaattcaattagggctgtgtcacaggtgtgaccattttttttcctatgaagacattgtagagggtggtctttttctggagaacaggttttctctgttgtaactcctagaggtaagaaaagaacagtgatagctcccctaggctgagttcactcagctgcctctgtgcctggagaaaggactaacccagagcttctagagaggagaggcgaagagacagctctgtggaggcgggaatgtgcacacatctgggagagtgggcatgctacacttgcactcttccaaagagagataattggtaggtgccatttaagcatatatatacttaggagaaattacccactgagcttggccaagtactgcataaccatagaacaccagcattgctcagcatgttccccaggatcttacagcagttgacaggatgaggattacttcataagaacacataatagttggtgcatgtacttacactgctataaaaataggtcttgatgctatagagggtcacattggggaatcagtgtatttgtttagctcttgcctgtgcatgaaaaactaatagtctgcaataacacaaataaggaaaaaatgtagttttaaatatagaataaagccattttattttgagcttttctactgtatgtttgtctatggaatcccataagatggacagtagatgctaaagaactttaatctagacatattcatctctcctttggtttatgcatagctccaggattgcatttgatttttttgctgttcatgggctttcatttctgcgcacaggtttttaaaacgttttatttacttattatttatttttagagacaaggtcttgctatgttgcccaggctggagttgtgtgatcataacttactgcagtctcaaacttctgggctcaagtgatcgtcccgcctcagcctccaaggagccgggattataagcatgtgccaccatgcctggctctgcatacaggtttaatgcctgttgaggtcaacccacagcagtggaaggtggcccctagaatagagtagtgctcttacattgggcatttgagcaaacaaaccctgggaaattggaactaagagaagggaatcaagctggaagtttgtagcccaaatattcattctcatctacaaaaatccaccagaacaaataaggttaagctgatgcgtatccgcagatttgcaacagtgtggcattccactctctacttttcttgtcagaaactgagaatgtgtaaaatggaagatgtggcgatatcaagcagccaaagctattttccaaatgaggacaaaagaagtgcggccagtttacacaaagcaagcgaacttgctgagcagttataatctgcattccagattytcagcccagagccatcattcctggcttgctcttytaaacagaaatgtcaatgcaaagattaaagtggattgtagtgaggtagaaagttgtcagcagggactaacatcagagtcttacaaaggcattttacctagttaagcatttatggtatgcacgcaattttggccatcacaggctcaaggagagggattctacaaaatacatcacatcagtataggaagggccacacaacctgaacagacattagcgaggaagacaaggaaaggctgtcatgcagttagtcaccagtagcagccgttcactcagtggatctctaccagatgttcaataggtcaggtactggcttgcctggctatcattaggggattctgatcttagttctagtttgctctctctaggtctacaagcagcttctgtatttattgagtacttactaggtgcaaagtgccatgataagccttttacaaacttattattctacttagtagcactactacgattttctttatttgcttgatgaagaaagaacacctcagaaggtttcaatgtccacatggttagtaataggaactagagtttgaacccctggtctgaatccagagtccattttcttaacctctaaattatgcaatgtgttatattccaatatctatagaatgcagaacaattttgtcattgtaaagatactttaagtgtggaattaaagtttgtttagggagagtcctctattaaatttatgtaatcagaagagctttagattaacatgggacaagactattaatttcttcttcacataatctagaaaaaaaaattgacaagaaaatgttccattttgccttcaaatgaaagcggaaatatgtggttaagtgtaagtcaaaaattagatgtcaaacatctttccaggtgcatatattatataatattaaattgtcaaggaactccttgtgttggaatgcaagagaggaaaatcctttttgtgagtacaaaaaaatcatatagacataggaagtgaggtgggagcagcctgatcctaataacaagcatggtttgataaaggaaacactagcaaactagtattgaccatagacttaatcttagtgagaatgaactaagacccgcccccccctccctccctgcctccctttattccttcctttggctctccatttatttatttacttgtttagcaaagtttattgagtacttaktctgtgtcaggcacttgtgtaggttttggtgaaacagtgaacaaaacacacatgttttctgcttttatgggccttgcattccagtggagatggccaaaaacttggacagttgaagaaacagaaagaagatgagtatggttagagctcagtgggaaagagagagagtaatacgggtggtaggagacttacgtagaggcaagaggtccagttcccagttagacgaaaaaccaagagcagatagaagtttggcgcatgactttacatttgacaacaggtaacagttaatgagcccttaatcagtgccagtgactgtctaagcccttgtcctgttttaactcatttaaactccacaacaccactcaatgaattcttaaacatatctactaaatagaaaaacaatgaatccaacgtcaggttgacacatttttttcaaactcttttattgatttaacagtgagttagaacacaatgagattaattaaacctctttttttcagttttaaaaatggtgatgctgtattaatttaattgtcttagcacttataattttttaactgagaaaaagtattttgtatgtaaagagattgttcttaagctttaaattaaacaaatgttctctcgccttatggggaaatgggcttatttgcaaatggacccactcaatggttttattttgttctgttcacaccatactgtcatgttgtccatagattcattagagcgagattggtgcattaattcattccattattctgttgctcataataaacaaataatacagttttacatcactgcttctatactattagctcatatagttacaaatagtctttgtagaattgcctacccagaggtgtcacttcagaagctagtgataactctacaaatttttacaatttcatagacttttaaaaagtcgtcctgattttttaaaaaatggttttatatttagggagagtgatgactagaaggagcaggttatcaaaatctaggctgatatgagaggacaaattcaaaggaaagttaatgttaagtgatttaaatacttggttcagatggacttcctaatggaatcttcatcatatatgcagcatggagtaaaaactataagaaaccttcatcaatctaagactgcattaaaaattactatattttttgaaggtttaaatatattcagccttactggaaaaattagagcatgttgatttatatccagtaagataagttactctccaaggagaccctttgggttaaaatcctcacccacactcctcttcatctatgtattcttatgtggagattttaattcatctttttccattgttgcttgaacacctgattccttgggttggcttcctggagaaatgaatcagcaagagaaacatgagctgacttcctcctatttgatatgcacacatctctagatttttagctttgctcctagtatgcttcgtgtcaagtttaggtccagcttcctgagctagagcacaaaaaaatatatcatttgaagcaaagagagaagaacgaactggggcttcaatcacctctgtgtattatttctgatatagaaccaataagtttgtgtgcccactgcatagtaacagacccattaccctgagacagcaggtttgcagcagagaagggtttaactatctcagggcaccaagggaggagatgggaggagagcctcaaattcatctttctgaggagctctgggctgtggtttttaagaacatcatggagcgtgatgggctggaaaattggggttgttgactgatcaggggaagggggattaaatcatcagaatgtggaaattgtgttctttggtgagtcagcttcttgtggtgttcctcagaccttcctggggtcacccgtggggtctttcattcagatcagctgatgtagtagtttcactcgtatgcaggacctgaaagactacctcacggggaaagcttaacatttcttaatgttcaagttgttatctatagagcacttaaggggaactatcatcttatcacagagtctacatgattctaggacaataggcaccaaaccatgtcgaggaagcaggtcagagaatgagttgacctcatgcttaatgctgaatgtgcttcaagcttggtttattaatttattttttcccctttcttcttccctgattaattttataatgtttacaggggcaacttcatttcaatcttggtttcccagttatagaagataaccctcatagaaggagaaaagtgcatactcattagtttcagaggaatgacttttttttagttttaggcatttagattttgtgatgcctaatgacacagaaattgaatgccctcggggagactctcctgtggaattttaactatcccatagccttctcaggtcttggacctctcatggctagtgaggtcaaatggctttgctgagtggtgaatcttgttacctccaaggtcattcccattcttcttcttgcacacatgaggtgagataacctgaaactcccctgaaacacgggaagagcacacaaatcagtcctttgaatgcacctcatcctctagggattgtagtaatattgtaactgatgtaattgtcatataatttaagttcttttttctttctttcttttttttttttttcctgagagggagtctcactgtgtcccccaggctggaatgcagtgatgtgatcttggcttgctgcaacttccacctcatggattcaagtgattctcctgactcagtctcccaagtagctgggattataggaacccgccaccatgcccagctaatttttgtattctattagagatgaggtttcactatgttggccagactggtctcggattcctgacttcaagtgatctgcccgcctcagcctcccaaagtgctgggattacaggtgtgagccatcacgcctagcctaatttaagttctgaattggtatgggactatggggccatttgaaaccatgttgggagatgggacttccctagtatcttggtactgttgaattataatcagtttcctccaggtttgtctattttctccctcaattcatttatttttctcctcctccttaaacatgtattgagggcctattttgcgggtaccatgatgatgggaacccagacacaaaacaccaaggctctcccctcaggagctcacagtctagcagggaagggagacagatacacaaacaaataaattaccacttcatgagtgatgagcgccacaacagaagcacccaggaagaaaagcctagaaaaaggttcagttacctctgggtgggaggaggatcaggggaggctttctggaggaggcagccactgagttgagtgttcaaaggtggatgagtaagagcttgcaagggaatagcatgggtgtgaaacagaggagtgaatgcagcagcccgtccattcttagctgctgttcattcttacagatgtcaaatatttctgggagtcttctgtcttccactgttacaaaacttctttaaaaattgttgtgattaggataggacccttcttcatagcaggagtttcccagttctttggggaatgctttgaaaaattcatttgttcccggattgagctgttctagttgtttatcctttaaacagcaagaaaaagatggtacttccagacttcttaaaagcccaagccacttgcaggtaataacggtgtcaggttaacagcagtgacacatcttctatttcaggaaggattgaattggctcttcctggatattcatttgctgaggcttcaattccaggagattttattctttgcacatttctctgttttctttttgttcctgttagaggcagcttctcagaatgataaaaactgttgacatgttccttgcaaagtctttggcattctaaggatccatccttattgcctcatttggccttgactttacttccaatataattgcccatgacaacttattttagtagagagtgtggtagatggccatccttgggtgagtttgagggtgctgtaaatactcctatactccaaaacatctcttctaacttgcaaagtacctgaaattccaccaattagacattcattcttgaagccttttcagttgtttcttaaaatctaagtagctcttagtgtcaccctgcaccttcattaagcaggtatcacttgttggctcctcagtgtggtgagcactgagttctgggaaggacaaaacagggactgaaaaactaaggaaaaggatggcttagcctgcaccaactgtacgtgaaggaagagagtcattatcacatcagttgcattattcagcacagcttgttacctgatatctgcttacctgaagagattactgtgggttaattctagaagcttgcttattacattaacgacctacatttattgacagctgattatcttgggggattgtctctgagaatttgtgcagtaggtaaatgatgtctttgcctcaattagcactcctttgagaaaggaactaagatagttaatgttgatttgtatcactgtggtttcttatccctcttttatatcttttggaattgaacacagtattatacctataacaggtgctgagtaaatgtttgttaaagaaatcagtctgtagacatttagaggcacatatcaccagaaatagaccactagcctgatgtctggctacagtaaaaccaaacaggagaataactgttttttaaaattagaacttcattttgaaatagtttaagattcacaagaagttgcaaaaacaggacagagtttctgtatcctttccaagctttccccatgatagtgctatatgctacataggcatgcatggtatgttatcaaaaccaggaaattgatattggcgtactgctgtaaactcaagtacagatgttttgccagtttttacaagcacttttttttttttgctgtgtagatccaagacattttatcccacataaatttgttttattacctctccagtcagtatacagaactcttccatcagcacaatgaaattctcttgtgagaaaccaaattttaaaaagaaaaagaaataacttaaaaataagcaccaacatttttataaggtcacatgcgtgaactttaaaataatactaatttcaggctgggtgcggtgcctcacgcctgtaatcccagcacttaggcctgttctactctcctttgaaatgaggtccttccccagcatgccttcctgctgagcaattgctgcctggagcatctccctgagtgtctgctgtgcagcaaggtggctgccactttagggaatctcagcctgtgctccttttccaagttcagtgtgtattgtcttctccgtaagtccatgtatagagggttctttttccctgtgttagcatttgtacacttggcctggcttcatggaaactccaaactagaatggacttggaacaaatggaaatccaccaaacaaatatgaccgcatggtcacagcagcacacagacagaactttcctgtttctgatttaccaacatagggtacagagctcccaccacggttaaaattgagctaagtgagtatcaaacacacttggtcactttttaaagagaaagcacattacctgaaaatggcatctttcctcttgtcaactcctgccaaaagaaagcctcaccccctaccccctgcacaccccagaattcatactttcaggcagccctctggaaactaaggacatctaaatctaaaggtcaggattctgtgagagaaaaccagtccaacatgctcatgaaatcctaactgtgcacagggttggatggacacttaaaaggcagttaagttgatggcttgacggtatgactaaccaagttctttaggtaattaatagtggatgcagcagaagtgttcactgtaatttttctatgtgcctgggtgtgatcacatgtatacaatttgtctataatctgttatctgtaatttgtctataattgttggcatgtgtctactatgtccaggtacccctatttgaggtactgaaatatgttcattttatgtcgattctaactataatttagagactgctctccaaatagcagaaagaacagcttcttactagggtgggtttttttttttccagaagattaagagacatgtgctgtcatttcttcatgacacagattcctgcaatagacatgggggccgtggtaggagagagaaccatgtggtttaggaaattgcttcagtgatactgtggacctaatcccctcttcctaaagaactctgacagcagcaggccctgaagaaggggtatttcccaggatattaagatactgtaattatatggcaacaatgatgctcatcttagtatgtgcataggttacttttttccgtggggatttaatttgactaattgacctctgtcttcacaaccttctgcttccaattcctactctatattgtccccagaattaacttgctacaagacaagataatggtaccactctccagcatttaaatttctatcaggctgggcgtggtggctcacacttgtaatcccagcactttgggaggccaagacaggtggatcacctgaggtcaggagttcgagaccagcctagccaacatggtgaaaccctatctctaccaaaaatacaaaaattagccagccatggtggcaggcgcctgtagtcccagctacttgggaggctgaggcaggagaatcgcttgaacctgggaggcagaggttgcagagagccaagatcgcaccactgcactccagcctgggtgacagagtgaaactctgtctcaaaaactagatttaataaaaataaaaaataaataaacttctgtcagctccctatttcctataggataaagagcagacatgcttccagggcacacagatgcttcaccgtctcctgtctggccttgtttcttgccaaccttacaatctacttaggctctatacgaggtgtccttccactcccagaatgcactgtgttctctgtgcttctgtctctctgcccaagcttagccctctgcttccatcccttcccctgccttctcacgctgatgagtttctaatcctcactcaaggcctactgcaaaagttaggcagaggcgatcttctgcttccagagtcctttgcttcttacttatatttgagtactactgatcataatagctaccactgacatagcatccatcatgtgctggccactaacaaagcagttcacgtttactaactcatttatttctctcaacaacctcaggaggtaggtattatttgcattttataaatgaggacactgaggcacagcatgattaaatatcttatccaaggtcatacaaggtaatcagtagaatttttaaacaagctgctcttgcatatctgctgccagaaattaaaatctgggtagacttctctgctaaatggaaaactactccagagcaagaatcatgtcttattgaattatatgtctccaaaaccagcatagtgcctgtcaccaaagaaaaaaactcagagacatttgttgaatgaatgtacagactattatgtttttgttcaaaaagataatcctttgaaaagatgtcattcaactaagcctctgagtttttaatctataagagagaataaattgtgatcaagtggaaacagctgcatctcaaggaatgaggaaggtagtgtcgggaggaatcctgtgttttgcttctacctgcattcactcccatgttctgggtggtgctcaagtttcagtgggtatgttaaggtctcactgagtgtggaaagtgaggcagtgcactgctcattcacactggacctaagttccctatcaaggcctccatcatacacgcagggaatcagaaggctgaactcctggagaacattttagaaggagtaatttataagcacggggcttgctcttcccctgtcagaactaggaggcaggaattgtgagttaggactagaccgtaccattttttgagttgtgttcaatgtaccagagatcataaaaggcagaagaggcaagaaaaatgataacaagccttatattaagcagggagtttacaggaaactagtttttagatatccagtgtagccttgacattagagcgaagcttgatgaatctctactgaatttaaaacagtattattactcctttaagagaaatgttaagaaatatatatatatatatatatatatatatatcacatatatatgctttttgctgatgaattgattttgataagaaatacctttgagaatcttgctcgtaactagggttctgctaaatggtcaatatgtatgaggtgagctcactgttcacctgtcattcatgctgagatgaagaaaagatggcttcacttgagagcgtggttaacttcagggttataaatggctttcaggggtatagatgcatagagtccctacccttgcaccacccgagctttcacgactgttgggttccttcaacactacattacgccttgagagtcatcatgagctctgtaaccaaagtgttaaggatgttggcacttaactgtctcttatttatctgacccgcttcagctctgcttctataatgaactgtaactacaggaaaccatggtgtgtatctttatgtaactgatgccttgtttctcctgaattttcacaacatcttaacaattatggttgatgttaaaaactctcatgaggttatttgttgaagtgaaatacattataaaaatacatgcatatgaaaggatggccagggaagccatttcattgagtaacggccagttctgtcctcaccttccctctgtctcgcccctcctcgtccccaaagctgcctcttctcgcgtgtaatgccagcgctctgtacagtgttctgtttagagtggtttgaacatttttctgcctgtgtctctcattgctgaagtaactcacctctctcatatcgactcttacccaggagccgcactgcagactctttgatgtaggtcctttctgcatggcagctaaggccaagctgtggttttcatttgcatgatgcaacctccccctttcggttgtcgcctccaggttaaccagattcttttcctgcactgcccaagcatgttgacgtgctttccccgatggccctgaacgtggtgagcactggacgcatgcatgaattaaagcagcgagcattccaatacactgaagcactgggcctgaggcttctcctggatcatccctgtgggccctcagtttgctgtgatatcacaaaggccaccatgtcccttgaaaattcaagactaggacattggaaaagagagarataaatctcccgtttttaggtttatgctgagcaaagactaatgacaaataattagaagctaggaccagttttccaagtaacaacctacctgatcatcagtcctacatgttcctgactccacctgggtgtgcaccaagtgaccaggatgatgataccctttcatgtctttctgaataatgttacctgatttgattttgcttagatctaacaaatatctaaataaaaagatataccttttaaaagcacttcttgggctaaatgcctcaggaaatgcaattattgatcgttttcatagtgtttagtaaaactattaattcaactttaaaagaaatgaaatggtactactaggaagaaatatcgcatttgttaaagcatgttggcactgcattcaacatcattgattagtaaattgtgatcattttctctccttgaaatattttttttttgccttagggctgtctaatgacttactttaaaactgctttcttttccttattttttttaaacttgtatacttctttcttgtattctcagaatggacttttataaaacacaactgtcaggatctgttttctcactgcatttctttttttgtcatttcaaatagatactttgcattttagacatgccttggttgtaagctgagaaaaatgaaaggcgaggcattccaagctgtgataatcctagggtaggaataacagttcctagacaattcttgatgatactagcttgtcagcatcccttagcccaagagtaggcactaagcagtcagaatgaaacaaagccgaatgcttcttatcttatttttaggttttcttcatgaaatctgatcttctacaatctgggggcttagtagattgaagctcttcccacagtcctttttcctcctattctattaaccatatcccatgtattatattgaaatggactttgcttagaatttcataacatgttcttttggtaaccagtaaaaagatcctttgaatgggagcatttcgctttttgaaaggagcttaaatgtaattacagtacagacctgtgcaggcaggcgatcctgcccagcacgttggcatattctcactttatgaacgttttcatctgggggcttggcgaaggaaacatctgattctcttttgtgagattcttcagtacagagacccattcctctttcccagaaaaacacagtgattcctcataaaatgaaaggatttctgaagcccaacagaaagtggggatacagagatccattcacagagacagaagagaaaatcctaagaaatcggcttcctggggccatcctaggcctctcacagagatgtttttataatgataggaataacatctctagagaagttcaaagataggacaataaaattaaaagaagggcctgcaggaggaagcaaggagaaagacacttcaccccactgagcaggtaattcatcatatttctttccaaatttatacccaaaaatctagtggatgtcattgatatggtggaaatagctatttattattatttttctttttttgagacagtctcactccgttgcccaggctggagtgcagtggtatgatcttggctcactgcaacctctaccacccgagttcaaaccattctcctgcctcagcctcccgagtagctgggactacaggtgttcaccaccactcccagctaatttttgtattttcagtggaggtggggtttcaccatgttggccaggctggtctcgaactcctgactttaagtgatccacctgcctcggcctcccaaagtgctgggattacaggcttgagccaccatactcagccagctatttattatttctgaaacatgggcaggggaaacctaattttgataaataaatgattttcaatgttaattagaagcaagaaggaaagaaaaaaaaaggaaaagaaatgttccaggagatgagacattactttcatgaagttgtcaagaaggaaatgaaaagtgtgcatacttgaagatatgattgtataatcataggggttaataagtcattgccattttccctattaatgatgacagtttgttttaaaggtaactcatcctgtctgattttccatggtggtgttggtttctactgcccaggtcctttatgacattcctaaggagtgactctagccttgtactcagcagacccatgacttctaatcagcagcatctcagacactccgttttggctgtgaggctgctaggctctcaacaaaactcctaaataggaaaacttacaaaacttccaggccttagctgtcagccaaagacggagctaagacacagctattttatttccttgtgcaataaaggtataattgtcttctatgccagatgtcagaaagacttctaccaggtctttctctgtgtgttcttaaaaaaaatcctcaacaacaacaacaacaataacaacaacaacaacaacaaaacttcaagatgttagaaatagatataagccattataattatccttcagcatcacatataaattcatgtgtaactttaaacaagctggtgtccttgtggtgactatctatgttatgtgacattgttttctgttcgtcaaagtgaagcagcagataaatggaacaactgttttttaaacataattatttttttttccagatgttctcaggcttcctacattcaggatcagcaagtcttcagcattggtactctttgttagtgtagaccttgagtgccctgctgaggggcttgtgtgccattctgcttgagtgcagatgtgccaagaggtacaagagttggaactgtaatagacctcttaggctactggctgaaatactaaggttcagaataagaaagagatacgtctcaggcatctcattatccgcaactgtcagtccggaactcagaacaggctggttctagctgtcgattcaatagttttagcttctgtactccaaatccttacaggtagacccatagcaaggtgccattgccagggtcatgccatccaggtatgacaggactatgtcaaagccaggtaggagggcaagaaaagggagtataaggcataagttaaataggggactggtgagatgaccaggggaggcccaaagagtccaaggcaaacatctggagaaggctcagacagaattttgaagtctgcatctagtaacagcccaaagaagtcccacagtgatttgacagtctgttatgctatgggagtaccagcctacctgcccaaccgtgccctgattggccagcctttggcaaatagagagctcttcttttctcttaggagcctctgccatcccctgtatgaatatgagggcttcttatttgggaagccttgatatgaagtgccttgaaactgtaccctgagctactttctctaggatgccctctctttcagaaatgtgagctccaggctgttgctccccaatggctaggggttgttggctatccctggttatagattattgtttatcagcctcctagcacataggtggcaattttaatatccagaaaaaaaaggcataggaagcagaatgtagtggttacatgaatagtctattcttgtttccctaggactaaattcctgtagatgtgagaggagtatggatccaggggtcagaggttccattccccatgccagcatttgtgtctagattctcagctctccattcagacctgggacttctcttctctttcctttcccccatttctaatcacctcatctaggctgtcctgttttgtgagtggtcccagagtggggttggggttggatggagagcatatatttgtgctgggaggctggggatgtttgtgtgtacacgttgtgtgggtgcccacccacatgaaccactccatacctatacatggctcattgaccctgccctcgaagaactttcactctgtcttctggtatatgtgcataagtgcatatgcatttagtgctatttgaatcacctactccatcccattccttttctagataaataagggttccctaaaaaaaagggatggctagaatcagtggagggagtggaacgagtgagtagaattggtcagtcatgattcctaagacagtttagtgaaaactaaaatcaagcaatacttgtttggaaagactctgttttatgtagtagcttagctctgatttattacatagaagttgctggcaaatatgaacactaattctactctggtaacaactgtgattgaaataattgtagtctgcagataagctggagaaaacaagcattagtgggtaggttgtcttggacatcattccaaaagtgtaacagtgaaaaagtacgtgctcttagagaagaaaacttacaagagatatttacaagacatatgactggttcagatctctgcctcttatgtagatccgtgctaagccaaccaggcaaggaaagctctcatctctaaaaaaaaaaactaggaaaaaaggagaataacaaactcctgtggccactcattaaagtgacttatggctttctctgtcaagaaatcttggctaattatttagcatttatgagactgtgtggctgccttcatggaaatataattttcactttttcttctttaatactctatagaattatactaggcatttgtgaaatcttacagtagcccaatgcacagcctgttgggcatttggattacagtgcaacaccagataaagaggcagtaaagcagatacaaatgaaaaaaatagaaacaattgatcctatcagtttttgttcagttgaatgattgccttttgggggcattttctacaaacagttactattatcactattattattaccttagttttggaaattactatcacttttgagtgctgagtcatctgattcagtcttagaacaacgttgggaattcgtaacmttatccccagtttacagaagagaaaacaaagacttgaagaggtcaaattatttgcttaagatcctatagctaggaggtgatagggctggaactttagctcttccattgaattctaaaactacctagctgccaaccacttttgaggtcaacttgtaatgcccgtattttgcttttgctatacctatctaggtctatcgtggataagaaatatggaatgaagatgggaaaggagactcttagttcagatataatattgaagtcttgttagataaaatttaaaagaacttcataacaaacaaaagggttctcgccacctgagtttcttgaaagcaaatgatctgtgtgtgttttattgagaaatttataaagaattgacatattccattctctctgttagcaatctatgtcattttctttgtctcctagaagaatgttttactcttaggaataattattcaggtagacatcctgagccttacaactgctctgaagtcaactgctatcattgtttcaggagtctccatattactcaaagctcaagaatacagagtgtatatggatgctaaagagttgttagggtttttatactactttccggtatgctccaattcatttcaacatggaatacatatatttgtggctattggatcacatctcttcaactgagcagagctataattagaagcctgctgccatcaaaaggattaatagtcctgttgatacaaacccataactgatgacttcccagtaaagccagttaaacaaccagctggcatgggatcataatcgatcagtactgcagagtaacaaaaactgttttcwatttacattagagtcatttcaaggtctaagaaaaatgttttaagattaaaaaaggggggcccattttgatgttatcatcattactattgatggatgattgaccacaaactgacccatcaaaggtgaccacatcttagaagataactattccatgatgtctgggataaagtgaagaggctttattctgtttggtaaaactaaaaactacacaacttattgaacacacatgccccgtccagtgtaaacatgagaagaatcgatattagaaagataaactcttaggtacacagctctgataagataagtaaaatggcagcatgaagaaaaccaaaagaatacaaagctttcagcttggatcccrtcaggttcagggcagtcttggggtgttgtcccaagttcaggagaaaatgttctatataaatattattgctttctcaatgatgaattcatatcatgtcattcacactaaatccattattgttattagctcacaaaatatttttctgtgatcttaaattttatgaataataatatcagtttctaatttgaagtacattgcaaagacttgcctccttttaaaattagtctgtctcataatattctggctggctagatgcttttattccagtgtaggcagtttatccaggatatccagaggtagccaggaaagcttcaaatcacttagacctactctcttggttatagatagattccataaaaatccatatccatatgatatcatcttttttatttattttgattggatcaaatgggatgcaaagcttattaatcatctagttcataattaagagtcttcagagtgtctaagtattatcagctttcattatcttcatccttgttctcctagaataggagagggtgagggaaaattgggccacttgaagggtcattcatctttaatcagttggataactaggagttatccctctataagcagaagaacttcccctcagccgatgggatcagtcttcctgataccaccaccccacacggggtcccagagaggacttctggggattattagtgtcccacatgacagtctctacagagcagggttagggttaggtacaggttgaatacatctgcttcctctgcattttcctagaccacccaacagacacatcagttattttctagggcagtttgtcctcctctatgaaggatttatgaatcagtcaacccccatcatttttgcatgagccccaggcgaggctctgtagatagcagacactatgtcttatgcttcctcttcctctccaagaaggctgcactccatctggagaggaagtggtatggcacaaggctagtgggtctctatcctaactctaccacatagctgcagggtcttgattggatatctgagcctctgcttctctgtctgtaaaatggggattatagtacaatatctactttattctgccattttgtgaggaccaaatgcaatagcatatgtaaattttatacaattgtcaggtattattacattgaattgaagaataattgaatatgaacataatgaggcagtttagaatttttttcctcccagtagcatgggaattcagagatgggagaggtcaatgagggcacaagtagtttgctgaatcaagcctggaggttggcctcgaagactgcccaaggtttgaacacaaagagtaatcagcagttgaagaggccacagagaaggcatagatttaaaattagggaatacatgggtcacattcatgaaataatgaaggcaagggtttggactgaaacatagtagaaaataaagtaagagatgtagaatgagtttaggttttagaaattcttcctagccaggcttagagttactatatgaaacaggcagggaccgtgatggtggatgaatgacatttttaattaaattaatttggcaacattgcagaggtgagactaggaaaagagtctagaatcattaggcttattgcattgactcatgtctgtggtgctgtgggcctgaactctgcctgtccataatcctggtgggaattgagagggccccattcaatttagaaagggactagccacaagagtgaggagaatttgaacgttggaaattatttcacaaaatgatatcttgttcctcagccagtcccgtccctagtaaatcatcttgggtgtgtgttattgttgttgtcattcttaagctacttaccatttctttatcccttgtaaatgatggtctccgtaacccctccccatctgtacttcatcatttttccttttaatcttaatctaaaatgtgctcagcaggtactctctgattgttaattggaacgtccactggtgaagcttgcacagtggcattgcaattgcttccctgtatctttttaattttttcacccccttgttcgcatctgaaacagaaaatgtctgttcaaccccttgatcccagcaattagctaagtggtaggcagctggttatctgggggctggctcaaacactgaatcatctctgttcaggtctgaatgggaagcttctcgagcagcaacacctataattagtgtgtagttgcaagaaaggttttttgggagtggcaggtctcaaagcggtgttcccagatgagcagcatccccattatctgggaaactgtaagaaatgcaaaatctagggcccccaccccaaacctactaaatcagaaactggggatggagcccagcaagattttaacaagccctccaactgcatgccaaagtttgagaaccactaccctggagaagtagcttcacagggttcggcagccagactcagggaggtgggaaaacagactgcaggaaacccagggaagtttagaggctgtgaggagsgggtgatccttccctcttggagatgaggaagatgcccagaggaacaactgctagcagtgagattttgtgctkagagctcctgccctctgaaaaaaaacctgggtagccctcacttgccttgtgctctgaaaagataagttcttaagtcagtctttgggaaggtctgttggatcatcctgctcaagagtctttttgaaaattctatgactaagtagatgaggaaagagaaacatttcccactttgggtgagtctcattttcctctgtagaggcatctaaatgctgaggatgtacttacttgatggccaagaggaaataggagtttgtatttcaacctctaccctacaactgaacatttactccataagaatcaactctttactgaggctcttttgaaggtgctcagtcatggagtcctggtcaacatgctaaatttgcctgtggttttagtatcacacttgtttcatggattatgggagcctagaaatgaatagtctgccacttaccaagtatcttatattctctaattattaagaggatataagttaagttagttaacccgtagcaatttagggtaagtcagttttctactaccagaggcagaactagtgttatttcagttcataaaactccacttttttttttttcctgttggcaacatatgcccatgtaaatccttctgaggtggatatgcctcatcagactggaaatctaagtctgtgtgtgatccagagtcactttcctttgtagtttttttttctttaaagcacaatttctttgctagcttttgaagtttctgtgtatctagacaaggaaactcctcctactttacacaagaagggagaggtgtttgtatttcattctccatcctataatgtgcattaatcattaagatgaagtctctttgggaggaaaataaatcctggttgatatggccaactcttttgttgttgaaatatgtattctttttttaaaggatcattgaacttctccatgggttgtttccatttggggaatgaaataatggggatttggaagctccactctgtggtctctgattgtgcgagtccgtaaactacaggcactcagaggacttatctcagaggggatctgataaacagttctgttgccacttgaaaaaaatcaggcaggacatttctcctggggctgtagtggcaagcaggaaatagctaaaagggatagaaagtacattgcccgatcactcatcctatatgggtcttttgtcccagagtttcctgcttctctgcctgccccctgccccctcatattattgaggtatgctcatattacctgccagctccagccagaggaaaagccacccgcgccagcggcatcatttacttcctttagtatttcagctccaagtctagtacgcaaggaatgataatgaaacatgatgaaatcggttctaaattttttgaaaggattagagaaaaggaaaaggtcttgtatggcttcaacatggtttcctgtaaaccaggggtgttgttaaggtgcgtttttcaacacccatgtcctctagcttcaagccctctcactgtggccattgaacataagcattatgaggagggatgacagaaaggaccaggaaggtaagaaacagtggagaagtcactgcagccaattccttatgctcttctcaatacctgtttccatttatgttgaatccaagtatcctctgtggcattcagctcacatctctcccccaactattccattttctaccacagcctagcaaatacttttccaattagctgtatttctaggttaccaccaaattaaccacagaggccacgggattaataggagctagggaactcatgatggccccaaatatgccaccagtaactccaccaataacgactgtgagggcaactgtaaggttttggccttggtgaaacaatagtcagttttccatgatagtcttggaaaccaagccctttttttctctccccttgactgcgtatacatcaatcttgatgactgtgagtttataatgcacagctatgtgagtccccgctggcacaagtgagcacctgagtacagtagttacctacagatctccccatccttgcttgcttattctctgacacacacacacacacacacacacacacacacacacatttactctttagtaacgtatcctgcagagatgcattgtctcttcaaccctggagtctataggatttctggtcaacctagttcctgtacatttttcactgcaactagagtggctgggaactctgacacccatggacctttgggtcttgtttttgaaacaaaaacaagcacccccatggcctgagaattgcagaagtatcaccgattcactgtagcctggattttccttttttcatcgaaattagtacctgtgtaggagagcaggcctagagccatggcaggctgtgatatttggcttccttgcttgtgtctcctttcagcattggactaaccaaattccatgctgtctttctacccaattccctaccttagtgaaaacctggcaattgtcgtttttttttgttttttgtttttttttgaactgtttttcagtgttgttttttgttcagtccacctagtttgtgaatgcaaataaaggttactcttaatgcttgtctggagatttttccaygtgatttgggagatgatatagggcatgtttgacttgtagcagagatgaagaatggataaatccagtgcatggaacatgatcggagattcccacagactaacttaccctgcctctaagtgggccccgagttcctctactgcacagattcctgcctgttgaacagccaagcgttgtccttacagaagtgcaactatactaactggtattgcacacagtgatttccaaagtggcactactaggaaatccttcatcttccatttctcaagctggccctctcctggagggaggaggtctgtcgcttccctttagctaaagtgttttgcttctcttggtattctgtctcctttccctcacctcacttcaccttcacgttcctggcctgggtgttactatttacctactgatcacagaatactatgtgaatttccattcacagctttgagtgtttatgaggctttcctacttcccacccagcccaaaccttgggactttccacacactgatcctctgatcagtttgacacaggaaagcacacagaagtcttgtaccagtttgtatagtagtacccttttgaactggcgactcttgaagtagagtgtgctaggggtttgcattggctgctcgacacacacaccaagtcaattagcatgcatgccaaaaaaaaaaaaaattaacccttagagtactgcttcaaccttttggtttaatggtctgaatttgactggtcggacaatgcttctttccccagatccgagtcctgcacagaaagtctgtgcttaatctagccagaacctcacccaggatcctctcctctctagctttcttgagatgctcctgggtcctgaatttattaatcaactaatggtttttaaaaggtccaaaacacaaccactgtgtttaattgaaaacaggccccactgccaatgcgttggagggcatgaggaactgtgttttagctttagtatgtgtcctctcaaagaaagaaagaagttctttaagggttaatatgaaattaaggaatttggaggcctctcctgcttgtccttcctccagggtatctgcatgatcctctttagattcttagttcaactgctgaatgatgataaaaaatgatagtatataataatttcgaaaacaataaataaaagaacagtagttcctgaatggttgaatggaaagaccccttggcaatgcttgcttgatgatcccaggaggcagaaagaccaaatgttttcttttatgaatattcatttcatcgtctaccctaagcactaccacttctcagcatcgtgggagacaggatgatactacctgtcatttacctcttgctttttcttcttcctgtctaatagcccaatagaatcctgccagaatttctacaaagatttcacattacagatcgacatggctttcaacgtgttcttccttctctacttyggcttgcgggtaagtttgtgcaacattgttcagtatcacaatggggtgtttcagtctgggacccagggatcatccccctcagcctctgctctcgcagtcaagatatttccaggagaaacagcgcacccgcattctgattttcagtctgagagagagccctctccttagctaagcattttctggaattcacatcagttttgtttcaagggggagaaatagggattgaagaaaaatgatgatgtatccaccggtggattgtttctcatctctctattcacataatgccctgttcccttaaaaattaaatagaaataggctgagtgtggtggctcacgcctgtaatcccagctttgggaggctgaggcgggtgaatcacctgaggtcaggagttcgagaccagcctgaccaacctggtgaaatcccatctctactaaaaatacaaaagttagccaggcgtggcggcgggcatctgtaatcccagctactcaggaggctgagacaggagaattgcttgaacctgggaggcagaggttgcagtgagctgaaatcacgccactgcactccagcctgggcaacagagtaagactccatctcaaaaaaataaaacaaaacaaaagtaaatagaaataaacctcttcagctcttaaaattacgtttagcagtgttcacttagctgagccctgagagagcagttgtgagtatgaatgaaaggaaggtgaggagagtagatggatggaattttgtgtgtgtgtgtgtgtgtgtgtgtgtgaatgcgtacatatgtgctttatttatagttatatttacatgaatgagtctaatacaagtaaaatcacccaatcttccctatgaagctgttgggaaccacagaaaaatacactgcctgatctttctcttaagactagcatagcatatagttagtctatatagggctctctatggggcactagaaaacgtgtgtgtccaatcataaaagcatgtgctttgtgtagatatgagaaggacataatgtctccctccagaccttaaaaattaaatagaaataggccgagtgcagtgactcatgcctgtaatcccagcactttgggaggctgaggcgagtggatcacctgatgtcaggagctcgagaccagcctggccaacatggtgaaatcccatctttactaaaaatacaaaaattagccgggcgtggtggccctrtgaaaactcaaaacttaccctttgacaaaagagtgtacattggatgccagcaccatgcttctcatgttttttctctttcttatttcttctttcccccagtttattgcagccaacgataaattgtggttctggctggaagtgaactctgtagtggatttcttcacggtgccccccgtgtttgtgtctgtgtacttaaacagaagttggcttggtaagtcagcctctctttccttctccttcctggttcctgagtcatggctgaaggacagaatttgcagtggatgagggggctgtctccctacaaacaatgttgtatgtattaatgtgaacaacgggctcttggagttttagaagttgatggtggcagctctctttggagcactagccccaaagggtttgcacagtttgcgcttcaggcagtgcagttttatcattgtcaaagcctagtggtcatcactgtcacagccagggcctttatgttcatggttctgtcacttttcattcaggaacttagagtcaggactggattaagaagcccatgggggtaaggccaactttccgagtggctggctcaggtaccccagaggcctgcctgccaaagttagctttggtctgcttccaaaaagtgggttctgcatggtctatttataggtacaaggttctttgtagggcagggagagatgaagcttcttgagtcatctctcaccttacaggagactgaggtccctttctgtgttaaggggagagtgctgctgggctgtactgtacagggcacctcctggaccaggactagaacactttagtggagaaagtaacttgaccagaggatagtcatggaagcccagggcttagagagacagcttcaagtttctcattgctgcgttgatttcattttttccctgaattcagagtattcctgctgtcatggggtctactagggaagaaggcaggccgaaacagaacctggaggactatttgtgggttccttctgtccttatttttaggatttttggcttaattatttaaaaagtaatatgcatgcattgtaatcaatgaaaacaaagatgtgtgaagagagcattcatcatcttttccccttgcctccatcactgcctcctcctttagacacccacggttcccaggccttcacatgtgcacacatgatagtgttttagagatggtggtgtttgtataagaaattgtttcaaataattacattgcaccacaatttggcttcctaactaatcatgatggacattccgtcagctctgtgataactcattttgtaagagttgcataaaattccataatttgtttgtatcgcagtatattcagccataaccctaatgatagaccacctgaatgttttccttttccttttattgctgctagaaacaatggtttaataaacactgttattcatatatttgtataattctaattctatcaatagttccaggttcctggaagaggaactgctggttcaaagaatatgtgtattttcttttgtgcagacattgatggataacttaaaaaatgttgtgtcaagataggcttccgctagcaatccattttgatgccattgctagcactgggaatttattatatacctagtgtcaagtatttttttaaaaaataagcatcttcttaatatagtatgtgtggtaatctctatattatatgcacatacacgtgtgcatgcatatatatatatatgtatgtgtccatatcctaaaaagatttcttttgctacagttttctcattagaattatattctcttgctctaaggaaaagtttttgttttggacctgagatatgcttggttagactggattttttgcttatcgtatcctgattcctccttattttctccgtatcgtatcctgattcctccttattttctccttatcctgatgaggctagtagagtcacacacaaatctgagaagtgtcctcagtgtaacttacgtggccctgggtgccagcagtcccagctgctgtagcttcactgctaactggctttgtgacctgggagctcaattttctttacctagcctgttgtttttcatctgtaagataaagatttggctagatgacttcgaagaatcttttagctcagaaagtctttaaggttcttgggtcattaatgggaaatttgggatctaggtcattggggtggacagggaagctagtagaattctatcagcagcacccctgagtcaaaattatggatgagttgttaacagggactccttttaaaacatcttgttgctaagagttcaaacacatacccatgcacacacagggaaatcgatggggaaggggagaggtgggatctgccttcttcactgagctgtgcttaattaccctgtgcactcgaacaaccactttgcttttctggatcctcagttttctcatctgaagaatgggggtttaaatgaaattaccttctagtcctcacacttcatgaatctgcactttctgccagtgtccattgtctcttggtcccctgtgggcctgggtgatggaagggctccctggtgactgtggtggagacatcctcctctgcagtgagcagaacatgcccccggtaaaagtgtggagcccagcttccttgtggtgagtgacacgttccctgaagcattttagggccaggagttctggtatgctttgaaatccatagccttcctgtggatgatttaattctgatttttggagatatgttgtgatctcataaaaaatctattggcacaaacacagaatgggggtgaaaaaaattgaataggaaataaaagaggtggaaatgaatttctaatgagatacatctttgtatcaactgtggtcgctttccaaaagaaatgtgctctaaatgtgcttccatttgtatattaatatttattgagcatctactatatgtcaggtaccattccagatgattgggaaacaacagtgaagaaatagagtcctatccccctaccctcctatactgcagtgttgggaaagcaggaaacactgaacctaataaggaagtaaatgatacggtatggttaggaagcataagtactattgaaattgaacacatagaacaataaccttttgggatatgaaataataataacaaaaataaaaaaacctctttcctcttgtaggagaaagcacctttaatgaaatgctttaggttctttggtagcgaaatctccttgggtgaaatctaaaactgatctccctgttatggaagagaattcagtacaataatatttcaaggaggttctcatctgacttaatacatgggttattacattgtgaaacaaccattgtaccaatgagcttccagagagaaaatgaacattcccatgagatatgacttataaaggagaagaaataatcccattaaataggggcatttcaggcatggctgcccttctcctggaaagtggaagggtgctgccttttctggctgaggtttgggataagatgcaggaaaccgaagtctatccccattctcctgcacaaactttcctggccctgctgagggtacaggactgtgcggtagctggctctgtgggagataaaaaccagagtgaatgcagggtccctgcccttacctgtcccagaacgctccccacaccgtgtttagttttcaattgtcggcatatgattgcgtgttgtatagtacagaatatattcattgtgcagatcatcctagtgcatgtaacggtgtactcatagagacactactatgtagtcagctcctactgtgtgatgggcactctggaaagcccctcacagacacggactcacttaatcctcagagcaaacctatgaggcaggacttgtcatttccccatttacagatgaagaaactgaggctaagagagattatcttgtccaaggtcacatctcctgggagtggtgggaggggtgcattccccagtatgtggtctgactttatgtccacactcttcctctgctcttctttctgtgtccttaccccttgaatgatttggagttgtgaggcctgggttgggaatgacagggctagttttgctgtgttgtgttggcatccctccatcggtgcttactcataaagggcttcactccaggcaggaagagagggaagagatcttatttaagactccgtgttctcctggctcctctttccccctcctccttgcccacctccagtttctagaaatgccaggaggaccagaagaatgcagagctagcctggtgtctcccgagtcctagtgcccctcagcagcttggagatccgacctgctccatctgggacagagagactggggcttaagaacaccccggatattggcgcagagtagattaaagctcagctctgagctccaccaactcagtccacatcttggctaaactgtttgctgatgggtcgctcagcatgagcattttatctgcctcaggctcagttatctcacctgtacaatgggctaattacagcacccacctcatagggattcaccgaggtaatgtgagtagcacagcacgtacttcatacgagcttaatgaacagaagccaggattacctcggtctctctttctaacctacccatcatattttaaagcaccgcaggagaaaacaaaccagaacagaataaaaaataaggcagcggatgtgaggacagtcatgtcggcaagcagcaagacgctgcttattttaattcctgtccccacccaccaacttattcattttgtttcccttacaaatccaaacctcactaaaataaatgcaccttgaaatgagagctttatcttattttgagatttgaataacatgctccaaggagaactcatatgtccgtctgtctcattctcttttgggaatgtatccccaaggtaggtcaatgggctgtgctgcctctgtttgtgtgtatgtttttttgtttttgtttttgtgttttggagtttcgcccttgttgcccaggctggagtgcagtggtgcgatattggctcgctgcaacctctgcctcctgggttcaagcgattctcctgcctcagcctccccgatagctcagattacaggcacttgccaccacacccagctaatgtttgtatttttagtagagacgggatcgccatgttggccaggctggtctcaaactcctgacctcaggtgatctacccgcctcagcctcccaaagtgctgggattacaagtgtgagccactgcaccttgcctgtgtgtatgtttttgttgagggtgatcttgtaggatttaaagaagggagtaggaggaaagtaatgatgcactcaccasccasttttctagcccatttttattacctactgtgtgctcascactgggatgagaggaacacatgccgggccaccctgtatcctactggtactgtgatttccaacaccatcccctgttctttgactgatgaaatcggcatatgataagggaccatggtcattggaaccatgattggaaaactataaacttgattctattgtctgtatcagaactggccttagaccttaaaccttaaaaccttcagtaaactctgctagaaaatagaaaaatgagttaatgcccaatcacagggcagttgcaatgatgtagggtatctgcttataaatatatgcccaaaatagtcctttttttgtgtcagaaggcaataaaaacaggattatataaaaaaagcacaggtgcttaaaaacaacaacaacaaaaggacaaaacattgttcctgtttgagactaaagtttcaatctcattttggaaccaaaataaacacacatgcagtgacagcaggtaacactacccactatataattaagcccgtaattgcaaggtacaggctgtaaaggccatgggagttcagaggagtgagagctcatgtgggtgggagaatgaggataggcttctgtgagaggctggggctcagtggaggctgcaatgatgggctaagacagggagaatgaagcctagtatgtgtggagcatggtgtgtacccacagaagctaataacagcctagagaagaaagtggccttgctactggggaggatgaggcaggaggacccctgagctcaggtgtttgagaccaacctgggcaacatagtaagaccctgctaaagaaaagaaaaaagaaaagaaaagaaaagaaagaaagtcagaaagagagaaagagaaacagagaaagaggaaggaaaagaaaaggaaagaaggaaggaaggaaagaggaaagaaggaaggaaggaaagaaggaagaaagtgaaggaaggaagaaaggaagcaaggaaggaaaggaaggaagaaaggaaggaaggaaaataaaaggaaggaaagaaaagaaagaaggaaggaaagaaggaaggaagaaaggaaagaaggaaggaagaaaggaaggaaggaagaaagagagaggccttgctgagtgccaagcatcagcctcacaaccttgcaaaatggtgtagaagttttctatttccaagcagttctgtgggtgagaagtccaacatgggtctctccagaggctctagggaagattccatgtccttgccttttccagcttctagaggccacctacaccccttggctcatggcccctttctccaccttcacagccagcaactaagggtgcatccccaccttgcatcactctgatcttgcttcctgccatctcttctttgcctccttcttctacttttaaggactcttgtgattacattgggcccacctggatactccaggatactcttcccatctccaggtcagcctatcagcaaccttaatttgcctgctgcgttcatttccttctggcatgtagatgaccatattcacaggtcccaagattaacacagacatctttgagggtcatcgttctgcctaccaaaaggggcatattattattcccattattatttccaaagaggaatctgaggctctgaggggttgagtaacttgccaaagtcagagcccagaagagggtgcgctgggatccgggcccctgttcagatgtgccaaaagctctgcagagccttttggagtcctttgctccaggggtcattcacggccctttggggccatgcttcatgttattttacagcctgttagggaggagaccgttggggagagccttattgaagctcaacaccctcccacacccctcatttgcatggagtgacatttttttttcttttcatgggaacaggtgagttactagacagacttgcctgttgtctgttgttcttacgcaacttactctgaggtttgggtgccccttcctgtgcagctgcagtgactgaggggaacatattaggtctgcataacctccacctagtagccctcttttttaggaatcatgctttattgctttctggagtttacagagaaacccaaatgagaccaaagagttgtggtggtaggccaccattttcctaagggaagcggtggatggggtcagcacaccactcttccttttaatggttaccccacccagggctcagctgaagtctcaagcatctctctgttcctctgcttcaatggagcatctgggcccaaggccacctgcttggctgaagagccccgccccaccttcaggcagggtcaggatgattctgtgaatctctggaccttctgttgactggcctctgcatttggtaagaataatcaagaatgaaagctgtggcctggtttcagtttcctgacatcagtaattttcagtgtttgggatttaaacaaacacaaatagtatggtttggccagagagtggaggcagaccctggttggcatccccatatgcacagccctgcctcctgcctcccctttccctgtacttcctgccccagctccactaggctgctagctgcatcttcttgctgtctctgccctgtgcctggtcatgagtaagttcctgccctgactctgcaggttgtaatccttctccccattaaggcacagctctgactccagctcctgtgtgcagctttcccattctcatccattggaatgaattcctctctgacctttgtattgtgctgttaggattcgtgctataggagcaccatacgcagcctgctttgtactgacaggtaggactgcagcttccatgatagcaatgtggcagggactgtggcccccttgtttttcgctatgtccctagtacctggaacagtgcctgacacatagttcatacttgttgaatgaatgaatgagtgagtcttcttaggatcatgatagtaatgaacagttattgattgcttattaaaagtaggcactatgcccagcatctcacagtcattctctgagttaatattcacaataactcgatgagtaaatattcatagcccaagtttacagtttgggaaactgaggttcagggtctaagtaagtggcaggtccaagactcaggttagtccaattctggagcccatcttttaaaatgattagaccagtggttctcaaagtgtggttcctggatcagcagcatcagcgttactggggacttgttacacatgagggttcttagagctcaaccgagacccagggatcagaaaccgcgagttggagccagcagtctgtgttttaacaagcactcctggtgatctccagttttggagccaccgtactgacttatgctgggatggttctcgaatttttattagaatcccccagagtgcttttaaaactcttcatgttcaggccaagcctttaaaccattaacctaagaatctctgggtggagggtgtgacctaggctcagcttcttttaatgtttctcagttgtgtctgaagtgcagtcaggatgagaaccacttgtatgcatctcctaactttctaaactttactgtgcatgagaagcaccaggagatcttgttagaatgcagtttctgatttaggaagcctatgctaacgtcagagatctacatttccaccagctctcaggtgtagtgattctcctgctctgtggaccacactttaaatagccaggcttaccaatccacttaaaaatggccaaaaccacaattacttttgcaccaaactaatacactgtgctgtccagtatggtagctcctagccacatttgcctatttaaaagctcagttcctccatcctaccagctgtttttcaggtactcaagagccccatgtggctcattggctgcggagctggacagcacagatgtggaacattccatcatcatagacagttctgtgggaccacgctgctctagaatgagtctgtgacagcacacaccatggctttttactttttgtatgcccaggacactcttgcacatagtggaagcttagcaaatgttttttgaagtgattttgagtgaatggaccaatggtaaaaattctatatctaaaagaaataaataactttcctgaagaaatgctagagaaatcatgaatacactgttaaaaggaaccctctaccaccctacccaaattaaattaaatatacttaaggactcagtaggccaaaaagcacaagagacactggaccatgctccagctccaggacacactactctgctgctactgaaatggcattttgggctctgaaaggaaaggtctctggtgccccctagaggctggtcctgcaatttgctggatttgtgagcaattaagtagcaaggggagaggggaagggggccaatttcatcatgctcagatgggcagttcgtggttagcagtggtggagataggctcactttgaactcctataagctatttgacatctgataacttgactcaaccgctatgaccaaaagcacccctcccccaagggagttgcttctcagtgacagtgcccgaagcctggaaggaagggcccctgagtgcccccagaggtcacccactccatgttccaggcagctgactttcaacttggacatctagattccctgaagcccagagccttctaagtaaactgctgtctgtagtctgtgggtttctttagaataagaatagtgaaataaagaaaagaaaaagtatgatttccctttttgggccaggtgtccttaggagagtgggggttggggggtttgagagaaagagaaatccaaaagaaaagtgcttccataactagaataaagttagatgtgttcatattacacatattacatatatgtgtatatatatgtatgtatgtgtatgtacatacagtatataattgtctcaagtgctcttccaaacagtactatgaaataggtgtcatttgggggcccatattacagatggggaaactgaggcttcagaaggttaaataaattgctgagagtcacctagtgagtaaatggtagagctcagctttgatctcaggcaatctacctccaaagtccatgttacttgatatgatactatgctgtctctcaagctacaagttaacacatttttaataacttaccagcctccaaactacttttttcccccakgttcaccagtcccctcttctgagcttcttgacccattctatacaagtagccaaataaataaaaacaatccatgtttttaccattagtccatgttgaaatagtatcatgctagatgttatgggctgctatggtctgaatgtttgtatctgccccaaatgtatgtgttgaaatgaaatcccaatgccgtcgtgttggagatggggcctctgggagatgattagatcatgagggtggagccctcaggaatggtattggtgcccttatgaaagaagcccttgggaggctgtttgtccctcccaccatgcagggaaacaagaaagtgccatctatggagcagagaaaaaaccctccccagatgctgaatctgttgtcgccttgatctgggacattccggcctttagaactgtgagcaatcaattgctgttgtttataaattacccagtctaaggtattttgttagcgcatatagactgacatggggctctactcttggcttgagctttttttttttgtttttttttgagaaagaattcaatggcaacatacaccttatgaatagcattgcaactgaattgctctagtgtgacaagaaaaatgaactcattattaagttctgtccctatgattgggctctgaagaaggcagcccagccaagtggaatactaaaaatttggatgtatttcagggagctcattgctgttccggtcgctgctatagctaaaactgcttctagagaaattactcctctccaagagatttccaattgtgttcccttgatattgctttgtcagggacacgctttaaataagatgccctccgtaagtagagattctaaatcctcattgatttgcatggctctgttatatgccaaattggaaataccatcctaaaatgaatgtcttcaaggaacgaattcagcagtaggtttgcatggatgccaaaacctctccagatggctgtacttcatctggggtattattggaacagcctcctcagcaacctaaatctctaggactggacgtatatttaccttcacatcatcttcaaaaaatagatgccttgattcttttccatgagaccagggccataatggattgacctggctagcagatcagatagggagaaaatgaacacctgaaaccagctcagggattcgactgcattattcagctgaacacctactgtgtgcaaatccctaggtgctaggagtgacccaaagatggggaaaacatagatcttgcctctataagatgttaataacttaattggagtgtcctctagaaagaacagtaagtttataggaatttagaggaggaacagatggaggaaagttggccatcccagcccaaagwagatttcaggtatctaaaatataaacatgtttctcctagagcaggactactcgaggtgcggtctgcaagccagcacatggcctgggagcttaatagaaataaaaatgttggagttcaaccctaaacctggagaatctctgaaaggtrgggctgaggaatctgttttaacaaattctcctggtgattcttctatgggctaaatgatcttggcagtatgttagaatcacccaggaactctgacacgtcctcctggccagactgtatttctaaccaagcatatgagaattggggatgaactcagtcaccagaatgttttcaagttctctgaataatttcacttgtgcagccactgttgagaggcctggcacagtggtggttcttaaaccagaggaacatacctgaatacctgagaaacttcaacacacacacacacacacacacacrcacacacackcacgcacacacacacacgcacacgtactttccgaaatctrttctgtgaggctctttgggtcgtggtaaggacaattgctttggaacaagcacactatgtattctagatagaccagtggttctcaaactttgagtgcaccagagtcacctagaggtctggttaaattacagatttggggtgttccatccccagagtttcagattcagtacacctgggatggggcctgaggatctgcatggctaacacattcccaagtgatgctgctgctgctratctgggggccacactttgagatctgctggtccagcccacggtgaggctgaacttgaattctagttgtagctgctatgcaagtttccaggattctggtattagagtaaaccttgctattttgtgctcctaaatatcagtattcttattaatgtaatcctttatttcatatgtttttgagattaaaatctgagtcatttacatcttgagatatactcatcctatgatattccatattacaatttcaacttgaacagcagaacccttttcccatagctcttggatcttccacttgtaatccccttctaaggtattccaagtccttggttactagtaagaatgagcacctttgcttgactttattagtcactagtattttgtctagagccaatttggttgatatcgcttcctaaactctctgaaattaggatagggtcaactcattcaggaaaatagatacagggtgtgttggagattagggaaggagaggggcggagggaggtcccaggccaaatttctaactcatccctagagtctcacctccgaygttctcccagggatggagcctcacctctgaccttctcccagggatggagcctcacctctgaccttctcccagggatggagcctcacctccgaccttctcccagggatggagcctcacctccraccttctcccagggatacagtatctcagcccgctcctcgagggaagggctctcttagggtccagcctctctccaatagcagggtgacttatttgaacaaatcttctttcccagtcatctcacttgcagacactgagatgcccaggcctgggcccaagcctgctcatgagagtaagaacagatgataggtggtgagcagagctccatttttcttttttttaaatttatttttattattattttttagattgggtcttgcattgttgcccaggctggagtgcagtggcacaatcttggcttactgcaacctccgcctcctgggttcaagtgattctcctgcctcagcctcccaagtagctgggattacaggtgcccaccaccacgcccagctaatttttgtatttttagtagagatggggtttcaccatgttggacaggctggtcttgaacacctgacctcaagtgatctgcccacytcggtctcccaaagtactgggatacaggtgtgagccactgtgcctggcccatttttcataagacacactatatcactcgaaataaatgccaaacactagtgtggtgacactttgctcccatatcacaatcactaaattcgacttacccctttaaggccaggtaggaatttagcaacccagctcataaagggtaaaattagcttattatttcctgagtggattgcaaacctcactggccagattgggagcacagcagatacttcctttttgtaaaaacttggctgagtgtggtggctcactcctgtaatcccagcattttgagagcccaaggcaagaggatcgtttgaggccagcctaggcaacacagtgagaccctgtctctacaaaaatttttttaaaaaattagcccggcatggtggcacatacctgtggtcccagctactcaggaggctgaggtgggaggattgcttgagccttggaggttgaagctacagtgagctgtggttgtgctactgtactccagcctgggcaatacagtgaaatcccatcttaaaaaaaaaataaaaataaaaaattaaattaaattaaacaaacaaaaaactcagtctcatggtcttccttctttatattctcacctagccttcttctccagccctgtttgcatttttgtgaatttctcccattttcactctagccagcctacttaccaaccactcctacccaatctcagatatgttccatckccatggttttggtagtttcttgtctagcagctgctttcttgtcttctctgcttacctgcactcaaccagttattatcctgttacttgcctcttccaaaaccactatagtctgagccactcttttgatcatgggtgatcttctgatgtggttgtgtttttataagtaacatgtacctgtcctgactcatcaactagatcaggagttagccactctggcctactgcctgtttttgtaaataaagttttcttggaacatagccatgttcattcgttcacatattgtttatggcaatgacatraagaagataggacccaaaaaagccttaaaaaattattatctttctttttagagaaagtttgctgatccctggtctagatttgcagctatgttatatattcttttatattcctctaaatgtctggcactatgttttgcatacaatagctactaatcaattttgatgacctgaacatgaatttttctctgaaatccttataaatgtaataggaataaaataagttatttttgctcttgttattgttattattattatagctgctatgtacagtcctgctacataatgtttctgtcagcaacaattcccatatgcaatggtggtcccataagcttataatatgtatttttactgtatcttttatatgtttagatgcacaaaacttaccattgtgttacagttgcttgcagtattcagtacagtaatgctgtacaaatttgtagcttaggagcaataggctataccatatagcctaggtgtgtaggaggctatacaatctaggtttgtctaagtgtactttatgatgtttgctcaatgacaaaattgcctaatgacacatccctgtcattaagcaatgcatgactatattttgtggcaggtattggacaaagctctttaccggcctatctcatttaatcctaacacacaggtagaggaacttggaacttggagaggtgacctgtgtgacctgtcttacttgctgtatgacttcagcaagtgatacagcaagaattcgaactcacatctttgtgatctcagcgcctgagcttttaattactactatatacccacggtttagtagtaactcatacatgtgatgagagacagaaatgtttaaaagccctaccaatgagataaatcatgtaaagaaaactggcctatgttrtaaataggctaggagcaagatgaagcaagtgaccctgaaagcgagggcctcagctgggtgcagcagctcatgcctgtaatcccagcaatttgggaagctgaggtgggaggatcgcttgagtcctggagtttgagaccagcctgggcaacatggtgagaccccatctctacaaaaaatacaaaaattagccagacatgatgctgcatgtttgaagttcctgctatttgggggctgaggtggaaggattgctcgaggaagtcgaggctgcagtgagacaagatcatgccattgcactccagcctggggacagagtcagcccctgtctcaaaattaaaaaaaaaaaagaaagaaagaaaaagaaaatgagcatgcctttcaattttgttccctggatgcatcactgtcttaccctagtctctgccctggttaagaaacttcataaatattgccggtttcattattatcatcatctttattattatcatcattcactcaacaaaccttaaaacaagtgtaatgtgccagctgttgtcctaggcttggagtttaaactaagatattttagccctactataggaaagatgaatctataaaccccagattgcaaacacaaatgcttacagggacaagaagataacaaatgggtgaagcaggccaggtggaggctgtctctagcaggagagtgaatgtctctcttcaaaggaaggctgttccatgaaaaagaatgaaaccctgtcatttgtggcaccgtggatggaactggaggtcgttgtgttaagtgaaataatccaagcacagaaagacaaatattgcgtgttctcattcacatgtgggagctaaaaaaaaggggatctcatgaagatagagagtagattggtagttatctgaggcagggaagggtaggaaggaggggaggatgaagagaggttgattaatgggaataaatatacacttagatagaagaaataagacttggtgtttgatagatcagtagggtgaccagttaacattagggtgacaagttaacatgaatcaattgtacatttcaaaatagctacaaaagaataatttcaatgttcctagcatgtagaaaagataaatattttaaggtgatggatgtcccagttaccctagtttgacaatatggatgtatcaaattatcacatagacactgaaaatacatccatctactatgtattaattttaaaaagaggctattgatcaacctttggcaaggtcttgctgtattgacagcttctcaatgtccactagcagttacctccttctccccttcatctttcctacattaaggcaaaaatacagtattcagttaaaactcctcctcccctccttcttttcttcttcctcttcatcctcttcctccttctcctctccctctccctccttctccttttcttttccctcctccatgtccttcccctcctcttcctctctttcttcttccttcccttcctcttcctctgaatcaatcatttttggccatagcgacttgccctttgcaaactagtatgtgttgcagtattatgatttctctgcttgagacaggaacctctggtgttttggaggaaatttcatcttgggctgctccccttcttaccacatctgttgcccagtatccaccacaaagcctgtaacttagcatctgcctataacaccaaacaggttgcatcagataaacaaaaattcttactgtggtaggtgaatattttagcaaacgtaaaatactataactcgaatttacaaactgggtcagaagtgctttctcatgttttggtgtctggagcaacgtgcacatggtcagaggacttcttatttcaattttcttgtttgtttatatttattttatgaaataaatagcctcccttccattagtacaagtacttctggtttgttagagacgaagggccccagctccactgggaacaaaggggacctataggaaacacaagtgtcgccagcttttccatgcactgacctgccctaatgtgtatcctcctcccatagcccgcagagactccccaacctcactttagctcaactgcattttccccagactgttctgaaaaatgtgttgtgacgtgctgccacctagtgaaggaaagtaggaatggacattatagtggctgtcgccctcagaatcctctttgaagcctggtttagttaacctctgccgaaataaggtcctacgtttttaactttcagaaaataactcttataagactcccaaagggtccaaagactatttagtgaagactgaagaagacaaatgtcaagtgaatagctaagagtttgaaaagtaggtatacgtgttcgggctaagtataaatggaaaacaactccccgcagaaaaccattctaattggacttgcagggcaggttaagaggaggaagtcagcccgactccagagtacagacattacctgttttcactaaaataaaggactgtcttcaattgtttgcattatcattttatctccgtagaatattttccttcggtcttttgactgaattggttttgaatttaaaagaaatattgaaatgatctgtcactttactttttgcctatcaagctgtcagcttcaaaaaatgaacaaatgtatggattctgaatagatatgtttctcagacctaaaaagaaagaaaatgtgttaataaacttgcgtctagtcatcatatgtgtacttcaatgtgtcagaactgatttatgaaccagaagtactgtgtttaagtgaggacttctctgcattcatattttaagtattattatttcattctttcctcttggggggcaagttagtataatattaccattgactaccgttgggtgggtcccaaaggtcatttctgtggaggataatagagcttttcatatgagacactttcagctgcctagcagaggcagcacactatgacaagtggccaaaaaaaagtagtgaatatttttatcgtgagttttcatggcatgaatcaactcattcttcagaagtctgtatttttttctttctattatggcatgtctgtcatttcctttgactctctggctggtcttcatctcagcaaagtggaaaaaacatattttagatgggaaaaaatgggaagaaactgaaagagggaaaatatccctaatacaaggagaaacacaactcyagattccctattgccatatggaacatttaggatttcccaggaggaaacacgttcaaccagttgcttctgttacctccggactaagagggatcctgatagtagctgtggctrgtgaaggaacacctctattatctggctctgggtgctgcagaaccaggcagttaacaggacaagaaaaccaaatgatccatgggtgcaaatgtgcttttgccaaagccacttccctggggtctagatagcgaagagaaatggtggcttctagaggaggaagagctaggaagtaatcctggagtccagttgtcttttcttaaagatcatgtttcaggattccaaaaaaaaaaaagaaagatcaatggcatgtaggagggtgggggacaaagagggtgaattatgagtttgtgtctgtgttttaaaatagccacctgccttgaaactgccatttagaaatgtgcatggaaggagaatcttcctgattcttagctctaatttatggccaatttatgaagtcaaggtcatctctcttcctgctggtgtgtgttcaacctggcctccctttatgccaaagaccttgagcagaccttggctaaaacccccaggtatactcccattcactgtcagcagtgatccgtggaatggattggggctggccgccttgccttgggcagagttcatgtgtcactcaggaagatgcatcaggctgctgagtcagagggagtctgccttatgtccacagagaggagtgaatcagaaagccagatgagtccagctctcaggacatgacaaattgcagaatgccgagctgggaggcttgagtacatcatatccttcttattctactgatgagaaaactkgggcctggggatgcccaggaatttgcttacatttcttctcctaatgaattaattctttcatttgttcaacagtgatgccctgagtgtctcccgtgtgtcaggctttgttctaggtgctggggttagaaagaggaagagtgtcacatgaggagaagacacatgtcacaggtcattctaaaagggaaacccaamtgagaatgaagagtgtctcagggcagaaaaaggaaggagcaaagacatccaccttggcactagacaatttgggtcctgatttgacagtctttrgtaattagcataaccatcagtacatcatggaagcttaccccatgtaccatttcttagctctcctcactgttgtgattgcaaaggtgcttggaaggttacttgatgagcctctttctgctgctccagacccagactgtgagttccatcaaggcagggatctttctcagctctctgttttatccccagaatgggacagagcactgcacgcatgggagatactcagtaaatagccactgagtgaacaatggaatgaatgacaaatgataagggttcccaagttccattctatagaataagggtcagcaaaattcttccataaagggcctgatagtcaatgtttttggcttcaggggctgtatgatctccaccaccaccattcaactctgcctctgtggcatgaaagcagccataggcaataggtaaaagagtggacatagctgtgtcccaataaaattgtattcgggacactgaaatttgaatttcatacaattttcatattccataaaatattctaatttttttagctgttttaaaatgtagggggaaaacatttttagctggtgtcctgtgcaagaactggtggtggccagatttgtctcacaggctgtagtttaccaacccctgctataggaggaagattaatagggtaaagattttatgaggtttttaattgattcatttatccatatgtttgagcatttacttactctatgtcaggctctgtagcagacactggacatacaaacagaaatattagtcaccaatatcaagatgaaatcattatccttgatgggtcagatcttccgaggatgagtcacgaccgtgtaggaaatatgaaccccgcagtctgtttaattgatgtatgctatgcactctaaaattaattggagatttctagataaaactttccaaatgtcacaagtatccttccagcatttcatatttacagactggaaaatcaatggagatggaatcattctcccactgtctctaagttaatttgcctgtctaatgctttaacactttctgctagttctgtctcattctttacccattggagagtaccagtgggttttcagataacttccttaaasaccagaaagaaagatttwaaaaaaattccagctccttccttttggctcgggtcttccaggtctttatcttgatgaaaactggaggcaaagatgttatctctggattgtagtcagagaacaacaaaaacccccatcttttctttcccaggaaaatattaatcaaaatagaaataaggtgagattagaaccttagaaggttttgcataatacttttcttgtttgactgtttctggcctgtcttaatccaataatctattaaactctagctagtactttctttcttcatccccagcaaatttgcaatcctccagaatccttttgggaattccaaggcaaacggccttaaacaagaacataattgtctgagagattttktttgcttatcggaactgtttggtccacagcattatctgcatgggggcataattcccttagctgcagtcagttttacaggtctttgctcataggattacagttcttttacataaaaggatgcttggaatgggggccaccaagagtgccaatatttagtatctttaactgagctcaaagtaataactacttaactagaatcagtgtgcttcttgatatctaggaaaaaaaggcaaaggaaggaaagaacaggatttggggatgtaatttgagattaataaatgattcactcaatagatacatatggatcatagcactctgcttgttgtgcatggtatactgtgaaatgtaagacacaatttcagcctagagtagcttaatctagttatagatatgggaattccaaataccttttctacaacaagagttcaaagtctttcataagtcaatataacaaaagatgaataaatagttaaataatactacagaagagtaaacatgagaagacatgcatttaaatgtatgcagagcacttattgctttggatagaattcacatgttatccatgcgttgaytacaagatacatgcacatctctaaacacactcataactgaattcagcttaataggatagtaattgaatgatggaacctagtgtgcctgacttttctcagatgaaatatctggctggtgcaatgcagtaactactattaaaactccatcaggcatggtggctcacacctgtaatctcagcagcttgggaggccagggcaggaagattgcttgagcccaggggttgaagaccagcttgggcaacatagtgagaccccatccctacaaaaaaaaaaagtagttgggcgtggtggcttatgcctgtagtcctaactacttgggaagctgaggcaggaggatcgcttgaggcaaagaggttgaggctgctcagagccataatcatgccrctgtaccccagcctgggtgacaaacacagagaccctgtctcttaaacaaaactcactaggatataccagtgagtccatatgaagaatcctacccatccttctcaccttggcctgaatgaatgagtacaagtgtcagtaaaacagctgttatttatttccttatcccacatctgtccttgaaggctgtcatgtggtcaaggaccatggagccgacagacaatgtttctatcaacaggcagttcaaaccaagcctgtggctgaccatattgagtggatgaaagagccttggagggactgggccttttagaaaaataggctcgtaagtcaagagcatggtgtcagctgtctgtgtgtatttcatggtgagagtgaaagcagatctaaattatgagttgttgagtcacctgcatgaatcaattcaattcttaatttgaaaggaagctcagtgccaagggaacataacatatggaaggagtggcctcaatgactaacaaaaccagggcctattagggttgcctgagtttacttaggtgcatttataagacatgacatttccacagctgttcaactatgtgaaaaccttttgtaagcattactgtatttgataaactctgtgagatggatgttattgttatctctgaattggcagatatgggcaaggatgttccaagaggtctgcagtgtcacacaagtagtaaatagcatagcctgggctagacttagaggtcttttaaccagtcacattccccctcagcagtgagaactatggtctgcccctgctccctcagtgcacgccaattagttaggcctgtattcagatgggatgagttatgttctgattaggaaccacatgtagtatatgctataagttaaaagtaggcagatgtgcctgtagccatagggacttgctgggggagctggacttgagttgagtcttaaaacatggaaaagccttaactaagtggagtggagggccaagagcattccagacaagagaaaaaggtgagcagggggaggaatttgcatccttctttggggagccaggaagtggactggtgtgaatatttcagagtgatcatatagggaggcagctgagggatcctcagtgcgtggttatagtaactggagtggatttactctggggcaggacttactccgttgacacccttggagaagagcaggggaacaggaggagagccttcccagttaccctgttagggaccttctctttgaccgtgtcctgcagatgcacagtagttgggattcatccacctccatccacttatttctttttagctcattttgtttcattcaacagacattcccattaccacattctaggcactgtgtcaagtcttactgaagttactaaaaggaaccctcaatgaatgttttgtgaatttagacatgaatgaatgaacaraagaaaagggacaagggctggtgagctcattcatgggggagaaggaagtaagtaaagaattccagtgtgttgcattgaatatggcaggagagtgctgggggaacaggcagaaaagagacagcctgacgtgtcccagggaagactttccaaaaggaggtggtgttctggctggttcctggagtctgaagtagaaatttgttagctacaggaggggggaataggcaggtcaaactgagggcaagtgtttgcaaatgaacaaaggcctgaaaattaggggaaaagcaaggatgtaggtgtaacttaagttgaagtggagaagaaggtaaggacagaagaccagggaaaacatttccacctgagactgaacagaaccacctggtccaaggtcacttcgttatgtctttaggcaagccctgggccaaaatggtgtggctctgggaactttgctcactcaaagccctacataagcccatctttcccataagaaggctgagggaacatctatctaagatagatgctagtaatttaacaaaaaaataaaaggcaacgatactatagggaagaaaagaaagaaaggagcggatgatgttacttggctattgttttcctaaaacaaaagcaagaaatgaagcatcttttaagagctggcctagaatgccattctgggggcttaggaaaaaaatcaaaatgtattagagctctctcagacattggatggtttatggcagcatctaaaattgctggtaaaattatgaccttgtaattcacagccgtgtcatatattctctagcacacagtgtaatttatgtaccaagccagttgcttcaaaaaagaatggggaaaaaactcacacaacacaaagtttataaaatgtggttatttttaatggataatgtctttagcctaaacctgtgttgttaggaggaagggtgtgccgttgctcaaggttattaccacagttcttgcagcatggggtgagagtatgaggattacttattacacttacgcattggctggccaggctaccatatccacaactacacagtcctcccttcctccctccctcaaagagagctatcaccttgaactccttcttcccttgaaataaaacctgggcaactaccgaagcttgaccttgactcatgccttaaacctgagcacaaaacttaacctctgctgggaaaccttcctccctatgaaacaaaggggtctcaagacaacttcttagcaagccaaaaatgagatttccactcagcttctcaagttagcctggctttgaccccagttatggagctagagaggggagaggagctgggagcaaactaggaatcatggagggggggactatggggaatatcagattcacacaactctcacttccatgaaaagggggaaggggagagagaggagactcccatggccgagtgatcaggtccagagacctccttgtggtccaggctgcacctgcaccagtctgcttgaccttgagcaacaagctatagtctctgaatcctatcaccctcacctataataaggagatgagctcttgccttcactacctaaaggagttactgtgaggatcaaagggtctattatagcttttaatcttgagccaatgactaggtcattatttttctcttgctctgcctgtatcattttctcctcatggcatacagctcttttgcctcaaagaagattcttgaggatgatgacctgcctcaaacttccttctccctaaaagtgttttcttttgttcagtttcatttctgtctttccacttattcctgattattttccctgagcctcttagagatctgatcacctcattgtataggagctatttacactccttctttgatatgaccacatgcttctctggatctgattcttaattctttgctacttccctccctgcccccaacccatgggggcaccagaagctgtgggaaaggaggcagcccatcgctaaggaggaggaggaccttgtcagggtgttggtggcgcaggtgaccagaggacagagctcactgctgtgatcctggagagggtgccaggacgctgttcccattaaaggcagtggggcttggagacactgcagcctcatgctcaggcctcctagactttggcccttgctgtggggctcgcctcgctgaaggcaggatgaagggcttatttttctggctgagatattgcatcccagaaaccacagaaatacttccaaaacccccaagataagagtgctcttattttgctccagcgtgaagaggagtttatttcatatgatcaagtaaagcaagtctggacgtcttccttatgtattttcaaaataattattttattatttaaaaaactcaacatattcatttaagagaaatggaagcaacacagaaaatgccaagaagaatgtgtccaacaaaccaaagcaaatatcataaaacatttgatcacattggataaagatcattctagatatttttctgtacagtagataagtaaataagttagacaaacagaaatttatataaaatgaacttgtactagcctcccgagtagctgggattacaggcacttgccaccatgcccggctaattttttgtattttttagcagagacagggtttcaccatgttggccaggatggttttgaattcctgacctcgggacccgcctgcctcagcctcccatagtgctggggttataggcatgagccactgtgcctggcctacatgtttttttaaaaaataaaactgttaagtttaagcttatttgtgtagtcacccagtggattttccctgtctgctgcacagacaaaagtaattcagtgagatggcagtattgctgtaaagaaagagtttaattaatgtgagtctggccaccctggaggactagggttatccttcaaatcagtctccccaaaggctaggaggttaggagtttttcaggatggtttggtgggcagggggctagggaacagggaatgttgattgcttgggggtaaaaccacaagcgtatggaaaacagtccactcgtgttgagtcctctgggtggggaccacaggactggctgagtcatgagtcttgggtccaggkggggtcagtcactcgccagaaatgccagaagtctgaaaaacatctcccagggccagtcttcagttctacagtagtgatgttatttacaagagtaattgaggaagttacaaatctgtgacctccagaacaatggctggttatcatttaactgcrcttatgtgttagcagaattcaggcacctcttataaccctaaccttatggcctttcgttagttttacaaggacaatttagttttgggaagggctattactgtccttgcttaaaggttaaactataaattcctcccaaagttagcttggcctatgcccaggaatgactaagggtagcttggaagttggaagcaagagggagtcagctctgtcagatttctcttgttgtcataattttgcaaaggtgatttcacttgaatgtagaaaaattggagaaaaatgaagcaatygctaaactttgtaacttttacctcctaagacatgctgatatgaatatgagaaagcaattaggagaaaagatgaaggtagagtcatgttttcatttaactttttttttttttttttttttttttaagatggagtctcgctctgtcacccaggctggagtgcagtggtgtgatcttggctcactgcaaactctgcctcccaggttcatgccattctcctgcctcagtctcccaagtagctgggactacaggtgcctgccaccgtgcctggctaatttttttgtatttttagtacagacggagtttcaccctgttagccaggatggtctcgatctcctaacctcgtgatccacccaccttggcctcccaaagtgctgggattacaggcgtgagccaccatgcccggccaactttgttttttaatttggtgtaaaacagatgaactttctgctgtgaaagaagagaaaatgacatttcattttctcccccatcctttcccctcacttcttagttatgtaattgtttcactgtgtcagggttttgtgacattctcttctgaggctatagctttcaattctatttagccttagtaaagtcttgcattttaaagtgttcagtactcacccaggttcattttttgcatagcatcttcttattgttttagttcagatcgtaatggtggaggaaccgtttccatgggactgagaagaaagacacttgtgttgacgttcaggcatacagggaatgaaatctcgggggcagcatgggagaggcagccagagccatggctgagcgtgcttccagggaggcagaacagggcagggtgagcacacatctggagttccactgcctaaatttcaaccgcggctccatcatctcattgctaggtgagcttcggcaagatgtttaagctctctgtgcctcaactgctgccacatctgtaaaatggggacaaccatggccaccgcatgtaaggtgttgtgggaataaaatgagtgatttaaaaatgattacagaggtatctgactcactgtcaatgtttgctcttgttatagaatcacactttttggagatcaatagcaggcaggaaagaattctctgagaatctcacagtcatctcctttctttagttgtttgcagggatcttttaaaatgtcaaccctttttcaatctgcttttgtggcccacctctttaaactttttccttcttcttagatggaaaccaagacctccttacggcccataaagcctgccatggccttagagcttctgccttctcctgcaccccccaggcttcttctccctgcctcagcaatggcaggcagcaacccgctcctttggatggcacttgcccctgcgtcccctgatggcccactctctcccttcagttctccactgatctatcacctcattagaaaggcctctgtggccacacagtctaaagtgtccctcactggaatttgtgtgttttatagcaatttatacaagcatttgcttgaagcaatttgtaattagttgtttgtttgcttcattgtttagttgtttcttgatgtgacttgtctgtactactaggccgtaacctacttgtgagcagggatcatgtctgtcttattcagtattttcatccaacacagagcaatgccaggcaccagcaggtgcttaataaatatttattgcatgaaatatctctgcctctatatatctgtatctctatatagatacagatggacattgcatattaaggtacctacctgtagagaggtagctacacagctgtctatatggatatagatactcactaagtggcctgaattattcaggcaacagtctttccatttcatcattctattttctctttatatgacaattatctaagtaatgaagaattggaatcagggctaggggtggttagaggaagaaatttgaaaggcaagcgacattcattgagcattagttggtggctgcacagtgctggatgttttgtgctgtaattcatttaatttctataataacctgtggtattagtccattctcacactactatgaaggaatcctccagaccgggtaatttataaaggaaagaggttgaattgactcacagttccgcatgcctggggaggcctcaggaaacttacaatcacggtggaaggcaaaggagaagaaggcaccttcttcacagggtggcaggacagagtgagttcaagcaggggaaatgccagatgcttataaaaccatcagctttcttgagacttactcactatcacgagaaaagcatgagggaaaccacccccgtgatccaattacctccacctggtcccacccttgacaggtggagattatagggattacaattcaagatgagattttggatggggacacagagcctaactatatcacctgtgaacaacagacattttctcattttacaaatgacgttgggaaagttaataagcaacagagctgggcccggagactcctgtccattaggtaatgctgcctctgagagaagcaggacttggtgagcactcagcaactttgggcagggtgcaacacctgtaaactccaggatgtaagttgctcatgcagctcccataaatgatttcaaatcacacgtgaaaaccattatgaatctgagaaatgcagaataaaaaaatcatcagggtgggtttgggttcattaaaaaaggaggtgaggctgggcatggtggctcatgcctgtaatccagcactttgggaggccaaggtgcttgagcttgtgagtttgagaccagcctgggcaacatggtgaaacccatctctagaaaaaatacaaaaaattagctggatgtagaggtgcatgcctgtagtcccagctatgcaggacgctgaggtgaaaggatcctttgagccctggagactgaggttgcagtgagccaagatggtgccactggactccagcctgggcaatagggccagaccttgtctcaaaaaacaaaaagaaaaagaaaaaaagaagatgaaatcagaagatttgggtgtagttaaggaaacatatttgtcagcagaattttgggggtgagctggaaattatggaatgcttttctgggtaaaattcaccagtctcaggccttcttttcccaaaatgtgcttcatggagtgttggattacactgaaagttggcatacattatttggaaagagaactctgtgctccagtaagtttgggaaatcctcatttaattaaagagtttcttaaccataagaatcctcagagccttccrtatgctaatgtgcattgtcagtttccaagkctaggaagtggcatttctctggatctataaggtctcaagatgcccttgagactgtattctacctgatgcatggctccaggggccttagtggggagcgccacattttccatgttctcatgacagcaggaagccctcagtgaatggaggtacagtgtgcagggtcgcaatcagtcctttccatccgccgcttcatttaagcctcacatcaacctaagacataggttttattattcctgggaggctggccctgttggtgcctgtcaccgcaacccagacccgcttgcccttacctgtagtgcaggtggctagattttgaattgccagcatctgcatttctttgccagaggactttctccagtcactgaagcttgcttgtgggcctgtctacaggtcgtaagtgctagggacttaatgcctcctcaaccagtgaccaacaggaggtgwtggatcaatgccccagccccctcaccccttggtcgcaaggctcttctgtttacacataaagccatgtgtagatcctggctgccagagtaccccagtgggattttcctttagttgcccacagtgataaatgcttgataacaaactctttatggatgctttcccatctcctccccactttcctgttcccttactggtgtttcctgagatcacttcccaagttaactatttgtaatcaaatccttttctcaggttctcctgcagaggaaccccaactgagacatcccattttacaaaataatgacaacagcaacaacacacacacacacacacacacacacacacacacacacacacaaaagcaaaaaaacagaagagtctccaagaggttatggaaggtgccctaggaaacagcttatgcatggtagaaccaggacttaaatttcacaacacatttatttagcacctgctatgtaccccttgctatcctaaatgctgagatgacaagatgaaaaagacagtcttggaccctctgtcctaaaccataggcaaaaataaattagtccaggcctgtcttcaaagcctctgcccttaaccacaatactctgctaattctcccaggatggacatttgactctcttttaaactgggagtccatttccataccacccttatgaagagaagctgtggtattcagctcctattctgccctctaggccatgaaaaaactgcatcagatcaagacttttgattcatgaaatatgctagagaaaattgcaagatttcctgactcaatgattttcctgcccagtgtaacatctctcttaattagtgagttgcaattagcatttataaaaagaaatcattgcacaaggtgagtcaactgagatgtaacatcttgctctaaacactgtcctcctggtgtgagtgggatcattcagaaattaggtatcttaatcagctgagtgctccagcattcaaatgtatctggcccagctgggaggccagagtctgtggcatgcataagaagcttacaggagggagggagttttctgtgtacactagcatttgttcatagttgcaaagtagctgtagaaactgcagatttatggccaggtgtggtggctcatgcctgtaatcccagcacttcagaagggcaaggggggcagatcacaaggtcaagagatcgagaccatcctgaccaacatggtgaaactccatctctactaaaaatacaaaaattagctgggcctggtgactctcacctgtagtcctagctacttgggaggctgaggcaggggaatcacttgaacccaggaggtggaggttgcagtgagctgatctggcaccactgcactcccacctggtgacagagcaagactccatcagaaaggaagaaagagaaagaaagaaggaaagaaagagagagagagagacagggaaagaaagaaaggaaagaaagaaagaaaagaaaagaaagaaagaaagaagaaagaaaggaaggaagagaagagagagagaagaaaagagagagagagaaagaaagaaagaaactgcagatttatgagaatgattgttatttttcctactttggctatttttaaagttatatttctttgttaytgagtgacctccagaggcagagagccacattataattatagaaatttgatctgaatgggatattaagggttatctattaccaacactcccagtcccttcttcctcccttccttctttccttccttttgatgagaaacctaatcacaaagagagaacatgacttgtctaaggtaacatagtgtgttggaatactcctgaaactagaacctacttagaatcaccagaaacttgaagttcttttgttattattatcttctttatctctctcagcggttctgacagaagaatgatcatgaagggaagtttaaattgtcagccaatgtaaggttttgcattatttatgcacttctgccatgtgggctatgctctcagcacttttaaactatccatagtccatagttggttctgataaatgattatttatttgctgtttttcagttttgcttttatktttggtgattgtttgtacttctttaaagcagggactgtgtcttacagtccctttctggccctaacagctcccagaaaagaacttaccatgtaatagggatgtggtgacttattgatgattaattcattttatatatctggattctttccctttgctcacataaatttcctgggtttgaaatttatgcctgtttatttcttctgttggcccctcatgttgtcagtgaaatggctacaagaayggcatttgatggaagaagaaggaagacagggmtggcctatttcattctctaattggataatcagtccagaataatgatggtttgattttatttgcaaacctacacctcaggcagtgggtgaagaacaacagcataagcaacaatgcgagtatggtgttcatttacatcctcagtttgtctgtggcaggaagaaagaatccacttattgctaatgataaagtagtagacccactttatttattttcatataaatcatattgtggcagaaattttcatagcccgagaccaacttctggagtttttcttatctgtgagattgttcctgttgtgtatgagctgttttgcagagatcaagaatccctgctcaagtgtgatccatcttcatcagtgaagtcatatgctgcraggacttctgagatactgtctgctgccacatgaccactaagcagatggttttgtgcctcttgcatgggttctatgaaaagatggagatttcagtgtccatcctctgtcactcaccagtagtatgcagaaatgggtgagcctaacagagttgttaggtcaacaaagcctgccattcaaattcagatcagtgaccttgcactcagggacaaattggggttaggatgcaggctgagattggagacggattatttcactatgcatgggtttgaccaggcagcccaacagcacaggtcttgcccatcaaaatattgtaactgcctaaaagagttggcaaaagtctctaacaaaacaaagggtttatgagctaagcccatcttgcattcatttcctcattccttctacacatatttagtgaaggccactctacactggacattgggatatgaacacaaagaaggagacaagtcacacagccatttatttataggaaaaaaatgttgaaataaatacatgagctgaagactttagaattacaaaatgagacttgctaacttgttttggattggaagaaattagtttatgcccatgacatcgctttattccagactgattagaagcataatgtacatggcaggggcagggagaaggggatgacaatccattctttgaaagagactcttctccccttaggttaaatagatcgtcaagtccttgcatgtcaaaagcagagatgtgaatcactgyccttcagaaagggaagaaaacactttaagcaagtgcaaagttcccagctgtgctaggcacgatggattatacccaaagaagttggacagagaccttgacctcaaggatttcatcgtctatttgaatagaaatgatttctatataactgaattaagccagagcaataaaaatagcatgatattaggttctaaagtgagtgttgcaggaaacagaaggaacttccaaatgttgttatttacagatttctaccttgtgaaatgtagaagtacctgttctcaaattaaacattccttcctcatttcaagatgtcagctacatcagaggttgaccaactatggcctacaggctacatctggtccatcacctatttttgtaaggaaagttttactggaacgaggccaagctcattcatttttgtatcatctgtggctagttttctcactccaatggccgcattgagcacttgcaatagagattgtgcagcttacaaagcccaaaatatttatgatctggccctttacagaaaaaaattgscaacccctgatttagattatccaggttgatcctggtgctaatttagagcttcagaataaaacacagctgaggtgtgcctggtagcaaattaatcccccccaaaacaagtacttcattttccttaaattaatgttgagcatcagaattaaacagagctaaatctcatgatacctgaggcccttgtgaaaatgtttttgctgacccaagattcagtgttatgctttctgtccttacagagagctaaatcaagagtccccttttggaaggagtacctctgttctttgtaaactgtaattgaagatataactcaccgtgttcttcagtctttattcaaagccgctggcacaaaaattctgcttgaatttaattttaggatagatttgatctctgaattggctttataggttttctcagttcacaatartcataacctagttgtttctctcttgccataggtgacaggcaatgcagagccaatttcagaagtgagctcagtagtaaactcatggcaggtgcaggatgaggcaagagagaggcctgggtgcaaacatgagggtggctcattcccagggctatgcaaaggcagggtcagtcccaaaaggagcacctccttacatgttgtgcctgaagtgtccctttctcagtcttttcttggtggtggcaggtgctgcctggcaatccccatcccttctacttttagatggtgggggccctgtcctgctttatccttgtatatggcgcttttattttaaccatgtaaactgattcaggtcctccctgtagtcaacagagataaaagtctcaataatcaaacctgtgggtacttcagtgaccagggaccaccatctgtcccctgtggrtccagacatcaggcaggagraaaagttggggccatgtgtcagcgtcccagctggggctcaccatgggaagtgggatwagggaggattattccagttctcttctttgagttcaggtttttatctacgggaagaagagggagattggacgaggttagattcacttgtctccaatgtcctgcatggggttctgggacagacaatgcctcagaaatgggaggtccaagaggatggtgactttcactgctagctgatgatgaaagggaaagggatgagggaagaatgggctgaattagaggctattccacccctctgatggttagctttcagggggaagggaaggagggagggaggctggtggggtgggagacaaagacgaattggagattaggaaagattctttggaatagtcaaaccagagaccaagcaaagcatctttttcccttgtaacttgagacctgtgcaaatgacacaggcttctagttcccaaacttaataagagtaagtgcgtgaagaagagacctgcagacacttaattcaaacagtctagaattctgrgaataagttatagtacaagttatatgtggctggttatagattcagccttgatgtttatgttccctgtttcaagtcacacacatcagattactcacttgtcagctaaaaatagggccatcactggcttgcaagtcgagttaggttttatttctctatgtgcttcattgttcgttcttttgtgctccctcctctgtgcctggccccctctgccatgcccaggtggcttcacagtcccccttccccatggtcaatacttctttctaactgagggataaatgactctgaaaaggaaatgtatttcaatggggaccaatccattacacccgagagagagaggccaagtgcagggacttctggaggagaccaggaatgagtgattatgtagcatattctgtgtgaaaggcattttaaaacacacgtagatcaatttattgtcacagcccctgagaggcataattctcatcttttttctttctttctttctttyttttttttttttttttttttttttgagatgaagtcttgctctgtcacccaggctggagtgtagtggcaccatctccgctcactgcaacctccacctcctgggttcaagygattctcctgcttcagcctccccagtagctgggactacaggtgcaggccaccacgcctggctaatttttgtattttttagaagagacgaagttttgccatgttgactaggctggtctcaaactcctggcctcaacctatctgcctgccttggcctcccaaagtgctgggattacaggcatgagccaccgcgcccagcttctcatctttattttttacatgcagtcatagacwttcaggtttcatataagcagccagggtctctcagtgcatcaggagcagagccagggtcaaaacttacatccatttgaacccaaggcacagttttttcttactgggtaatgctgctgtcttatgggggaattttaggcatcaataaacaaggaagagaagaaggctaatttcttttgggggctggtggatcgtcccctaaaattatgtagatagtcatctttcctatcttagctaaatacaaatgtagattgtaaacagctcctcaagactgtacattttttgaggatagatttagagcaaatcacatttgtatccccaatatggttagcccagtatctggctcctagtaataattatagcaagcactgactgaacatttcctatgtgccaaggacaattttaacygttatagatattaattcattcctcacaataaccccatgaggtaggttactattactgttcccattttatagttggggaaactgagatactttgagttgaaggaacttgctaatgctcactcccaattaatggcagagctgggatttgaatcctataacactgggcccagattccgtctcttttctaaataggtactccatgaaaatatgttgttgaataaatgtactattactttgtacagggttgagggaattagatatgacttcactgaagrggtcaatttcgtctgagttcatttcttggtcaatatttttaaatgaatgaatggattccagtgtcctttttctctgaccacttctgtctcagaaaaacaagcctaatgcagaggaagaggagcaagggagttttcccagtattggtagatgaagatctatgacttcagagacaaatgaagccctcctagaattctttcaggcagacaataccaggtggcaccatgggacacactggtgggaggagtgcaaaatgaggatacagtttatgacagttttttttggaatagacacatgtccagagaaatgggcccacattcacttgtatgtgtgcataygtttgcatagaattctcttttaaatatttcaaatttataagaaatcctttcttgtgatgaacagatttatcttgaaaagtgtttcccattttaaaagtcagagacttgaggcagggttggaataacttccaagagcatgtggctcgtatgtggagatgccaggaaccaaatcccctgctgctggttccagggaccacatttattgccacacctacagggtcctaggaagaggctggcagatgtgccccatggagataggtggggtttttatttacagtaggagaccagattgcccagtgatgatggggcattcgatggcagaatatagaccagtttgactgggccctagtgctttggcagatttttggaggagaatttgctgagtgtcagaccctgtgcagagctttgcaaacatcgttttctttaatctggatagttcgtctgtgaagtagatgtcataatccctatttcggagatgaggaaatgaggctaggagttacataacttactcagatgtgcagctgctggtggcagagcctgaatacaaatccttcacttctccaattaaaccagccatctctgagttgcaggggtttcatgccatactgcccactggaagttgggagggaatttacagggttacagcagatgatctctgtttaggcatcaggtgaaactttagtgttccctaaattggtacaagcagactctgtttgagtatctctgttgacagggagataccatctaacatggcagcccatctcaatgtttttaataagtatattatacatgcaataaaatgcatagatcctgagggtgcattcagtgagttctgacagagatatgcaccactgtaaaatggtctgtcatccatatcaacatagagaacatttttactatcctggaatgtttctttatgctcatttctgtcaatatctgctctctcctcccttgaacataaaaaaatcactatcttggcttcaatcactatagattagtcttgtctgctctcaatttttgtatgaatggaatcatgcagggtattcacttttctaactagctcctttccttcaaaataaggtttttgatatttgtatatattgttgtatatattaataatttcttccattttattgctgctaatattccattatgggatataccacaatttgtttatcaraccaccctgttgatggccattaggttgtttccaactttggcttattttgaataaagctgttatgaacatccttgtacaaatgattttgtggacatatatttttttttcttgggtaaatacttagaaattgagtctctgggtcataggatagatgcatgtttaacattacaagaaactgccagttttccaaaggaagatacaccattttacacttctactagcaacgtgtgagggtgccagctgctttgtttcttcaccaacacttgataatgtcaacttttaaattttagccattctaatggatttgtggtgccatcttgttgtagttttaatttttatttctgtaagttctttgtcatataaatgtactgcaagtgtttcctcttaatctgtggcttatcttttaatttattgtctttttatgagaagttttttattttactgatatttaatttatcagtctttttaaaaatgtgagtgccttttgtgtcctatctaagaagcctttgcttatccgagtgtcctcaagacactctgctgtgtttgtttatagaggcttcagatttagcttttacattgaagtcagtgatccatctcaaactaattttgtagattgtgttaggtaagagttgagactgatttctttccctttgtagatatccatttttccttccatttgtggcgatgactttatttttctcattgagttgtattggtgcttttgttgtaaatcaattgattgtatatatatgggtctatttctggactctgtttcattaatcaacttgtctttttggggggcacgacacattatcttaacacaacatagtttcattattttttgatgcctattaaaatgatcatatgatttgtcttttaatttttcaatgtggtgaattacattaattaattttcattttttaaaccaatcttttactcatgggataaactctatttactcgattctaaagtattattctttttatatactgctggattcatttgactagtatttatttaaggattgttgtgtctatgttgatgacatatatttttctgtaattttttttcttttcataatactcttattaggtttcaatgtcatgattattctggcattataaatcaagttgggttctcttttcctccagtccctgaaagagtttgtgtaatattggtattatttccaccataaatatttggtagaattctgcagtggaaactgcctgaacctgaaattttctttgtgggaatgtttttcattgaagtttccatttatttaacagatatgtagctgtttacattttctattttttcttgtgtcagttggagaaaattgtatttttaaaggaatttgttcatttcatcagggtgtcaagttttggagacataatattattcctaatactttaaaattatcctcttagtgtttgtaggacctgtagttctgtctrtcatttccagacaactttaggtgttggagagttagtttcycaccaatttctttttaaacacattgagtttctttcaagtcaggaccaggccatctacttccctcttcaagatattcgtcatgctgttccctcggcctaaaaaaattgccatcaccataatttttttacctggctgtctgctactatatcattaggatatagaattattgtgaagcccttttgcgtatgtatgtcacattttccatayacattcactcagatacacatttatgtaacatacacatacacatactcagataactacttggggtttttcctttttcttttttgttttctttttttcttttcttttctttttttttttttaaatggagtctccctctgtcacccaggctggagtgcagtggcactatcttggcttactgcaagctccacctcccaggttcatgccattctcctgcctcagcctcctgagtagctgggactacaggcacctgccaccacgcccggctaatttttttttgtattttttagtagagacagggtttcaccgtgttagccagaatggtctcgatctcctgaccttgtgatccgcctgcctcggcctcccaaagtgctgggattacaggcatgagccactgcgcccggcctacttagggtttttctttacagcactttaaccaaattgttaattacagttatgatatattgtttcactctctgattatactataaatgccaccaaggctggacttgtgcattgttcctgttaatcagcaaataccyagtacccagcaaaacgcttggcacataatagatgctcaatacrtcatggtcaggtgaatgaactaatccacattgagaagaaatgttatgctttgaaaattctaccaataattttagccttgctagaggtctgaaaaaataggtggggattaaattatgaggagcctcagctaacaacttgtggaatgtggatattttcctgtttatatttttaatgtttcccctctctctgtctgtgtcatatttttgtttacactcagtaccctgggaagggagactttcatagtcactctgggctgccttaacaagatatcaaaaactgggtggctgaaataacagagatttattttctcacagttctgaaagctggacatctgagatcagcattccagcatggtcaggttctggtgagggctctctttctggcttgcaggcggctgccctctcactgtgtcctgacatggcagagagggagaaagagcaaactctctggtctctcttcttataatggcactaatctcatcatgagggccctatcctcatgatcttgtctaaacctaatcrctccctaaagtacctcatctccaaataccatcacattggggtttgggcttcaacctacgactttggcagggatgggggtccataatgtagcctgtaacagagaactaagagggggctggggttggtaatgagagaagatgctgaaaacaatgggacaaagaagcagggggtgggccaaggagctctaatgagtgtctcctcccrtcttcmtctggatagcccagaatccctcttcttcctcagtcctgtatgtaggattagcagaggatttgcgtatttgggttatgttagtggtgggaggtggccacgacaggaggagtaggacaattcagtttttctttcttgttgggcatcacatcctctaagggaatcctccttatgagtcctcagttgttaagcaggattactaaaataaaagaaacgacttagtgggccccaaactgcagcctctctcacactctattctataccacttgatttgaggaattatagccttttctctttctatccccctaaaccatgtccaaaggagcttacatggttatttccagcgtgaagctgattgatcagctcgcaggacatcgtggatcagagygcttcccccgcccctcttaaccgcctttctgatgtggctgcgtgcatccagtgcccagagcatgccggggttcttgcaagagggactggagggtgagggaggagagagtgtctattggctccaccaggacatagatgctggtgacccacactgcgctggacaggaggacctgtttgcagcacgggtcagaggaacacaggctcctccaggtctttccagagcattgactcctgcaagaagtgaatggaagggagccgaaagcctagcccatctccctccttctaccatgatccccagtaagattctggtgtaccgccacccatccagcagaaccggcacagagctttacagacccggcaggcgccgcaagaagtccctgggggacctgttccataatggctaccgggtgaagtctgggcctgctgctccggagaaggaggaaccgccgaacttccggcagtcattggtgtcttgctgtggtgtttgtgcatcctggggtaaggactcacccgtccatggctcttctcctcccaaaagtattccgtattcctggaggctgcctgggaaaaaaagtgctttccgtctaggctggatttggggaactgtctagtggagaggtgatagccaccttgattcctgttttcttggcatacccacccaacgcagatgtgctgggtgaggcagaaatctcgtccttcctttttagatgaatttaactggcctctagtgctcctgaatgttwttgagctattaaagaatatatttcagaaatgtgggagaaagtttggcaaacgatgtaatagcttgcttcctatttattaaatggcaataattttcagtgagtcagcatttttggaagaggcatttggacctatcgataatttttttttcaggggctacagtgcgagttgtggctcattttctgtccttacatttgaccatgggagcgtggtyttgcctgtcttgggtggtacttttttattcttacccagcagagatcataagaatagttttctaggcagattttcttttctcaactgctttctgataggcatttggctttatttaggcatccataatatattacagtttaaaacaaatagattaaatgtacatttctggccataaaaatgtcagtcttaggragggatagcttttatttccaggaaagttagcagtactaggaatttctttaaaatggaatgtagtccctttgaaacctagtttaggattctgatgtgggtaggcacagctcaaatacttctgcattatgtaattgtgcctaacaaaattccagttggcaagcaataagtgaaacctagtcaatccttttcattagaactgatataaaatgtttctgtcagctgaaatgcctggaatctaaatattcatgcttctgtgtctataaccctagaattagctggccagattgttatatttcctctcccttcatcacagagaagagctgctctgtactgtaacatctggccttggagagaatcaggattaaagccactagagagaagagaccaaatgatggaattattaagctaagggcacatacactacttcctgagaaaacgttgaataattgagtaaaaccatgggtttaacttagtatccaatacccttcttacttttcctttgaaaggattaatgcatttattaattttcagtagtgagtactcactatgtaccagtcatcactgttctagaagagggtgcacttggtagtgagccagtgagtgagacacctgccccaatagagcagatagtctgctgaggaacgggcaggaggcaggcacctgaacaagcaaatgagatcattttagattgtggtaaaccctataaagaagaatggataatggcggcgaaggactgggctccagatcgggtggtcagagaagacctccattagccaaccttgcaatgatctgggggaagaacattcccaagaaaagaaacagaagggaagactcagagctgaggacgaactgggaaatgtttctggagcagagacactgtgtgcagggcgtgaggacatggagagtggtgatgaaatgagcagaaaccatggagagccttccagagcgagataaggaatctgaaagtaattttagtgagatggatgccatgtaatggcttttggcagggagcaatgtaatctgatggatatttgaaaagaccatgctggctgctttctggagaatgctggtggggcctggggggactggggtagagaagtgaagcaggaagacccgtgtggggctcttggtccagatggaggtaacagcagtgtgaaccatggttctggcagtggagagggaaaagataagttatttcacatatatttaagatgtaaagtcagaccaggcaaaatggcttatgcctataatcccagcatgttgggaggctgaggtgagaggatcatttgagcccatgaggtcaagactccagtgagctatgatcatgcaccccaggatgggtgaccatgagacactgtctcttaaaaaattcaataattttaaaacaaagtaaagaggtaaagtgagtaagtcctatttgtttacttttaaaaaatgtgtttctctacttactggctcctctattcaaatagaagacctggaagcaggagcctcacccctgtgctgcagcatctggaaccacaaggggtggtggaagcagtgactctgtgcatgtgtgtgggtgaatgaatgaatgaatgaatgggcgacaatcccagtctgaatawcaactgatgttgagcatctatcagaacaggaaccaggactgggttaaggtagggagccaggattggcaacatggtgaaactgtgtcactaaaaaaatagaaaaaattagctgggcatggtggctggctacttggggggctgaggcgggaggatcacttgagcccaggagrtcgaggctgtagtgagctgtgatcgtgccactgcactccagcatgggtgacaaagtaagaccctgtctcaaaaaawttttttaaaaaagtagggagcaaaacaacctgaacaattaccaaaggaaaggatggtgaaaaggtcagacaagcaagaactgtttatagaacacacattctgactgtgggaacaaaagcccaggggcatttgagaggaagcgagacagtcctttttctccagctgggaaggagaggctcagattcactctgtgctggggctaagaagcaggtggtcctcacagtgaccaagctggggatgggaggtgggacctgtgatggcagaagggtgcaggggaccaccctgaagaagcctccccatgctcctgggcatcctctgtttaccctgatatgcctgccctcagtttgatccctctgagctgcaaggccagataacaatgaccttgtcagacaccacaaaaataattgctcttcaggatttgcgtggggctgcagrgattggaaacgacagacgtttattggaacctttcagctttttggatttaaagattaaggagtgaaagggaatggaaaatagcaaattggaaaaccctggcaggctttctggtatgggctkggatgtgtttgctgttgtgttttctgtcttgtcctctcccgagacctcmcatgtatgaatctccagagtcttttctctctggggatcacaggaaccctgaagcagtgaatgagttatcatttacctgtttatccctcaatttctgtcagtacagtaactctgcttttatctgagaagggagttcaagatcccttaatctgtctggtcattgctaaaattccacagcaatagttctcaggaggagcctcacctagttgttcaggccctgggcagcaagtttcgaagggaaagctctggcagggggtcctcctcacctggagccaatggtctcatgtgactgaatcttgcatgtgagtacagggctcggagccaggaaaacctgtattccagtcctgacttgccactgactttatgactacagcaataagtaattatgcataaaaatagaaattttgatataaatattacaaaaaaattaaaaaactcaagaatattaaagaaatccaaaatgtctgcctttgtaacatggccactgtcatcattttatgcttttcttctactttttcattttacacatacctatagttttcatagttttatcatagggaccatgcacttcatcttttacttcttttttttttttttcagcatttccaatttgctatttttaaaaaattgtggtgaaaaacacataacataaaatttaccattttaattatttttagtgtacagttcagtaatgttaagtatatcctattgttgcaaaacagagctccagtactttttgatcttgcaaagttgaaactctaaacccattaaacaaataatttttcctctcccctcagctcctggtaatcgctattttaatttcgacattctacttctttaacttaacattatgtcaaaaattttccttgttacaatctttgagcatatataatatcctataaagaagatgtatcagacgtaagacctatttttggattttaagctgctttctatttttcttgcttaatgaacaattttgcaatgagcatctttgtttctgtagcatatttccatattttgttatattttcttaggctatattcccagaaatggaattactttgattaataatgctgaattactttctgaaaaggttttatcagtttataattccacaatsgaattataagactatttcattgtagagtcatctccactaggtgaagctcaaatatgttgctattaagtagaataaatacagtgcttacttatttttgtttaatttgcatttcttttaattttttaaagcatttttcaagaatactatatggttattaactatagtcaccatgtwatacagtagatatcttaaacttatttctcttatttaactgaaattttgtatcctttgaccaacatctacccaaccacccttccctccaaccgccccagcccctctttctatgagatcagctgttttatatgagtgagatcacgtgatgtttgtcattctgtgcatggcttatttaacttaatataaactttaggttcatccacattgttgcaaatgaaaggatttattcttttcttggctgaataatatgccattgtgtatatatatcacattttcttcattcatctgttgatggacactgcggttgatttcataccttggctattgtgaatagtgctgcaaagaacatgggagtgcagacatctcttcagcacgttgatttcatttcctctgaatatatacccagtggtgaggttgcttgattgtatggtagttctatttttgggtttttgtggaaactttttacctttttccataatggaaaatagtactaatttaccttcccatcaacagtatgcaagggttcctttttcccacatcctcaccaacacttaaccttttgtcttttcgataataacccttctaacagatgtgaagtgatagttcattgtagttttaatttgcacttccctgataaatagtgatgtcaaacattttaaacatttactgttggctatttgcatttcttcttttgcgaaatgtctattcaggtcctttgcccatttcttaattgggctatttgctttcttgctattgagatgtgttctctatatattttgaatattaagcccttatcagatgtatagttttcaaatatttttctcccattctgtaggttgtctcttcactccgttgattctttcttcctttttttttttttttttttttttttttttttttttttttgagacagagtcttgctctgtctcccaggctggagtgcggtggcatgatctcagctcactgcaatctccacctcccgggttcacgccattctcctgcctcagcctgccgagtagctgggactacaggtgcccaccaccacacccggctaattttttatatttttagtagagacggggtttcaccgtattagccaggatggtctcgatctcctgatcttgtgatccaccygccttggcctcccaaagtgctgggattacaggcgtgagccactgcgcccmgcctctcttcactcggttgattctttcttttgttgggccaagctttttagtttgatgtaatcctctttgtccatttttgcttttattgcctgtgttttaggggtcatttccaaaaaattattgcccwgaccgttgtcatggggctctttctcaatactttcttctagtagtttcacagttttggatcttaagtcattaattcattgtgagttggtttttgtatatggtgcrcattttttttatttgaaccaagttaagataaaatagtttcatttaattaatttatttaatgattattcactagttatattatctacttcatgatgtagctgtttgatttttgcctacttatcaactaatgataaagtattttacatacatgcttttgacattacaaagaatttatccttattgtatcatatttgattattttttcattggatattgtgtttattatgattttaaacatgcagaattttgacgtttttatggtggtggcagagcctgtatttcaaagattgtatgactccttttacacatgaaattagaaattcttcttttcagagggctaataatatatacctatattttcctcaatttttctgtcccttattatctatatttaatttttaattcatctcaaacttatttccattatggtatgaggtccatcattgcrtgatgcctgtcttccttttgatttgtgatgacctctttattgtctgtaaaattcttctgataaaatagagtctatttctctactgcttagtcattgttgccatgctcttattactttcttattctattgctttgtggtaaatgtgacttagatgatttttgcattttagattttgatgaaatttctttgtggcctaatatgtggtcagtttttgagactgctcatggctgttattaaagaatgtgtgttcctagtttactaatatatgtgtgtgtctttctgcccatccattcagatacatatagatacgaatatatcccaagggattaaatgctacttaaatgtcctatatttgtgcattcttgtcatatttgctttatttatctcaaaggaatacttttaggtgtataaagtttttttttgttacacattctttgtggattgtttcttttatcaatatgagatattactttttattctttttaatataatgtttatatataatttttatataactttttgcagtagctgccactttatttgatatagtcattgctctatttgttcctcttttctcagcatttgccaggcacataatttccattctttcatttctaacttttctgtatgtcttgtttgcagtgtatgtcttttaaatagcatgcgcctggaatttattattgttgttgttttcatatcatgtgaatctctgtctttccataggtgaaagtaattttaatttaattttattatgattacaaatatatttggactcttttgctattgtaactatgttttctgattaatataccttttattttttttttcttttcattggatgggctgaagtttttgttctttttttcttttctccatttgattaaattcctttgtccttttttttttctctaggctatggaatttatatccttaaggttttgatacacatactttaatttttttctgttaatatatatgattgattgtatcctatcaagacaagaatttctgcacacctttctttttcccattgccctctctccttcacacctccatcttccatttatttccagagattttaattttggatcattgttattatttattcatttaaaacatactcagtcaacacataaatgaatccattacttttatcttttccatgttgcttcttgtatcttgcttcttttggatttatttttctttcaactggctaagtatatattacttggttcaaattaatctgtcctgagaattgtaaagatatccttcttttgttttcttgcaaccagtgaagccaggagaattgtgacaataatttgactcttgytgctttgaagggatttatttcttcacattgatgttataaaatttatccacaatrtgcttggatttaggtctttgaaaatgtaatctgctggccgtggggcggagcttgcagtgagccgagatcgcgccactgcactccagcctgggcaacagtgccagactccatctcaaaaaaaaaaaaaaaaaaaatttaacctgctggacacttaaaagacctttccaatctgaggatacaggtcattctttcggtctaggacactttaatgttattttaaatgtttcctgttctctatttccttcattttttccttctggcagctcaattacatggatgtggaaaactttattcctgttttctgggtctcttagtttttcttttgcacttttcattcctgtgcccctttgtatgaagatggctgtgtgatagttcagccctctactttgctgtgtggctatgcccattcttctattaagctggccttttaagattttgatgttcaaaattttaattgctaagatatttagttgattttttgagttgagatagtttttcacaactctttatatttttcaaatatttttctaaagcattttttgtttaatgctttgttaatgttgtatccttaagggtcagttggcctgaagtgtaatatgtgcatttcttgaaggaaagttgcctttcctcaaatgtttggcaattctttagttcttttcttcccttttcttttctttttttttttttttttgagaccgagtcttgctctgttgcccaggttggagtgcagtggcgcgatctcagctcactgcaacccctgcctcccgggttcaagcgattctcctgcctcagcctcccaagtagctgggattacaggtgcctgcctccatgcccagctaatttttgaatttttagtagagatggggtttcatcatattggccaggctggtctcgaactcctgacctcaagtgatccgcctgcctcagcctcccaaagtgctaggattacaggcatgagccaccgtgcctggcaacagctggataaattttcacgaagagaatgcatttgagaagccaacgctcagctcaagaaacagtcattattgcctgtcaccccctagtcccttctcctggcaaccttctagtcactacaccccacaaaggtaaccactctcctgaccatatatcagttttgcccagttttgaacttcatataactgggttatatagaatgactctgtgtcaggccttgttctctcagtgttacgcctgtgtgattcatccatgtggttatatgtagatgtacttgacagtgtttttttgtttggagatggagtcttgctcagcctcccaaagttctgagatgacgggcatgagccaccgtgcttggcctgttttgtgcttatctttgcatttgagatcttctgttagcctatatgtgaatgctgtctttgtgtgttgcagtttgtctggggagtactgagatatgctactgtgtgtttctattcggtaactggtcttacagctgtagagacagtgtgtttcttccaagagttacagtttactcaggatattgctctattttaacacctcaagtgtatgcacttgctgccatgtagtgactactcctgtttggcaccccagtcaatcagtgttattgtcacagcctccttcttcccagggtcagccacttcatttcaccttttggatggttgttttcttcttcactgtgatctctgcatcccaaccacccccccatcaacctcagtctttatgtattgaccaaagacatttttaatattctgtttatcattgtggagatagacatatgtgtgtgtatatgtctttctttctcattatggaaatatatacatggaaaatatatgtatatgtttatataaatataaataaatacatatatatgtatgccaagtcagtttctaacagagtatctacccacattttgtgttcgtctgttctgtgttgtaatctcctcttccattctttttgttcttgtgggattctgctgtttcctaccccctcaacatttgtattagtttagtgaagttttgagagggggcagacataaaccattgtgatccatctgctatgtttaactagaatgctctggattatcattttaattcattgatgaataatttatgttggtattatatacagaattttggcatctatgatcttagtgatattagaatacagatgcttctcaatttaaccatggagttacatcctcacaaacccatcataaactgaaaatattttaagtttgagaatgcatttaatacccctcacctaccaaacatcacagctgagcctaccctatcttaaacatgctcagaacacttacattacctactgttgggcaaaatcatctaacgcaaagcatattttataataaagtgctgaaaatttagtgtaatgtattgaatactgtactgaaagtgaaaaacagaatggttgtgtgaatacttagagtatggtttaaggtgaataggtatcacttttgcaccactgaaaagtcagaaaatcattaagttgaaccattgtaagttgagggccatttctactttatttttgtgctttgagagtcagtttttggtcctcagtttatgtttattttataatataagttagtagctttagatctcgttttgtattatggaacagtttagaattttaataaaatgtatgtgcaataatttaatcataaattatatatgggtgcagagtctgtaagggaagctgttactatatatttcaatgtatatctcaattgttatcctataatggatttcttttttgtgtgtatcaagtttcgaagtttatatttttcagaaagtcatccctctcactgaggtttttcacagatttattagaatatcattgtggataatttttttctttttttattggatcagccagaactttattttgtttgttttcttgttgccattgtttgctcccayaaaattctacagatttttaaaattttttttcatatttattggttttctggttatttagtcataaacactraactaaaaaatcagctttctcctattgtcaagactacttttcccccaaaatcttaagctgaatgctttgttttataaataatctyttattgtattattgatttaacttctagttagccagtatgttctttaaaattgatttaaatagactggtagtgtgcttagagggtagattactggttttaaattactcaagtgattactcggattaacggaaatttgctatttggagaaaaaataaagcattctccttttggcatactactagccaaaataaataaatacatcctgatggattaacaagttagaggttaaaaaaagaaaataaaagatactctaaagcagtgattcccaaacttggctgtacactggactcatcctcatccatcatctggctgtacattagaatcttcttgattagaaaaataaagcttggtccttttggtgcactgttaaccaaaataaataaatacatcaaaacagattaacaaattaaaggttagagaaaagaaaatatattctgaaccactggttcccaaacttggctgcacactcgaatcagaatttataaaaattctgatgcccagcttgtatcccagacccgttgaatctggtgggaagcaggcctcagtattgctttaaaatcctcgggtgattgcaatggcagagaaatctggggaccactgccttgcagccttgttttcccaaagtgtggtcttctgaccaacagcattgacgatagcttagagcttgttagaaatgcacagtatcaggccccatcggagacccactgagtcagaatctggatgtttacaaatgccaggtgattcatgtgcacaatggatttgaatcccatgcctccaaagcaagtgtagaaaattagtgtccatggcctatttatatgaataacattttactggaatatggtcacacctatttgttttcctattatttacagcaaagttgagtcgttgtgacagcctaaaatatttattaatatttactatatgttcatttatagaaaaagtttgcaatgcttcttaacctggatggctcattagaatcactctggagccttaatactccctctgcctgaatgtaccccacgcccattaaatcagaatgcaggtagggggtgctgagacccaggtgtcaacaattctaaaagtttcccaggtgatttaaatgtacagtcaaagtccagaaccagtgccccaaaagtacaaagaaaaaaaaatagatgcagtaaaaaaaaaaaaaaaaattatctatatgatggggatggccaaaaaaattttaaaaaaagggaacatggtagaaagattgatatattttagaattcatggggaaagaaacccaccttaagtaaaatttgacagtaggaaaaatactttaagccaaattgagaagaatgacgaacggtgggagataatatatggtatacaaaatcttctttatatgagaacataattgtattactacaattaagataaatacacaggcagactggcaaaggccactctaaagcactttagagaagaaaataaaatgactaataattatatgaaaaaataattagcttcatttgttaagatagaaaagcaaaataaaacagccatgagctcttatttggggtctatcaaattaggattttttttttaatttttaaatttttaatttttttgagatggactctcactctgtagcccaggctggagtgcagtggcgagatctcggctcactgcaacttccacctcccaggttcaagtgattctcctgcctcagcctcccaagtagctgggattacaggcacataccaccacacttggttaattttttgtatttttggtagagacggggttttaccatgttggccaggctggtctcgaactcctgacctcaagtgatcagtccacctcagcctcccaaagtgctgggataacaggcatgagccaccatgcccgacctcaaattgggattcttaccctcgttctctccctctttcccctcctgccttcctgccttcctgccttctctccttctctcccttcttgccttcatgccttctttccttccttccttccttcctattttctctatcactgtactcaatccagtgggaatacaggcaaaagagcatttgcatactgaagggaatgcaaattgtgaggacaagttggtaagatgtatcacaagtcttgaaagtgtgtgcttgagtcctaatgtctgaattggaaatgactggctgaagtctgtacagggcagtggctagaagcttgggctttgtggagtttgtcacatttgtggtgaaacttggctctgttgctttcaaactatgctggatacactgtctcatttgtgtctccttagctattttcttctgtgtacgtattttttaaaaaagatatagttagaagttttagtgtgtgtaagtaaataaayatactagatatcatcaataataatagattaatgtcattgtcaacatcatcatttcaccagtaatttaaaataatagtaacactatatgtactctgtgtgtgtgtgtgtgtgtgtgtgtgtgtgtgtgtgtgtgtgtgtgtgtttgtgtgtgtgtttctgggctttctagtccagtttgatgacttttctgtggcgtgtgtacactcctacgctattgtaattcttcatatgatgaaattaccatttactgagtgcctccagtatgcccacatggactcttagaatgctcggtcttctggtatgcagatcaccagggtaggatttaatgcccatgcctgtgagggaataagggtggagaactcaggctggctkcagctgcctgggaagcctcaacccatcccacaggaaaaagtatcccaaattgaggcaaggcagctgacctttgtccctacatcagccagcatttgtgtgtggtggtggggggggggtggtcatccacctgagaatctctaattcaatggttagctcataaatcttccnnnnnnnnnnnnnnnnnnnngggatgtagccccaggtgaggcagctccttgtagcagagggcagttctcatgaagggactagctctgagcctttagcaggtcactcttcaagagcccaggacaaataaggtccctgaagaggggatttgggctgtaccctacagcatctgctatagctcatgtcttttattcatttaatgcagtcttggatatgataccctagtattttatttaggattattgttgttagtcattagtgtgataagcttgccatttaagaaaaaatgcaagggaacttgtgtccaggtaatgccaactttctaaaccaatacagagcatggaaaaacacagataagtccatttttaagaattgatcatataatagagaatagatagagaagttactattttttgaaactgtaaaaatctcacttgtaaaactctctgaacctggaagcttttggggagggcatgtaattcctggcttttggtatatacacattttcttcttcacaactctattatagctattttgtgttaccttagaaaatcatttatttcagagattttatagaataaaaataataaaagatattataaaatagagaagatgaataattgtcaccaaagagttccccctctcacctctcttatcttggtctcctctcttagcctgaagtcgctgtctgtagtcttctgggctctttctgggtatagccagagtggtcattsgttaaggcttttccctgatgaggctactttctacttcccaagagtgcagccctgacctctctcaggggaccccgcagggcttctggcttttccctttagtaggcaacatatagtctcagaattctgaatgtggattatctaacctttaactccgccgtctaattatttctcaaaactttgattcactcattcagttcaarcaaggatttattgagccttcaccttatgccagacactatgttcaatgctggaaatatagccctgaacaaaacagacatcagctcctcccctcatagagctgatgctaaagagaggaaggcagaaagtaaccacataaccgaggtgctagtgcttcatgctgaggagaaaagtgaagcaggaaagaggatagggagttgcacgggtggtgtgggaggagttgcatgtttaggtcgggtagccagggaaagtcacgctgatcaagggacattgagtaagaacccaaaggaggtgagggagtatgccatgtgggcatctggcraacagcattccaggcagagaggctgcatgtgcagaggccctggggcagtagcatacctgtgtgttcaagtgtcactgaagacatctgccagatcagcggacagtagtaggagtgacagtaggaagccatcagatccaaaaggagatagtgctggtggtgggatggtgttgctttaggcctttgaaagactttgacttttactctgtgtggaatgggtggcattggaggcttctgagcagagaacacaaggggtccagggcagaaagcggttaggaagctgatatggtttggctgtgtccctacccaaatctcatcttgaattgtagttcccataatacccctatgttgtaggaggggccctgtggaaggtaattgaatcatgggggcagttacccccatgctgctgttctcgtgatagtgagttctcacgaaatctgatggttttataaggggcttttccctcttatgctcaacacttctccttcctgccaccatgtgaagtaggatgtgtttgcttccccttctgccatgactgtaagtttcctgaggcttctccagccctgtggaattgagtcaattaaacctctttcctttataaattacccagtctcgggtatgtctttattagcagagtgagaacggactaatacggaagctattgtgaatgattcctgaaagaccaaccatttctccagatagtctggcttgatctgaggatgaaatgtagactgacttttttaacctatggagaacttcattggctcatttgcattagtgaaactcagtgccataaaaatgcccagtatgaggcagtcaaataagcaaaggccacccttgttcagcccacaggggtcttgctcctgcatcaccctgggtcccttttgcaaggagatatttccctctggtctccatgttgggaaaaataaatgattctcctgcaagccagtttgtttttctctcatatgtatacactattgatcttatcctgtctgcctgcttgcttttgttaagaaggtgctcagagctagatctgcagtttgtgtctagcaagagtataggaccttgtggcctctgcattcatttctttcctgcccttactttcatgcaccttaattaaaagaaaagcttttattctactatatttgtgtaactcactcaaatgtggcaagctgccaatcagcaatggatatacgatacaaacaccatcgtttaaagataaaaagaagaaatccagtttgaagttcaggttgtttgtattctatttttagttccataaataaaagcatatctatgcacacacagaatgttcaggattaaacactaaatggctaatacattgctagcatgtatttctacaggagtgcctcttatctatggttttgcttcctgaggtttcagttatccccaggcaaccgtagtctgaaaatattaaataggaaattctagaaataaacaattcataakktttaagttgcatgctgtcctgcttggttccatctgggacaagaatcctccctttgtccagcacatccgtgccatctgcactccctggccattagtctctcagggcacttcagtgggcagaccgatgtcttgctgtaacccatgttacctgtgttcaactaacccttattttacttaataacggccccaaagcrcaagtatagtgatgctggtacmtattgtcataattgttctattttattattgccattgttaatcccttcctgtgctaatttataagttaaattttaccgtaggtgtgtgtatataatgcatataggatttggcactatctgaggtttcaggcatccactgggaggtcttggaatgtatccctcaaggaacatggaagagtgttgttatctttcatagtttcagtrctaactgccagtcgccttctactccacgtttctacatttgtcgttttagctcagcaatatgcgacagtgatactggtatgagataacagtctaggttgggctggaaggttaggaccagcagtagagtctgttataaatttaatttccagcccttgccccctcccattctgatttagcaagtcttgtgaacctctttggaaactttatgcacacactgagcaaacaatgtattttttgagaccttagaatttgaaattttttttgttacttttattcttgaacaaccacttgactgggtataaaaatcttgggtcaaattctgtttgtctaaaaattctgaaaattgcccaattgctgtttaacactttttttttttttttgggggggtgtttttgagacggagtctcgttctgtcgcccaggctggagtgcagtgggcgcgatctcggctcactgcaagctccgcctcccgggtacacgccattctcctgcctcagcctcccgcgtagctgggactacaggcgcccgccaccacgcccggctaatttttttgtgttttttagtagagacggggtttcactgtgttagccaggatggtctcgatctcctgacctcgtgatcctcccgcctcggcctcccaaagtgctgggattacaggcatgagccaccgtgcccggccaacactttttgttaaatataatgatcttagttacattaacggtaaataaccccatcaacactggtggtttatttttattgcttgattttaatacttgaaatgtgaaaatgaaaagccagatgcttcttggcattggtctctaagaactgatccttcattttaccttttagtctccagtcattttttcatatctcaaaagttcttttctgttatgtcctggcctttgcttatgatcaatgtgatgttttgacttccctttggccaacacattttatccatgggttggatctctgtgatttctactgtgtttctattttctgaagtttcatcttttttttttctccctttctcatattttctctgctttctgaggtgacttcttagttttgtactctgcgccgtggtcggttttcagcggtgctaagtcagcctttcatcagctcagttacaactgtgcttttggccgtgagcctttttatttcatcaacatcccgtctcatctctgcaattatttaataaaagttatataagtattatttagcatagaaggagaatgttttcaaaaaaagtcttctgttcatgatggttaatccttttcagatgagaaattatttttttgagccartccttttctccctctttccttgtacagattttcccccaccccatgaactttaagttaattttcccttattacctaaacagctccacgttgcgtgcagttagtgtactcctcattcaagtagaaggtagtaaggattccttcccaccackgtgccctaggctgccctttactggctcacgggcgtgggagaacaaagccccacccacgggcgtggagttgtctgtcaactcagtgcactggagggcttcgcactgcctttggcacgtggcggtgcttaataaaatgcttctagaaagtctgcaaaagaaaatccccttgggagtgggtgtgacattcaatgtgtctcaaagcggtgacaaaccagcattttgtaagtaattcccttgcatgatagccaaattattatagcccaggactgactgaatgttttgaccatgaatttcacctgaacagaaatataattcactcttagctattaaaacataataatttgcatttttaaaatgtccttgatgtgttttccttctccatctctcttctgccacctaaacactgatgcttctttttcattcaagagaggttgttgatttagaaaggacaaaccatttatcttaacacttaataaaaggggaactatataaattttgaatcctgaagttgtggggtgtgatatctcactgatcttttttttttttttattgggaggaaaatatagaagtttgtagaaaacagataacactgtgggctgtactcttcattttatcagggctgaagataaagataaaaaataaaatccatcaaagacataaggttatccgatttattctcaatctgctcttagcacaagggttaccctgagctatcacaattcctaggatttttcagagacaaaatcctgccagataactaggtaacttagaaacagtgctttcaatcagagatcaccaaatgaaaagtctcattaacctggcttctccccatgagcccttcctctaaagaggttccaaacaggccacctttataaagagaaagtccatttcccagtcgagattaaaccagtcaagaatcagaatgaaggaatatgtctgaggtaccagctggtttatcttctgcaagaacttcccatcccttcgacccttgggaactgtaaatcaaatggcagactgtgaacattaaaatcacacattgaaaataakgcatctctatttcattcttttttccaggtttgagatttttaagagctctgagactgatacagttttcagaaattttgcagtttctgaatattcttaaaacaaggtaagatgttcttcgtcatatttttttmattccagtcccctatgccaagttgcaaatatcaggtgtgcttgctttcatcacaatgacattattaatagttatattattcacagaaagagtgatctaacacagagagggagagaaaaccagagtagggtttgagttgctctcttctgcagggccagggaactatgtggtgaaaagagagaaatagctgtgcatgcagggaagtagggacacttttagggacacatagctgatatctgtgtgcccagtggggttgcccagataagagccacggtgtcaaggggaaaggtgcacagtgaatgagggatagatttgctcattgattgggaagtccttgctgccagattctaaatcgcccctttattacatcactaaataagaaattgaacccagtcgtaaaggcaatagaagcaatgctgtgagaggcaatcacaaacctcatacggcaaacagaaaatcatttcatttcaaagcacattttagatgttcactttatatccgtatagcccttggggctttctctgtgaattgccttttgggggaaaacctacaaacctcctgccgaatgcaccatgaatacttctgttaactgcgttatgatctggaaaacacaactggaccaggaggaaaagcccccagaggatccctttcctgatgacctgcyggcttgcagagctggcctgaaaccaaggctgtcttgatgaataaactaataaaagaggttagacgtgctctaatggagaataagtacaggccataaatttctcttctaggaaattacactctaagaagctaacttctaatgttccatttcctctttggttgcccttcatgcatttgataaatgattaaaaacaggacacctccatattttgtgatttgtaattaatatatctgtagttttgaggattagattcagcatcattttcctggtaacacaggctgggacctagcttccygaatgaacctgacacagccaacaaattcaacctatgattggctttactccttgggtgttagtgttttttttgcttgtttattttattttgctttaattccaaattggtttcctctctctgactgctcatctatgtgactgtgaggtcaaattcactttctattagtcaagttgaaaagaaaaagagaatccaatggcactgaagtctttaaaagtatgtcctcctgccttttactgttcattatcctgagataagaatttatcagtcctctrtttattagcaataatgtaatattattcacatacagtgaatattgtatttcttcatgtttttctgattgccaataaccttgatttctgccttttaattattcttctatgtgctagaatcatattacttttgaaatgtaaacgatcaatgaagctagcatctcgccaatatttacgtatgtcagattcactccactagactgtgttttaaagatggaacgcgtgagtacccagcaccaagcatagagccttgtccttaagagacacttacttttttggtagggatggtgttttgtgacactctctaacattgggtagtgtctgtctctccctgtttcacaattacatcatatgttagggggatttttattctctgatgccagcattttgagaaggttccattgctctgaggaatactgtctactccctggaccgttttagaacttgagaaaatgatggaccatctgaatatctttttctgactttctgctaggacactcacctctctttcctttggatgcgggaagtggctgtgggatccctggtgtcagctcacctgccaactgcactcagtgctgcctctctcagtgcagagcggggaagctgaagcagccagccaggggacgagggagagaatggccctagggaagagtcacggggtggaaggctgtctgggcatctgccatccgggccccaaaacagcctttttccagcaccccacttcccactatatgaaactcttgttgttagagggtgctttttgccacaaacccacaacctgggttttcagagttcctttcacttatggtcataaccagatggttgagataattcagcaagcctggagtgagcacccattggtatcagcagcaaggtgcatgctaggagtcctgctgtcagagaacttgctgcgtagggggccaggccacctgacggtgtggttaatgctgatgtcagcatgcccaggggttgagaggggagtaactaagctgggcttagcctgagttgcagggcagtcaaggatcttttcgaggagaaggttacttttaggtaagccttgtagaaaaaagtgtcatcctcatggggctgggcatgtgaggggtagggtgggggttgacttctaatcaaggaagatgctaacagcacactggtgtgagagcataacacttggggaaactttgggtaattctgcactcctggacattaagcgttctgtgatggaaagaggaggatgaggttaagagggtaggaaaggccaggtcaccaggcacagaagcaaacgtcatgtaattgtaagaaatctagaagctttaggacaactctctgaggccattctctctccaggtgccagcctggctaatcttggctccttccttttgggcatccccaagtgtggatcccaaagttctgtcccagagaaagtgcagccttggcttttgtagggttttggacttttgagcgattctcctgtgactcttccatactctgctgctttcatagmggtccttccagaagggtgggttgggggacccatgtaatcgtctttagggagattttgtctggctctctttggyggtgaattcctgccaatctgtggcattaggcagggatggaggctttgcaatgcaatttgaaataatgatttggagttgctgtttcatttccagtactttggctgcctcactgggccaagagctgaaagaaataaggcagagaagcataaggtgggcagaaagattgataaagaattaagaatgcagcagaaggaaaattaaagtgcatgggatgaaatgggcaaatcacaattatgtgaccagcatcagggccctttcccaaactgcaagcccatagggggcctagaayactccatagcctgaaacggccaattaaaggggagacaaggagactccctctcactatctgaggttttggcagtttctcagttgccctgcaaactggagatctaacacacaggtgctagaacacttattctactgtcagaggaaagtcagcagctgtgtttaaaggctgtaattccacatctcattgactgtggtaaatattgatgactaaaacatggatcactcagcaattttttccaaaatgggaatttccttattgtttcctctaatttttcttttcttttcttttcttttttttttttttttttttttttttgagatagactcttgctctgttgtccaggctgggcgtgatctcagctcactgcaacctccgtctccagggttcaagccattctcctgcctcagcctcccgagtagctgggattacaggtgcctgccaccacacctggctactttttgtatttttagtagagacagggtttcaccgtgttggccacgctggtctcgaacttttgacctcaggtgatctgcccactttggcctcccaaagtgctgggattacaggtgtgagccactgtgcccagcctgtttcctctaattttgaaaatatgttcatggtaaacattgcaacaacacacaaaatcacataggataaagtaaaattgcctccacatcacactactttgagataatgattacatctactatgtcaccttttgtttctcacatagcattccatgatatgcatgagtcatcgtgtacctaaccaatatggttttgggaggcgtttttgaaactaaaacattactactgacatgaacttagaaatggctccaagataaagtttgtaaagaagagtattctatatggagactgcaagagatgtgcagggagaggccaaatcatgcaggttcttagattcatggactttactgagaacaaatgagagctgttgaaggattttaatcaggagaggaaatgtggttagactgacattttagaaagatccactattccaacagttgtatagagaatggggttgaagcatcaaagacctcatagaccataagaccaattaggaggcagtagtccagggaagaggtattagggcatggccttaggcagtgcaaattggggcagagaaagaagaagggatctagagataattaagggattgaattggcagaatttcactttgttccactcatgttgtcattcagaccatttatgttagtgtggtgcagtccagttaactttttagggggtgggtattttacatctgtccagcaaagagagcagtaaaacaaacaaggccagcagcacctggcagtaccagaaacaaagagaaaaattagagacaagcagaacagggacaaacgtacacttctttgtacaaagtgcatggcattttctgtgttaactgaaacatgtcttgttaaacatatagaggacaaaggaggccccagaagctctgggtttacagctgtaatctctggagccagaccttctcttgcagcatccacagtttcttggaagaggtctctaatctacaagaatcctgtgcctgacctatcatgattcactgtgtccatcgatgtgaattagaactcatgggatggagactcaggaattgtataggcaacatgagaatgattgactttagttggatcaggtgttgatgataagatcataatctccctcaaagcttaggaagcaggctagaatctgaatggttcaaatcattctaaccgctggtagcttcgtgtttggcccagatccctgggcttgaccaggaaggctatgactatctccacacagagatatataacctttgctatgcagagcacacagccctgctcctggcgtgccycactctttcttcccaaggagccctacttaacctggcaaggttcacatttcagactgtggagaatgcccaccaggggttaaccttgcatcttttgcttgtagctttcagatgtgtggtcatacagtttcatttagaaagcaaattcctaaacctagggatctgtgataatactgatgtcataaaaataatcagatttcagagctaaacatggactgttttagcaacaatgattaaatgttctgcatatggcaagagctccctaacrcactactaatatcactgtaaccatcatttagagtttagtaatcaccatatttaggtcatttttccaaagcaccaaggagactcagactcyaaataggtttaatatctcaagaggactctacatggttgttggtgggacactgctgtgttcaggtcccaagaatccaggagtatgtaagtgaagccacttggtatttaacgataccctgagaaaatgaacaacacacacctccctaagaggcctccctttgtcgccggctatcagttcttcatctatttcttaccctccaatgtgggagcacaccttagaggacttacaaggtacaggcaggagagaattctgcttaacacaacatctaacacataataagggctcaataaatattggcaattattataatctggtaactctagaaatgaccaagagagacagaatggacattttggctgtttttccaagttttcgagccagaagaaagttgttccacacattttgaaatatcagtctcacccacaaagttgaatctgtttattctttccatgaactgtcagaatcaactctggaaaaactaagactatggattcctctgtgctcttccatagaagaagaaagattgttgttatgagcattaaatgacttagtatacataaagcacaggtgatcctaaagcacttaggatggtggcacatgtggtgagcactgggaaagaactgtaaacaagctagctgaaactattactgtgatcttaaatgcctagaatttaaatcattggttctccaaaagagaggtaagagagggcagtcataacagagatgaactgaccaaaactaatgggttgggcaaccctgtaggctgcattaagccactactgggaaaatgcaagagctagaaaagagagttcttttctgcaagatgcagcaaggaacacaagagtcaaatagcaacctaaaactttacaaaagacatcttaagtcagtaggatcaattaccaatgaatggctggagttgagagccggggaaagtcactttgtcttgcagatggatggaacgactttaaggaagcagtagggattgaactgggctttgaagaatggggaaatttgactagatgggaagggctttcaagttgagtaaatagtgtaaacaatagctatagtaaataggtttagctggcatggcagtttcaagagtttatgtgaaagaggggtggtgggagagactgggacttcacaaggtgttgacaatggaaggagagagtttgaatgtcatcttttagtcaacaagaagcctttggacagtgaagtgacctgctgacagcagcgttcaggtataccccagtgggactgaacaggatgcagtttagaaagagagcaggggcagataccagtgcactcagtgcagagtcacgggtctgctatgctccagggacccagggctcctggaatccagacagacaaggcctcagctcttagggacctcaaaatgtcataaggtccagttgatccactcaaggaacaccagtgaatgctaaagctattaggtataaggtttttggggagcaggatattcctgcagtctcggggcctcactcaaggtggcatattcattacaaagggaaatgggcacctctcagtggagacattagcatttctgccttagccacatggatggagctagtcattgggctgggatatcctgatgtgatgccatccccgmagagattcttaacagaaatacttaagtagggagctatgtaggatgatcaagtctagaggtctaatgtacaacatgaggactattgctaataaaattgtatggtatttgggatttttgttaaatatgtagattttagctgctcttgtcacacacaaaaacgtaactatgtgagatggtaggtaatatcatgttgtaaacctcaaacatacacaataacatttatttaaaaaataaactgggctgggcgcggtggatcacacctgtaatcctagcactttgggaggccaaggcgggcagatcacctgaggtcaagagttcgagatcagcctggccaacatggtgaaactccatctctactaaaaatacaaaaattagctgggcgtggtggcgggtgcctgtaatcccagctactcgggaggctaaggcaggagaattgcttgaacctggcaggcagaggttgcagtgagccaagaccgtgccactgcactccagcctgggtgacagagtcagacctcgtctcaaaaaataaaaaataaaataaaaataaataagtaaataaacaggatccagaatatagaacattatagaagacaacctaggttcacacaaaatttaatgtcattacaaaggagtggtgtcaattatacattagaagggactgaagctgggattggcaaactatagcccatgccggctgcctgtttttgtaaataaagttttattggaacaaagccatatctattcctgtacatgatgtccaaaagctgctctgaagccacagtgacagagttgagtatttgtgacaatgtctatatggcctgtaaagcctaaaatatttactctctgtccttgtttcctgacagttggatttaagccacctaacagccaaatgcagtgcatgaaacttgggtctggggggaaaataaaaaaaaatcaataaacataattttggggcaactggagatatttaaataaggtctgcatattaaatagcattactgaatttttatgttttaattttctgaggcgtgcaatggtattgtgattatgctgtgcaatgcccttcttcttaggagttgggtgctaaagtatttagggcttgtgccatgatgtctctgatttattggtaaatggtttagcaaawatatatatatatatatgtacatggcaagaagaagagaagaaaaaagggcgggggggataagagaaaaagcatgtagggagataaagcacccgtggtaaaatgttaataattggtcagtctaaatgaagagcgtacaagtgttcattatactgttctttccacttttctgtagatttgaagagttttttaaataaaagttaatttttaccaaagttaaatttgttcctctaggctctgtcctgaccttcatcccagcagcttcctccaccttccagaattcccttataatggagaaatggttgggagttagatgtggcagcctctcctgctaagcrggtgctgttaccctgtaaggcagccccagcagggccttcccttggtaacgtggggattttgcttgttgtctcttgcacagtaattccatcaagctggtgaatctgctctccatatttatcagcacgtggctgactgcagccgggttcatccatttggtgagtaaccttgaagacccttctgctctcgcttgcctgcaacaagaccctctctgagtcattttattacctaaaatttatcttgctggaaattaacttcacctcggttgtagacaggaagatgggaagcaaccacacaattgtctgggtttccaamctttttaccccaaactagttccaaatggtgagtaatgtttgcactattaacctgcatttttcagttcattgctcattggtattgtcatgggggctttggtagattttccttctgtctgcaataactatagtaagccacaagatggcagtgcttcctaagcaaacacctggaraaggtctggggacaaggttggaagttggacccacacctcctagtaaacaacaaattcagatccctcaatttctttccacttccgccttacgaaaagccacctttgattattttgtctgatttgtacctcaaaaatgttcattctttttcattagtgactctttgaaagccttgtattaagtcaagcccctcacaccacccgaaggcagactttccccctgcttttagagagcacagccattgtgggaagtgtgtttcatgcaaacatagactgttacaactggaaggagcctcgtctagctctgagactttggataaagttgaccaccagtggctgagcctctatttgcataagggatagaaggacgcgcttagctacccacacttgggatttaggtaattatcacccaaaggaagacaggcctgggatggcagtggttggggcatggggcctcacgtagtcaccagatctagagtctcctgcccagcccttaatgctgatgggattcatggccaaaatcaaccttaatcaccctaattcttgctgtaaccaagcacgaagcacccaaatcacatatgtggaggagatagttgtctttaataagatgatgaccccaccttactacgggtattagtgaagtcccttcaggttcaccaggaaacttttgtgaaaatggcacattgaggacaaactgatgtgtgaaagaggccaggccctggaaacattttgcagaggcagaggtggaggcctgggggccaccgtctacaggccctgtgggtggatcacaggcatatttgagtaaaattgggcccgcagctccctctctcctgagagtatctaaagtacctttcctgcccacctactagccttgttggcagatcaaatatgatggaaggacaggaaagtggggaaactgcagtctcgggccaaagctctccaaatccagccacacccatttgttgaagttttgcctctgcagagttgaacaggacctgtgtcgcccacaaaactgaaaaagtttgccagcccttgatctaacgggctgtgccagtgcaagctgttctcatgagctcactttccatgcccctgtgaagattccagcagcctcaaggctgggaccaccattgccaatttgcaaaggagggagagcagggccagattccagagatgctgtttgaatcagaaataagcagggcccatatatactctttggataaactgatggaaggaggcagccccctacggaagtgtttagaatttctgtgggagaggcagatccaggccatctgggccttagaaacccattgaggaaggtcagggacggaatctctggctctttccttgaagagagtgctctaaaacctggccagaggcaatgccctgaattttagctggcttcccacattttaccagaagaagagaaaaggcctagagatatttcccttcttgctttccctctctgtctcaatcagccaggaagacatctcctgcagctgcttctccactttctctgtgtcctgctcaggagctctgcatcctgactcacagaactcagcccgggaaccacacatctcgtgtggagagtggtgtgcagtagcaagtggccttcgagagtgccgagcttccgcgtttattgcatgtatacacttcaatagcatgtttttsttttttctcccctgtcccatttgctttaggtggagaattcaggggacccatgggaaaatttccaaaacaaccaggctctcacctactgggaatgtgtctatttactcatggtcacaatgtccaccgttggttatggggatgtttatgcaaaaaccacacttgggcgcctcttcatggtcttcttcatcctcgggggactggtaaaaaaaaatctttattatgatgttgattttgatggctgttaatattttccatgatacatttccttaaagctttgtattttagactgtattctgcactagaagcaagccttaacgttacaatcaggctaagtaaatccaaacacgatggtgacttttctgcataattcttggtgtattacacttgtcccatagatccaggcacattgcccttgtcggggacagccatttagccaggagcaaacctaattgtcttaagaaaagtgatgctgttaataagggagagtgtctaccccttagcaatgtaactcagcatctggtatgctacaaggacagtggctgtcacctgcctctggtagaagctgtcgatactttgtagagacagtttgcggtttcaagagctctcccttcccctttatgttcctcccctaacttccaacaaacactgtggctggggcctgccctaaagagaagggtccctacatcaaaggagagagagcaccttagtcttgtccaggcggacatccccatgtgagcagagtgcagttttgcaaacagctcactccattctgcagcggacacatggggtatttttgctcctttcttctaagaaagtttcactgtttgctttttaaaagtctacgcagctctttatgttgcactaaaccaccccttctaatgtaaatcgaggggatttctggccacacgttggcagttgctgcattttgtctttcaaagtagctcattttaagtttagattttttttgccatttatgaagcgagtgattaaaatcctaatccatacacagctttcatgtatgtacaccgtgcgcacatttatatgtagtgatgcatacacctctctctgttttgtatgcatagggcctatacattttaaaaatgtatataaatgtgcacatgcatgtgtacattcacgcaagcatttctacagcatccgtgaggtgcctatagataaaaagacccatccagccagccacaggccagatgtttgttggacaaaacatggcagatttgtgtttctccttgctatcttctcctcccaggtgatttcctaaatttcccttttgagcttttcagtgtttttttttttttaatagaaaaatgtagtttttaatcttttggtgtttattttcttttgtcactcataaaagcattgattctcctctgaattttaatgacaaaggaagatcttctcttgcgaaactgtgtgtgtctgtgcatgcacacatgtgtctgtgtgtgtttagtttcactagcatgtccccctcttgcctatttttcttcagcaagaagaactagatatcaccttatttattcctgtckcctttgtatttttctcgactgtgatttttttttgttctttagttgtcaaggtggccaatgtttgtttgtcttgtgtatttctgggagcttgctctcttcgtgcttttagttttttatgatccaacatatcaatatatacctttgcaggcctaatccttttgtgttttcagatcttagtgcccccaccctctgaacaggtccccccttttctttggcctgtctttttagtctctcttctgtctcctatcttctcaggccatgtttgccagctacgtccctgaaatcatagagttaataggaaaccgcaagaaatacgggggctcctatagtgcggttagtggaagaaagtaagtatgccaagaggttttgctgcctctgctgyggtagaatcctctctgcatgccatttttttttttttggctcttgtttctttgtttcatgcatgtaggcaatgtttgcccgctacgtgcccgaaattgctgctctcatcctgagtcggaataaattcggcgggacttttaacaaacatggaggcagaaagtaagtcagttgcatcagaaaagatgtggttgagtgactttcaggagtccctgtggaggtgccatctgaattctgcccctccccaaccccaccrggtgcttctgtgagggaaggcccagtttctgcatggggtgtgatgtcagaggtgacccgaggacgttgccacgcttggaccaactcccattcacaaattccaagagatgtaatgaatttatcctgaaaggagtccatttataactgggcccatattttctcttctgacccctaacaagtaaacaaaactcgttcattcttccatcatctggctatgtgataaaattctggtccctcaaactagtatgatgccctcctatggtggtttgtgtgtagcaagaacacaggataagactctggcagagaagtccttgggtggcagatccaggtcatctggcctactgcaaaggcactgcggccactgggaacccagttctcctcttcatccaggaggcaccgatcttatcctcaaagggactcattactcagctgaaattccttcygggcaagaaatagtatatttctggtagtttagggtactacatgctattcctgccaaatcttttgtttggcttcccaaatgtgaatgctttcttctcgggaactattttagtgtgtgctcagatcactttatcactctcgatatcaatgtgcaggttcaatagagaccccaaggttttttcctaagtagagggcagtaccttacaacctcaagaggagaatgccatgggggagagggggctggcagcagccatcctttatttatttttttaaagctttttctggagtagtcacctttgtttgtttttggttttgaggtataacttacatagagttaaatgtacacatctttaacatataaagtgaggaacttgtacctatgtacacacccagtcactatcatcctaccatccggatcaggacacagaaaactttcatcactcatgcctcttcccagtcatggacgttcctatcatggaactgttttgttttgttttgttttcccttctcgttctgtttcaaatgaactcttaaagagcttcttttgtttttttaagaggaaataaaatcagactgggagcattgtatttccctccactgctgccttctctttttgacagtcagccgtgtgggacagagtggaccctcccctttggtcagtgagtccagtgcttcctgagctcaggtgtccaggcctctgcacaggaaatgaggaggtggacaaaagggctcattttcttgaactacccacaggacacccgtttcctttcaaaggcacaaaggacagtgggccagaggaggccagttggcgtcttttccgggaggcagcacatccctccatcttccctctaatggagccctcccctcaatattatcttaacagccctggatgaggttagaaccaagctgttctgatttctgggccattggttggatccaaaaggccaartaagtccaaagattcccagtggtcatgtatcccatgccaagaggaaaacagcatctcaattcattttgccttgaaggtgtggacaggtctccataaagcagaaggcattctgagggcctggggctctctttatggcctccctatcttctgacgtctccgccagcatttcccaatcactgccccaagaagtcaataaaatcaattgccctgaaggctaagttgaaaatatttcttgactttcattccaggtgattttttttttttaatgaaataattttcctagtcaaatgtgggtgagctggtgggtgggctggaggccggcagctttyggtgccagctgacccagatggggctctcagcccggcactcactcactgcccccagtccgatccggtcatctttcaccctggcagttccactcaaactttcaggtgctgatgacttcagatcacagacttcctgccactctgttctggctctgtaatcttttatcaccgcttttagcctggktttctctctctctctctctttctcttttttttcttctccgtttatgaaaatgcactttgcttttaatgttctttttgggtccccactgttcctgaccctgcagacacagagtccgtcctgtcatcagcaccgggcctgttcactactttatgcattgtttcctggttcaaaagctaattactaagtagtttaaagaaggcctttggtcacttagatctttcatcagaaaatataagcttgggaaaggcacggtaataaagggccattagcaccctttgtttgatgttgtttttccagtcagtaaaacaagattgatgaaatgttatgtttggccaaattttgagttttcatttggaattcagtgttgagagaatgggctgtcagaatcaataagttttctttcgcttgggatatgggcatgtggtagtaattagcaatataaggtctttagttgagcaaccaagcatggattctggcagcaaacataatgagaaactacagttgttctatttctaacgtcaaaaagtttccagataaaattaaatgcatttgcaaaaggaaagcagctaaactttgttgaaagataaagttcagactcttaaaacagtgtgctgtgctctgagtttttgtgtatgcataagtccatgtgctctgcccatggacacacacatacatgttctctgctccccaggacccaatcaaataaatgcccagaaagaaattagaatgtatacatagttaagggatttgtttacttgtgcatattttrttcagaaatgatttctctaacaatatattaacttgtcagagaactcaaggtaactcatgatctaaagctacagagacataaaactttgaaattcaaagattatttaaagtacaaaatttaggcagagaagatcagggttttgtttgtacaacacccaaattcaggatatttgagaatatgaagatttcattggcatttcattttcagttttaatcaatgtgtttggcataatataaacatttcaagtagcattctcaaagcctcttcaccatcaacactatttcaagggcctagagtgccttacccaacattttcatcacctcctgaaggatacccagtccctgcagtaggtatgggtaattgtgcacatgtgcgtgtgtgttggctatttcatgtatgttatgatggattggagcatctaagaataggggtttgggtgtccacaaccaagggttcagtgagtagctgaggcaggtaatctctctgagttggagggattagagctctctgggctcttgggctgayaccctaaatcttattcataagggagccctcctgcagcccagcctgcctcccaaggccactgcctcctcctcctttcctttgtgtaaggtcaaagctgcttagagacagggaaggcctgagggctggtgacgctcccatggcctttgggatccccagctctctcctccctctcacagccccttgcagtttcccccagaggtctcctccctgagtgtgattcattccactcctggttagtttatgagaactgacaagatcgtggtccaaggtcacatggccaagggccatggaaaataatcagtcacagagaggaatccatctgctgtaacccccttgttagagggagtccagccgggagccacccagaccttgtgtttcccatgttgggacttgagtgactcaagtttgaggcaatcctaggcccaggtgtttgggacagagagaatgggatgggtttggattattctactgattcctggtagccaaatgctgacagggcacacgagaggggaatgagtcatgaaagactagatgtagccaaggtgggagaggaaagtgagtgtaattaacttgaaggaaggtcctcaggatgaagctgctgagccgccattctggtttggggaatagttgtcatggactaacccgtctcttgctccaattcargaaagctgcctgtgaaacttaaatgctgtggcttctcttggaacatttgcctatagagacaggagtgccacacacttcctgaaatgagaatgtgaatcagtgcagcctaaagccccaggactgccttctctggcaatagtaatacctacaaatatttgcatatttcagaatcctcacattgatcctgtgagaaaggtattaccatcatctccatttggaatgagtgaagaaactgaggaacagggaggttaagtaacttgcctgacatcacgcagctagtaaagagttgggctggggtttgaacctggacagcctgcttccctgcgtcctgctgcctctccatgtcatctcttgagactccattctgctctaaactcagtgatctcctattgtttgtatcttcctccacctttccgtataaggggagccagagtaccgtgctcatgatggagaggaagagaaaggcatgagcttcactttggggctgtctcctctcccctcctgcccacccactacccctaagggtcctggccccaggattgaggggaaaaagatggagaggggacaaaaccattccttcctttatttttcccatttggttagactagaattctaattccctcttgaacacttctagcaatgaaaggctctcaaggacagacagatgaaccacacctaaagtgagaattgtgccttttttgtggatttcaacattttcttccccttcctggctccatcctttaaaggtagttccatggagaattgtagtgatctgctaaacttggacttccctgctgggcagatctcacctgcagagccttctatacccttgcagatggaaccacctgttccctttcactccttagttagtctgccgcacagcacagagcagtatctggaggtggtttcttccttatcagtgaaaggcacagtagagccccacgtgaccagttctgcagggtgcattctgtgtgtttgtttcatagctttgacttggaatattcaccctcaggagcctgtatcccgctggagggagttagggctgtctgccttcaacctcggatgtggtctccacattggaaagagccttacattcagagagatggggacagtttgtcatgcttttctatttaaatatgaaactagagtacttaattatcttctttattgtaaatgctcatattttaaagaggattccatactttagaagaaataattgagtattcaatagttgagaacaaaattcaagaactaaaaacagcccagcacagttagtgacctgcctcactgtccattcctgtggcccctctccatcggttcattcactcactcggcaggcaggcattctctgtgttatgyatcaggcatgatgctgggttttgttgggtgctcagggttcattggcgaacaaactaccctcggaacctgtcctcctggagtttacagtctcaaggaggttgcaagcactgagcaagggtacaactaaagcaaatgccaattacacatttttaatgtgtgctgcaaaaccagaaaagactaagattctgcaactgagaaaaacagggattagttacactggataaagtagtccaaggaagcgacacctcagaggaggagatgctaactaacgcttgttcaatgaccttgacccagcttgcwttacccactaagctgggggagctaacactcttgcttttaaaatccaggttatgcaagccccacttgcaaacataggtcttcagttctacctccactagaggaagtcttaaaaactgattgctcgctcagaccccaacctgcctgagcagtgcttgcttgacttatcgggagatggcatcctgcgtatcttccctgcttcctgattattgggttatttttaaactctgtgtctttccttatatcagaatttggactctccttctcactcagaacctttgttccttcctgagagcgcacactattccctcctgcctggctgtcttgtatcaacgtggaattccactccatttcctccaccacactcatgtcttgwccaccagggttctagactgatttctaaaggatttggaattttaaattgtctagtgtgccagagcatggatcatttatttacaaagactcatttaatctatggccccatagcctaccctaccttaaaggaattaacaygagtcaygccttcatgtccatccattccacatgtgtttactgagggcttgctaccaggcactggggacagatgcatttctacacatccataaaaatctccaactataccacagcttttctgagctacacatcgtactatttggccacctaagtggttgggaagtccaatatcagggcttattgaaacctcttctcttggttctgagagagtcttgctacaacaccatttccctctcgactctttctgggaaggcatggcctctagcacttgggaatcggatttgagatgatttcatgttatactgacttgggccgatccacaggccttttctttccatgtttacttgtgtcttgggcaacagctattctcacttttcctcgcctgcaaggggcggactgctctcatgaggggtgtttcctataaaatgtcatttacgatttctctattgcagacatggctctggtcgaaatgtgactgaagctttgcatcctacacagacttagatccctcatcaagtagccattcagccctcattgcatgagccacgtgacttccccagcctgaacccctcagcaatgtctttggattcctagattttaaaagccataaattagcaaatcatcaacatatcaccaggaaggatcatctggtagcgattctagtcagaaggaaacacaggccccaataaccgatctttayaaagatatgaagaactgtagacagacagatacagtaaataagaagacaaatagataattcaagttgacagaacatcttggactgattaggcattctgctttgattagcattaaacttcttgggaacagggaaaacaaaaaatgagcttgccctaatactttggaaaaatgacctcttgactacttctgaaacgtggtgctgaggggtagatacccaaagcgcttgtcattagatgccatgtcttctgatgtgatgtgctaggtatcccttcctgatgagaggggtcttggygggcgtgggacatgggcacttctttcttggcatctgttttggattcctctaagccatatcttcagtccctttcaaacttgaagctctatttaaagagacttggaagcatattaaatcaatttcctgataatactgatagaatraagctcccctcctttcctgctgtcactcttcccttccacacacttagcaaaatgttccagctattgttctgaaaacaagaatagaaatgtaggtgggagatgaactgtgtaccttaaaaaaaaagtcgtattcaagcctagattttcactctcaaatattctttcttccattaaaaaataattcgaatatgatttctcaaattataattgctgaagattctgatcaatggctcctttgattgggtgaatccttgccgggtagattcagaatctcaggaacaattgcagccatccagactaggttgccccctgttttctgtcttcgtaccatgtcattcactctgctggacttctttccagagctgtgcaaaatggttcctggtagctttggggttccttccatgctgctgtcatcatactatgaaactaaaccaggaaactttctaactggccaagtccagtgtctctttttattaaaacattatagaggtcaatacattgtgagagttgtggaaatctgattctcttgtcccaagggttccagtctccacagccagtactggtgttgcatcacaatggcctgctgtcacccccagaaccacagggactgttccaaatatgggtaccagttgctggaaaagtaatctatctcccctccttgtacctttctaacaagaggacatgggggcagttcagagatagatatgtgcccatctcagtgggagcttatatgaccttagccattgactccaaaggcaaatgtcagctagtgtatagaacagccttaggaaaactcccattctaacatattggctcaacaaacaataatttgaatccccaccatgtgctgtgggtaaaatgtggttcttgctctcctggagcttatctgagattctgaccaatcagtaccacccaaggaaacagtggcagtgaaacagaagcttgagtatgcaggagcgtcttcccagtgaaatgctcttttttcaggaattttattcattgaaatcatggaagtgtacaataatcatgaaagcaagagacattagagggaagcctcccaaaagcatttgataattcacgttgttgaacatacccattgaacagtggagagcataggtaatagcagattgccttgttcacctaaaagcttacagacccagtaaaagaggggtgcagaaagatttgggagggttgggaatccgctgatgtgatcctgaggtccactcctttccagaccccacaaaggtcctgctgtggcctgtcatgcctcgtatcatgccttctttttacttttttccttttctttttttttttttttgagatggagttttgctcttgttgmccaggctggagtgcaatggcgcaatcttggctcaccacaacctccacctcccagattcaagcaattctcctgcctcagcccctcgagtagctgggattacaggcgtacgccaccatgcccagctaattttgtatttttagtagagacggggtttctctatgttggtcaggctggtctcgaactcctgaccgcaggtgatccgccagccttctaacctgtagctccttccagtccctgtgtgactaacagatgctggaggtctgctggggcctatgcaagtatgttgagtctacagagtgaatggctagcagcttatgctagctgtggcaacaccgttgggtgtggctggagaacaaggcaaagatatgtcaagttggttgtcattatgggagggtcagtcccaacagtatgtgctcaaggaccatgatacatgattcaccaggggtgttagggagggaggtggggctcgctttgtaaatcaaaaccctctcctgggcaaaattcagagccatttctttgcttggactcattctccctctattccaccttcatccctgaagagtgaggctgacctttgcctgccttagtcttctctcagtctctgcttgtacagaagcagcattaaaaatgaaatcgggcraatctgctttgatctgaaaaaaggaaagtgccattcagctccctgatttctctgtaagagcagagaaccatctagcattgggagattcaggtcaagggaagacttgcttattttaaaatggccaaaggccaccaagcccaaagtaatgggatgaataagatgcagaggggtgagggtgttggggagggaggcataggaggaatcagtgcagtttgtgagggttcagcaactgtggaattgcttactgaagaaagctgcagaattccccttccagagaggaaggaaggaaagaaaggaaaggagagagaaagaaacctaaatggtggtaatacttgcatactaggtaacagtgagaattaggtgagaaaccaaagtaaaggtaaacaagtctaccagttaggattctctggttgcaggcaacagaaacttatttttttgctgacttaagaagaaaagttttttgttttttttttttaaaggttagggtaccttagagattccaatgaaaaactgaagagcaagatcccagaaaggacagaaaagaaccagagatgcagctctgacactgaggaagtggaaactcgggagtagtcattacagggttttgtcatcaggttgaatcaactcccactgtgattagcatcagcccatccaagatttaagagtacccattggcctcacttgggcagaaaaccttcactaaaggtcccaagactgtatataattgggagactgtatttaatttggggaggagcaattccccaaattaaaatgaggtgctgtccacagaagagagggtgtatgcaggacaggcaaaatctaccaatgtccccggcactgagtttctcagaatttaaagacttggactgaggctccatgtaggctacaagctacaaaatatgtgtgatcatttctcaccacggtctaattatggaggtctaactgtgatttgggatggtggaggtgtagacacagatccctctagggtagctgaggttctgactgtctgcatgcgataagatgcaaagttttggcccaggtgggacatcccggtattccccactggggctgccagttgtctgtcctctraccttggggctctgctttagaggtgcctttgctgcactgttgggatctatttgctcagacttctgccccatttagggaaacagcagcacagcctgccacatccagaacagctccattgacagctggagaagaagattactttattcacttcctcactaggagggagaatgcatttccttcctttgtgattagcaaagtactagatgtgtccatggataggaaattatcttattgctgaacctcctttttttwaaaaaaattattttaacaggaaatggtgatagtcagggtttggggttgtgggactgatacacactctcatttgctttgtttttatttttctttatgtgtacagatcccttacaaacttgaaatatgctagtagattcagggtggtggaataagcctatggtctaaaaggcttgcagtgaactacctgttaacttttttctgcacttaccatgggatagagtctccaagatgcatactttgtcaaccaatccatcagttaacaaatagttcctgaaagcccagcaagttttgggggttccaagccaggtcctggggtagggtggagggatgaggcagcacagcctggagttaggcttcatttgcccatgatgtctcccctatctttactgaagtcagtctctttgagacattsagtaaaggaggaagtgggaaggtgggagttggattagtcttattttttggcagtgggggattgagcctcaagggaagcgctgggaaacagtaaccctgaaggacatgccccaaatcagggaaacctgcattaagactaagtagccaagaaaagcactaccaggtgagaaggaaaggaaaggccagcttgcaggagtgtcatggagaggtggtgatgcagacaccaagggttcaaggtcaacctaggggggcaaacgtgaagctttggtgctgaccactgtgtggtttaggtcgttgggtctctaaccccccacgccctgcttcctgtatgatacagtgctgctggttctcttgagaagtacttcttaaaattcattcccatcatgtcaggggctaccaatggtgagatgcattttgggaggagcaggacgaggaaaacacaattagaaggctcagcagaaagacagagagtctagcatatgtatttgatataaatattatagttttacagagacatctagatcaatatgtgccacatttcatctacctctttgacaaagtgagcacaatgtattcaggcaaagctgtataggattttcaatttactctgtctgatttattgtgacaagatagctctgggttttttaagttctttatactcgttccagtaaaaatggatatagtatctttaaaaataaacagcccagagctgtgcattttacattgtcttcctagagcgaggctctgctaaagaaagatctaaggcctccccgccctcgcagaacctgatcgcagtaggatttgctgccatcccttctctttggcttttttgagggagtgtgggaatggttgggggcagtggggacagtaaatagggaaatcagttaggaagcgattgcagatgtctagataaggtatgatggaggtgtgaactaaggtcggacagagaactggagccctgtgtgaggattcatcagtgtctggtgggtgcagcccagtcagcctgggcctcttcattttagtgactggccccaggtcactgagaactcgccccccagtctcccaattcccagcttaggttatcctccctggcaccagctgctttctttcatcagaaggcatgaaactgagggaggtgttgtgctctggatctggcactcatcttgcaacctgtttccacatcaaagagaagaaaggtgctagattaaacaattgccaagggctattcattcagatgctgagataaacttaagaacgtgggagggggcccaatggtgactattccatggtcacagtttcccttttcaaaggctactggctctaacaaccagtatctgaggcttgggaaaagtatgtagattttccttgtcatagacctaaaagtcatcttcagtggctctcttgatgcctcagtcactgccctcctgtcctcttctgccttctgccttaagtcacttcccctaggttgtcctgtgtacctgtggaattgagctctgaaactgaagttctggctcaacttgggcatgcaggctttcctggcccatcactgagaagagagtagaaggattgagaagaatttgtgggatttcattctggaggcagcgatgcttaartggcaggagaagcacacccatgtatatttagtgaagatatgcacatgaaataagcaactggcgaatttatggtgaccctcaatrgtgttcataatcatcaaacttcttctcatgaagtcattcttacccctccaatgccgtgacccaccrcactgcccttttcagttaaaccagcccatatttatggagccctgacccagcaccaggcactacttgctcacactggatgaataattcctctccagaaagtgccgttggatactattttggcattgaagatgcttccttgtgtttctgaggtggatcttttattctaagccatgacctgtcagcttatatctattttatgttacctttgcccaagaaatatttgtttacagatccagacctagcatttaaaaccaaaaacttcatcagatcagaaatggttattgattgaggactattggtcatcttcacaaattgagtggtcaggccctatagaaattggtcaggacaatcgctgatggtctaagaaagttcagatccacatccacagatggggagagatttagctactctcatagctgaactttcctaaatattccccattgtaaatggatcattaagattcttattatcttctagattccaggctggtgaggaagtcctgagctgtacatgacatgtctaaaatagacatttggggtagggcgcggtggctcatgcctgtaatctcagcactttgggggccaaggtgagcagatcacttgaggttgggagttcatgaccagcctgggcaacatagcaagaacctatctctacaaaaaccaaaagaaaattagccagctgtggtggcatgcctatagtcccagctacccaggaagttaagacaggaggatcgcttcagcctgggagttcaaggctgcaattacctctgattgagccactgtactccagcctgggcaacagagcaataccctgtctctaaaaaataaataaaatataatataaaataaaatggacatttgcatcactttgcagccccttagcttgctccaatcatatggcttcagttaagtttggcttagagttcctgaccggtggaacttatgatttctgcctgtaatcagactttgctaagactatcatgatactgcctatccagccagactctagtgatcttgcaaaactgtgatggtttatccactccagttcccagactaaacctctcccttggccagtggaggacccctccaacaccccctccaccatgtatccaggaggacctctgtgggtccatttctgcttgccctgaaggagcagaagctgagatatacaagcctctttcctttccaccaccaccttcatcttagtgggaactgaagtgggagacccagattgcatcctgggcaagtcacttttacttgctgtgggatgccaggcatatatgacttaaggaaagagtttcagagaggttacctgaaaagactcaggmagtgagaacacagggttgttgaaggattaggtgggattgcataggccacagaatactttatattggttacatcctaatttacagataccatatggcacttaccatttcatagtgcttaccatggagcagattacttggcccttccatgtatcatctccttagatatcaggataacttcatgaatcaggcaccagctctggcccctcaaaggctctggctttttaattgtaaaatgcaaaattggtacattgtccaagactatttagttatttagtgtctgagctgagttaacacagggctatcagagtatgaatctcacatggtagatatgtaggcatcatggaacccaacagagataactttggatggggatcttttttggcattcttcaaatcatgccctgtgaacaaccattactctgcctccaatgaggtcacaccctgctgtctatcttaacatatttgtgttgatatctctaataattgaggatgcaataaattctagttctcttcttcctgcaataatatccttccccaaactatggccctagaatcttcaaaagtcttgaaaatatttctggtaaataaatgttccccattcaccatccatccctcatgctcttgcagggccctcctcagacacaggctggcggaagcagatctcctaataccgattgctgagttagaggcagcttctccccatccatcaattctaactgcattcaaacattttcaatatgtgggctccttgataactttcactgtatggaaaacaaaatggagggaaatgattattggcacaaaagggggaggccataaatcttcaaatcagatataggacagattggaacaatatgggttctccaaggttgccatgataatgtacctaataactctccttgggcaaaaaggcaatctgctttcaatcaatctcgctttttttctgagcaaaaataccaattacgttgaaggaaggttttttttcttccttttttgataaagacagctctccaccccagaaatcatgctgtggctaaaagatatatattttcaattgtctagaatggtattggatagctagcaccaaatgaaaaaagtcaatcctttttttctcctcactcttgccagcatttgtctacttcttaagagaagtgaaagttaattaaaggcttaagggataatattgattgcattggaatatattttatatgtacccagtacattttcaaggaagagaaccctgactttttctaaggctgaataaatcagccagctgagcttttgattcaagggtgagaggggggaactcatcttttccccttgcacttctcacacatctttcctagggatgaatgatttcagagaggaggaggagatgctggctgatgttcattcagttctttgcatgctgggtaggaagaacgaatgttcaggcatttccccagacctatcattgatttgagcctagctttgagtaataaccaggcttatgctggtatagaacttcgaactttacaatgcctggcacaggaggccggctgggtggtattaacctctcagcttcctcctgcactgaatgggaataaatactttgcccacacccttggtcgcagagcagggaatcacatctggcttactttcacatctaagtgatgagaacagcctcagccacgtatctgtcctgtggagatacccacgcattggattcatgttggctttgctcctaatcttggaagtctatgtgcagaggatgttagaatggcaaagtagccctattgtcagttgcaaggaagttaggtcagtaggggaattctgtttctcattcacttcaaacatatttggcaaattcaaagtctgaaatcttattcagaacgtgcaaatttatttgaagtattttgtccatgtaaatgtacatgtgccacaagaaacattttaaratatatgataaaatgcatatcatccaaatrttcaatctatattgtgtattctgatacactgtgtgtcacactgtcttagcctcatactactcaccatatactaatgagggggttagtcatatgggctttgggcataaaatttgggtgggtggctaagggaccttcatcaacctagcaggagagcaaagtgatcatgttaagacatctcttctgaagtagctcattgacactcttccctcaccttggtggccgctgcgtgcctgattgctaagtgcaccaccgtaacaataacagtctataatggtgatattattaactgcatcgtgcatattattgatttactctttgttctgcatcattatcctttcaccaatgagtttactgcattattctcacatacttagtcaagcaccaaattacaacgaaagggcaggctcttataatggcatctaatggaacattgcataagccatcatcactgcctcctattatgagccacctccagccaatgagctttctgccttagtggaatgtgcacagagcaattatgaagtgcaagggacatggccattctaaattttacccaggaaattaccatgctgcatgttcaccacctgcccaagtctcagagcgcagctagagactcagatgctgtcactatgagcctggggggcacagggacaggagtygagcctcttgctacatacagtctcttcactagaagccagtggttttatctccacagtcagtccctggctttttgtcttgtggctgactcttgcatcaaatgctcactcctgactgggcattatgtggcacatataagtggccatgacattgcctggtgccaaagtcagattggccaggagccccgagcggttggagggactgtcagtctcaacagttgtggggctcatctcttccgggtgagccactacttccagaaacagaagtccaaaccaccctcaaacaaggcgagcaattccagcctcatcccttcccagcatctccccatcttgaggtaaattcctttagctctcctggaaatcccgggcaccctaaggaagcagccctctggggacgcacagccagctggcatgatcttccattccataggcatcccagccccatttagccctgagtaatgctcacttactgtaaagtgttacatgcccccattgtcggaggagttatagtggaaaaatgcaaaatttcctttttactgcttatggccagcagaacctataacgtgtcaggccgcacattagccaccctgataaaagtctgctttcttacacacaaaatcatcgtttcagcaagatttgttatctcattacctgataagctctatgtcataaaccaagactcatacagtaaatctccccggaggacgctttgtgggcagaaagggagagatatgaatctgcaagggacttgataatgcagcatttaagcacaagcataatgtcacttattgttaaatgcataaaaccacttggccaaacagttgggcttttaataggattttgtgcagcatcaggtgagaagccatatggcttttctgtctaggagtctcagcacctgctagcaccrctgctttgcctcactgccctctggggatgggagctgggcttttatggaggcggagggaggagatgaatgcttcccctgcagctgcctggcttctgctgtcttgccagggggtgggatscagggtcctgtcgtggtgcctggcctgatctaactggcctctcctgttcaggcacattgtggtctgcggacacatcactctggagagtgtttccaacttcctgaaggactttctgcacaaggaccgggatgacgtcaatgtggagatcgtttttcttcacaagtaagagcttcctactgctgtcagaccctctgcccaaccacacaccctgcgagggactccctgaatgtctgtaagagtggaggtcttggggaatggcactggggatggggccagagttgggtaagccatgatcccttttggcctcrttggagaagatattgcagaaccaatggaaagggaagcaacacactggttcaatgatgagagcagagtctgcctctgtggaggcgattctgggaccacatccgagtttatctctggaagaaataatagtggagctcattgtgggtccaagtcatcatcattgtccccttagcaatctggcgtgtccacattatctgctgtgggatgattagctgtatggtgtggatacgttaggagttctggagtcagttggtgaccaagcaagacaccaacttaagaggaagcaggacagaaggtaatagtaataacaactgccgttcctaggaacccccagcatgggaccctagcccgtcactgtgcatgcaggctcccatttactccacaaacagagtaaaaatacatattctggactcagattccctgatctgaatcctgactcaaccaactactggctgagcaagttacttaagctccctgtgcctcagcttcctcatccataaatcatggagatgatagtagttcctacctagttgggctgtgatgagaatgaaatgaattaatccatatgaagtgtgcagagcagagtcaggcgtgcagtaagtcttcaataagtgttagctatcagcctgaaaaataacatatatttggttgtataatccacttaggaggtaggtcttatcttgtatgttttacaggggaggaaagcaaggtatctcccttctacccaatgttgaggttttcaactttgactaatcctctttttagataaaaggtagtctgccccaggaatggagagaattagggggctccattatggtgacatgtgtggtaccatggtcatcttcttttatggagatggggctgtcatggggccagtcctggcaccacatcgcaaagtccaggacaaagctaacatgtttgtgctggcttgacgtgctgttgactacccagcacgcggtcctactctgaggttccactgaggtcggcttccctacaaactccctgtttggtggatcgtcgtcctctggcatttgctcacagaatgctagacttctgacttgtcaccatgttggggcaccaacatttctcttttctgcactgatttctccaaactttgaaaaaacagaccaggctatgttagcacaggagcaggtacccacaggttccattcagtgcttagccactgattacctgctgtgtggcccatcctctactgagcgttttggaaagttctctagaggtatagtgtgtaggctgtgcccccacatgagttgggcatttcaagatgaacacacatgcaaccattagagacaacatcaaccctgtgttatccaagggatgctgaagtcattttgatcaggtggcagaagtgactggggacatctctttcaaggagcatcagtctatggtattacccgggcaggcttctgaatgaggtatgacttgtcatgggtctgaaagactggtcagattcacagaggcagccacttttctctcatccactgctttagtttgaataaacaagctggtaaggtgtggttgctcatgcttgtaatcccagcactttgggaggccaaggtgggaagatcacttgagctcaggagttcaagaccagcttgggcaacacagtgagaccccatctatacaaaaatagaaagattagccaggcataggggcacgtgcctgtagccctcgctactctggaggctgtggtgggaggatgacttgatcctgagaggcagaggttgcagtgagtcaagatggcaccactgcactccagtccctgtctccaaaaaamaaaacaaaacaaaacaaaacaaaacaaaaactggctgctcatgcttccattgctaggattcacctttgtatccctaacatccatcaatgtcatacttatagtagatggcccagttaattaacctcttgaagctctgggttaataacatacctgcctatagggttgttttgagatttaaatgaattaatgctcatcatggccaggcatggtggctcatgcctgtaatcccagcactttgggagggcaaggtgggtggctcacttgaggccaggagttcaagaccagcctggccaatgtggcaaaaccctgtgtctactgaaaacacaaaaattagccgggcatggtggcacatgcctataatcccagctactctgaaggctgaggcacaaaaatcacttgaacctgggaagttgcagtgagcagagatcctgccactgcactgcagtctgtgtgacagagataaactctaagtaaaataaaataaaataaataaatattatttattttacttatttatttataatactattttactattatttatttaaaatgttatctgccatatagtaaatgttacaaaacatgaactattattattattgtcattatggacttcacaaatgttaggcaagtgttgacttatcacggtacctggcgtatagtaggttctaactaaatatcatctcccagtgcctagcacggtaccttatcgacagtctttttcatctctgcagaattaacaaatgaataaataggtcacttgtttaatccttgtcctccaaagagaaagatgtcagtacagatcagcaccaagaaatgtgatgagtcgcatacatgtgtgtgaatcaagaacaataatgagagtaaattaagtctgtctgtggctcctcagagtgatactttttgatccaggccttgggggatgagaagtccatgagacacagaagcagagataaggttcatgatggagggaacagcaggatgcctctcccaggggaaccttcggctaatccttgattgtattagtcagggctctccagtgaaacagagtcaataggaaatatatatatcaatatatctaatacagatatatatcggtatctatatattgatacatctatctatctatctatctctagagagatttattaggaagaattggctcatttgattacagaggctgggaagtcccactgcctgccaccagcaagctggagacccaggaaagctggtggtgtttgagtctgagggccagagagtcatagagccaatgtcaaccccagtccaaggataggagaatgacaagagatgcccagttcaagccggcaggaaagaagcaaaagggacaaacgcctctgtcctctgttttattgttctcttcagaccctcaaaggactggatgatgcccactcccacaaaggagggtagtctactgaattcactgattcaaatgccattctcatccagagactctcccagacacacccagaaatcacactggatctgggcaccctctggcacagtccgcataaaatgaaccatcccactagtggcgcagcccagcttccatatttataagataggaattccattcataccgaagagaagacrtttgtcctgaggtcttggccttcctaaagcccatgaacctctttcttttaccatggtactggtttggttttcagttgggctggggttttacttctcttgagtgtgagtcttttatttatggcaagcaaaagggtgactgtaggtcacagcctctccccagggctccctgtggaaattagagaggaaggagcccatggaggctgaaacccccgagtccattaaattaatagcgatttcttctctccctgtgtagcatctcccccaacctggagcttgaagctctgttcaaacgacattttactcaggtggaattttatcagggttccgtcctcaatccacatgatcttgcaagagtcaaggtaaggaggaagaggtgacttctgcttttattccatcttggtgtgggtctggggggagtcctgactctgtgctgaggggacacacctcctaggttggccacgagtcatctcctaaacacctaatgagatcaatcacataccagcaaccttgaggtcacccttccactggtcccaggacctccttctgctggcatatgcaacactacctataaccatcccacacttggactggtcataacatgaaacttgctttgctggattcctcaaaatcagctactcatcaaggaagtagaccagttatatggacccagtagctttatacaacataataatcaagtaattcctatattgaacacttaagttggactcaatatagctctgacttctattatttacatctgaaagaaacattaggctaaaatataaaataaaattttactaagcgataaaacatttgagctttcttttttccccatctaagacgcagggtgtaaaactaaacatgcagttatctgatatcattgataatgggcgaatctttttttccagaaactggtaatttagaatcttctcataaagcacacctgaggcttagaagggaaaggtacaaggcaaaatggcatctgctactttacctatgtaatatagattttgtaagcatgttcaatatttgcatgccagggggtgtacattaatataatgaattcactgaagtctaaatgctaactgtggtcaccgcataattttgtaaataatataattggccaagatgaataatccaaaaggatttggataaattctttctttatattattaaagaaatcagagatgatttgtgacataccacggaggatattatggcctccctcaaaatccaggaatgatctattaagtataacataccaagtaggacagattgcagacctgagccagcataagaattcttatgctcatagagtccagttaatcttgatattatccagacataactcaagttattgcttaygtaaaatcttatgagaacgtagggacaattgttattgttcgtggacctaatttaaatgcaagcaatcattagcacatcaaactcatggtcycctctaaggaataaacccctgtgggctcgtgtttggataagtcagtaggtatattttgagttcaactgtaacacattatttcatacatagatttgttgtcttctgaatatctgaatactaatcggatactaagcaatatggtgatgttatctgatttagagctctgatctcttcccagcctatagaaaatgaagatgtgaaaaaggtcagatgaaggacttcagagtgtacatttctgaatccccaatactcagttaccttgctaactggagagaagggatttaacccacccacctccaactcctgataggaagaattaggatgatggtgcagatggttgagaaaggaggtggggaggagactgaaaggcttaattaattgttatttaaagaaatctggaaatcctacaagtaagcaacgatgccaaatgaaaagtataattaccaaggtacatgttgtaccctccaacagcaacaagatgaaatgtttataccataacaagaacttggaacctacacttttgacaaaaactataatctctcaggctctcaggattgttttttttttttctttgcaaagcttccccaagaagctgtcaacagagagagactacactcgagcatggctatttatatgtttgtgttctgtgaattttcctttcggtgtcttagatagagtcagcagatgcatgcctgatccttgccaacaagtactgcgctgacccggatgcggaggatgcctcgaatatcatgaggtaactcttggggcgctgcggaaggccctgggcttggcagtctgtggctgttcacggcccttttggatcttctgcagaggactatctctatgaggcctttttgccccacaagccactgtacaactcaccagctgcataggcctgggggagccgaggctgtctgtgtgggttggggcagtggcacacagggtgtcaccaaccggaagctcaccctcagcaggtggcagctctagggcttacagctggccttgggtttgagattccttgagacagaactaggaaatagattgagatgggtgctggcctgaattaaagtaccatgttccctaaaggaaatgggcctgagatatcttaactaaaggcagatgcccccaggggacattttgcaatgtctggagatgtttttggttgtcacaactaggggaccgtgctgctggcatctgataggtagagcccagggacactgcgaacgaccctgcaatgcacaggtcagcccccaaaacagagaattgtctggcccagaatgttaatggtgtcgaggctgagaaaacccttactagggctttccaagtgtgtctacggcatattgattcctatcaccccaaaggggaatttagtgaccagttaggctgtttcatccagtttcccaaaattaatgttctttcttgaaaggcttttcagtgcttttaatactaatatgcatctctgagataacgtactatagaacactttccaaacctatttgactataagcctctgctcctctcccacctcccccaaccccccccctttttttttcatagagacagagtctcgcactatcgcccaggctggagtgcagggactcaatcatagctcactataaccttgaactcctgagcccaaacgatcctctcacctcagcctcccaagtagccgaggctataggaatgtgccaccacacatggccaatttttagatttttttttttagtagggacagggtcttgctatgttgcccaggctgatctcaacgaactcctaacctcaagtgatcctcccacctgggcatcccaaaactctggattacaggagtgtgccgctgtggccctgccctgccctgccctgccctcccttttttttttttttttttttttacagaacatctaggggaggtcatactgggaaacactgtgcagtgctttttgtgcacaagggttaggcctgtcaactgctaatattggccccaacaccagcaccttattcttttcttaattcagaaaaaaagcaattgttcagtttttgttccttgcataaacccagtagtcacattgtgtgacaatgaaatgactaaaaagtcaaggtattttgctccaggtagttagaggccctttggaatttgtcttttctgtagcataaattgcagaagagttaagagggctgagaggaaatgataaagggaagcttctggagagttgagctaaattcagtgggatttccgtcccactgcattcccaggaacttttacctaactgtgaacagccatctttcgggccaaaggttccccctctaccggtggcttggtttactgcctcctgggaacttacctgaggttgaaggtcaagaagttacctttacatcctgacaatgtttgcattgcctttgtctttgctttccatcagtggccccaagtgaccggagcttccccatcagtgaggtgggggaattcctccagtgcatttcagaggagccagtcctcccttaagcatctggtccttgtgtctggcaggcaacatctggcaccatcttctcttgccactcagttttctttggcaatatgcttagtgaggtcattttaaggaagtggatgcgtgaactcttctaagctttgggcttgccaggctgcagagagagggtggaacagattctggcttcacacctgggctcattcccgaatcagttacagctgcacagtggctacaccaggatcagggttgggtgtgtcacttgttcctttctttgaagtaggaaggattttcaacttttgacacctttttctgtcattggaaatgatttaaaaaaaaaaatgtaaccctttaaggaacctggcttcactgtcttcaaaattccaaatggaaaaccaaaagaagatgaagcttaatgttttgactccacagagatgtttggggctacctgagtaatagttttgaaatgggtgtttctcttaattgtagtattttatttaaaccctaactgtggtagggttaatatgaagacacataggtactagggtgactggcaggacaaggaggcatagaaattactggtcaagggcggggctcagtggcttacacctgtaatcccagaactttgggaggccaaggtgggcagatcacgaggtcaggagttcaagaccagcctgaccaacatggtgaaaccccgtatctactaaaaatacaaaacttagctgggtgtggtggtgtgtgcctgtaatcccagttactcaggaggttgaggcaggggaatcgcttgaacccaggaggcggaggttgcagtgagccaagatcgcgccactgcactacagcctgggcaacagagccagcgaggctccgtcttaaaaaaaaaaaaaaaaaaaaaaaaaaaaaaaaaaagaaaagaaaaaaagaaattactggtcaaaggtagtatcagaaatgtaattaagtagagccagaactgaggccttggctgcaaaaagaagtgggaagttcagggttaaaaatgggctttgtctttctcttatttgtataatcctccttcctcctcagtttaatgagaccaatctgcctcctttgaaattaaaatgtcaaagatccatttgaaatgagctaatgcagaaaactggctgaagctgtgaactgcaaggcagggctgacagaggctcaaagtccttgagttataagcgtgggccaacgcaacactttttcaaaaataaaatgaaatccttcaagtgcaaaaacgcagggtgaatttgtgctgggagaggctttagcgtgatccatttcctaaattygtacgttgcagcttttcagataaagctgctccctggctgccttctctccatttctgcactaaaaggggtgaagtggggagcgctgctgggtgggaagtttgtgggggtggtcataataaatgcacttgcatttctgattaggcttaggaggtgggcctttctgtggaattccattctttagccttccttgtcacagaaggaaatgtacaatgtcacttctgacagacttggtaakgacaaaaaccataacttacacgtggagagaacttttaatgatttcaaagcattttcacatctggtctcccatttgctgctcataccaagcctgtgaagtaaataaagcaggtactgttgctcccagtgtccagatgaggaaacaggaacagagagcccagggttttcctaaaggtcgcgcagttcattagtacaatagctgtgactggaacccacgtgtttccattcatctgcgctctgcccctccctttagcaccataattgatgtggggaggacacgtgaggcctggggtgggtgcaggccatgcttaacattgagtttggactgagggcaggtaggagacaattttccaccagatcatgacccccgcaatgccttggcacttatttttaaccagcgtttaagtcatcattttctctattagctatggaaggctgagtccttgatctcatcctaaaagccctgcttagaaatcattttttgtgatagtggccaagcatgtgtcacaattagaaccatttgtcatcctgcttgtttgatttgtcattgttgtctcaagttgttaacttggagaattggactcagcagattgtttctgggctagtccctagggtgtgggagattgcaaacctctggaggccccatgatttgggctcgctttcgatgtctacgtaggcaataagctggcagcccctgctccaggccccctactccccagtacgcacatgcatacatcccatctccaatgcattccaaggggccctcaaatttttcatgcccaggacacagactgtggctgttttgtgattttgttttcacactagcaagagrtatggtggtgggaatactgtttaacctggcccrgtgtctgcaacccctcaggatagccctggctgctggtcctgatgcaggataggtgagccccaaaatggggcttagcccatgaaggtttttagcttcccccagaaaagaattcaaaggcaagctgatggtagggcagaaggaaacagctttattgaagcagtagtattacagctctgtgactgctcctgcacagcggggctacaccatagagtagcagctctgggcaggctgtcgtatttatacctacttttaattgcatgcagattaaggggcagcttatgcaaaaatttctagggaaggggtagtaacttctgggtcaccgggtcattgccatagaaaggcaagtcccatgagcccagtgcagatagaagcaagttctttgagctttctttctcactgtccacccagacacttaggcaatcatattaaagggtttcctctttcatggccttctttgttcctcatggtggcttccccaaattgtatgtagtgagagatggaactgggactggaattcatccatgcattacaacttgctttcaggaarggacctggtatgtgcctgtaaagttatgtcactatgaacatattccaagagatagttgatttcataattggacaaygggcttgaaatatgaagcatttcaatcccctatgatctagtaatagtaatgttctagggcctagaggttatagggaacctcctgggtgttgccatggcaatggtaaactgacagggcacactgctgggcttgtccagtgaaaagttgcttctgccccatccctgtttcagctagtcttcaattttgtctggtatctgagccctgmctctggaatcaagtcctgcctcctacctcagtcccatgggtaccccatttggagacagtaaaattgatctttttgtcagacaccatgcataaggcagacctgtctcagcattggttctttctttttcagagtaatctccataaagaactaccatccgaagataagaatcatcactcaaatgctgcagtatcacaacaaggtaggagtgcgagagcccgctccaggtctgaagacccatccacaggtccagcctcttcttcctcattatacaggctcacacamacacacacacacacacacacacacacacacacactctcacatgcccacatgtgcgcaactcaaagacctgggtaaagaggtgtgattgttaaaaatcttcctgggacatttctttctttctttctttytttttgggatggagtcttgctcttgttgcccaggctggagtgcaatggcatgatcttgactccccacaacctccacctcccaagttcaagcaattctcctgcctctgcctcttgagtagctgggattacaggcatgcgccaccatgccaggctgattttgtacttttagtagagatggggtttctgcatgttggtcaggatggtctcgaactcccaacctcaggtgatctgcccacctcggcctcccaaagtgctgggattacaggcatgagccaccacgcctctggcccatttctttagtccaaacaacgtgtttgcatttggtcactggaaggatgctccttcatgtactgattcattcattcgggaagtgtctattggaacccgaggttcagaactattgatttactcttggatcccatccayacttaagttacaacaacttttatttgtatgtgctgcagtcatttayttattcagtaaatatttattgaatacrtactgtgtgattagcactctccctgacacccacaggaatatcagtgaaggagaagccctattttgtgtcctcggggatttagcagttaaggtgtagaatgctccaggcaagtgagtgataggatttctctatctgagaccaggtgaactagtgagtgcataatgcgctctgtaagagtgtaatgtgggacacattcccagagtcgagatgagaatttgcagagttgaatcaggaaaatagtaagctatccagagattaaagagaaaggaattttccttgtgttatagcttacagtgggggattgattagaaagaagacaaaagtcagagtctatgctgtttccctgtgattacttctcagtaaaccagagtccagtgtctcattcaaaggcagtgctccttctctcrgccagtcaataaacttccaaaaaaacagctttaggggagggaaggtggcacctttctccatttgatgcagtaccagttatgtccttaatgaaacctagaaaccggaggctgcccagtacctggagccaggtgtcctgtctgtacagaataactcgctgctgggttatgagtaacagcgtaccccctcttatgggccatattccctatgaaataggcagtcaggtgatgcagagaaaaaccccattctgccaaatgcaccagtgccatgccgttatttcttaattgctggcaagtgctggcccattttgctgtgtggaggcccatcagaggctgtcactgagtggagcctgctgtcagtgactggcccaccatccagaacggctgactgctgccagccactgcccagccctcggcaggtggctcccttgcagaacgtgttgttctccagccaacggatttggtggtgggcacccaaggtcacattcgcctgtttgtctctggaaaacccaaggacactgaagagataaagtgaggatattggtaatgtacgggtgtcaagctggagaagtttttgatggcagcccttgtaggtggaggtgaattttattagcaaggctgtgactagtgacagctcctgcagcaacgagctctccttctttcatttgtgatctgaaatttcatttagtgtgggagtgctttaagctgttgtttagatttttggctgaatttagattgaataggaaaattaatgttgtatgtttagaaggggttgtcagttccttttttttctctttccaatgagtgctgatgcagcatcttcaagaaattaaggaggattttagctgtggttattgtccaactcaaagcagctcagccggcctgggatccagacagtccctggtcagtaatcacatgatcatagcaacctgaatgtgtttggcaaacctctgtgttgtaattattcagaaacagtgaggaagatatcaaccaattcatgattatttgcttaaaacacattttgtttagaaccatcccaaactattcgagttttggggttgggcagaatcacttacagatccttggatgattagtcaggacacagggaatagagtgactttgacacagggcattttgttgttgttgttctttcatatctctcttctagagaaagaagaaaacgtccactcatcattgtttgtctttcattccttgtagaattgcaaatggamattcttcaccttgcttcacagttttgctgtgtttcctgagatgtttcctactctttcaatacattttcttcctcttccctttcaacattttttttctgcctttcttggcactttttgctgcactcatcytagatgcttagagatctccatgcattacaatttgctttcaggaaaggacctggtatgtgcctgtaaagtcatgtcactatgaacatattccaagagatagctgatttcataattggacaacgggcttgaaatatgaagcatttcaatcccctatgatccagtaatagtaatattctagggcctagagggatgtagggaagctgcctactttctctccatgtaaaactggccctgagtttgtcatcatcataattgtagacatgtgtgtcatattttatggttttaaaagagctttgacatccattrtcttctttagtactcgttggaccatctgtgcattttagcatcccagggtaacttcagagcagggcatctaagctctgtatagacagcgcagctctgctgggcacaaatcatggccaccactctgcagccagcgagcggggagacagaagagcttactgccaccgactctttaaatggagccacagcccattgaaccaaactgtggttcccgagagtaggcattatagaagggctgatgctctccaaagtgtatcttttaatatcactagaattcttggagagaaacgctttcatgctggccatcttttaaatgctggccctgcatcttctgatttgagtgtaaatggctcaaagctcttcaaggaaagattggtttataacttcttggaaaagtatcactcctgatgatttacctstcagtggattttttatttttcccaaagactctagtgaaagaggcctttatctctggaagccaagtcccatgagcccagtgcagatagaggcaagttctttgagctttttttttccactgtccaccctgacacttgggcaattgtattaaatcgtttcctctttcatggccttctttgttcctcatagtggcttcccaaaattgtatgtagtgagagatggaactaggactgaaatccatctctcctggttttccaggacagcgtatttccagttccttctccatgagaggagggaggggtggtgaagtagcagaaatgaagggcagccaggtctgccagacctgctctttatattctccaagttagggagagaggatttgcctccagacttctgggcactaacactggcatttttcatcagactcaatttacttcaaatggaaaaggacgaagtttccagaaacaaaggatttatgttcctgggtcagtctcttctctttgtttcatgcacagagatttccctccaagcattcagcaggtcaccctcactccttccctgcgttggagaaaatataatatccaaaaaaagagggcacagaaccctgagataaggaacaaactcaacttttctatataatcacatggccaagtgtcaaggtggacagtgagaaagaaagctcaaaatatgcctrcagaactcaaaccagacagggccatgggggacccaaggatgaaatgcctcagccttataccttagatagcacatgcggataggagagactttctctgaaaggttttgcttgtttgtttgaaggtgccatgaaggttcagagctgtctctttagggcttggaccaaaaaaatctcctttcacacacaatgcttgacttgttcattacttaaactgaatttctcctcattcctctcaggttctcagatgatattactgcaagtgagtatttctccagttataccaatgtgttctctacgatgcccaggaagtaaaagggaaagtggccatctgaagccactggagagtagggagaggaaggaataaagggtagggctagttgttggaattgagtctgcagtgtggggaaggtcctttgatagtttgacagcaattaccacttgctgtggcccctccatgagactatttaaccatgctctcatcagggagggcactgtcatctctccctggagtacccacttttggcttaggatgcacaagattgtcacagaagcggattttgcaagaaggaatttcayaagaatagtatttttgaaagcagagtgtggaacccttggacttgctctttgttttcacaatggagtcttccatccttctagttcaactattgtatattgttctgaaagtgaagggaatgctcccttggtgctccttgtgtttgctgagatgtgcagagaaataataacttcaaagccatagaatcttggcactagcagagacttagaagggctctctgattcaacctcctagtgcagagcaaaagttctttccatagtaacttggagaaatacttactgagtcttagggacaaagacctttcattttttaaggtaaccttctccgtttggtagacaaattacatccttaggaagttcatttataaaacaagacaaaaatctgctttcttggaatatataccagtcagtcttaattctggcttctagaacaaagcaggacaaacctaatcttgtacacagcagcacctgaagtattcagatgtaaccatcctgtctctgtgaggacgagagccttcttcaggccaaatattactggctgtcttaactgttcctcaaaagatcttttccagacgctacctcctcttgtctttgtcacttttctctggaagttattcagttgatcattttccctctttaaatctgactgaaaactggatcaagtactctggaactagtctgaccaattcacaacagaatgaaatgttcatttcccttgatctggggagcacttctaaaaagtaaacactggctttctctgtaatgtcacatggctagcctaaaatttgaggttttagttacccacacacttaaatttagctttgtgtgttttgttttcttttatttctctcctgcctgctgccaagctaggtcttctcattttgaatttatatagttgattttttttarcctaaatgctgtacttgacatgaaagccttgtaaatctttttagtttggtcttttgccgatttttccaactctggagaaccttttgaactttgattctttcatccaatgtattttctatgactctctgcttcatgccacttaaaaataattggatgagcatgcctctgggttcttgtctcagggcctgacataagggttgaataggaccagtccatttgcaagagattggaaacgtcgacactgtgatttacctgatgttttaggccagtggttctcaaagtgtggcccctagatcaacagcgtcagcgtcacctccaacttgtgagaaatgccaaattctccagccttaccccagatctactgaatcagaaatgctggtggggggccagcaatctgtgttttcagaaactgtacaggtgattctgatgcccgctcctgatgcctgggagtcactgatctggagtattggaaaggcaggtaaaaaagaaactgaaaatatacaggcatttggcactcctacggtctattagaggactcaacttaatgatttagctagacatcctagtaacccaggctgttgggtctgtcacaagaggaaattccctctgggctctatttggctaaatgacaaacccaggggaggacttgggcttggtgggtgcagaagcaacagtccagagagactgaagtgtgatgagcagaagagttgcataaaacagcaaacatcagaccgcagcaagggaaaagaagggcaagactggatggccctgagtggttgggcaatgctgcatttcccagaagaratgttaaacaattgaacatttaacagagcaaggtctcatacctgcttttctttccccaggcccatctgctaaacatcccgagctggaattggaaagaaggtgatgacgcaatctgcctcgcagagttgaagttgggcttcatagcccagagckgcctggctcaaggcctctccaccatgcttgccaacctcttctccatgaggtcattcataaaggtaacgtctcrtcttattagagcacattagctcgggattccatttgtcgtggggttgagtagagagcacagcttaaactcaaaacagatcgacgggctctaaccacttgggttaaggagaaattccttgttacggatttgggcatgaagccaacttctttcaaaattatgtttttatttttatttggcacatccacggccattaaatgattgttcaaagcacaatcccctctttttttagataaaccacatgtttatctatcaacaaagcctccgctgttaaaacaaaaatatgatttatatacattccatatggcaacagagcgcctaaagaaaagaattatcattttgctcttttatatcaagtggctggtggacctctcactgtgtggataaatgcagaccatgtgtttgtgctgaagcccaaaccccaacagcataattcatttatttatttctgcacaatcaaggaggccagcaggactgacatgccgcggttgtttgaatggagagcgaaacaatgtactgagtcctcggcagcagtgccctttgcaccgagagacaggcggtctggatgtgttcatgtccttgtcagagctggctggacagacactccagagtccccaaggtggccatacctgctgcaccagtgcaggcaaggagagaaaaaaaaccgactctgtcctcccagggtgggccaggttaggattgtgtttccagagccttgcattgatcgcccagccactagcaagggggcttctggagcctgggataacagtcactccagtcctcatccttagactgttcttagattaggcagtcaaggtgacaaaccygtgtgtaaaacgggtctagcttgagcctttctgttatggcatgggaggcagttagctctggatctgggcttacatcttgcctcttactatgtaaggagcagaattaatagctggcaaggtgggaaattacatccttagaaagttcatgagtcagcacgaggtccataaaggaggctggaagctctgcaatcaaaggtatgagacctcctgccttttgctgtcatrtggctacctaattgactgccaagttccttgatggttttgaggaaatggcctaggttgcaataagagggatgggtgggaagcatgaggatacagatgcattggtgctcaccttgggcacctatgagtgatattatttagagcaggagtttttctaagtccttatccttcgtacctgccaaatcggcattatgyagccaactgatagttaacattgctccacataaaggaacaaattgctttggagctccttcaatcactttagcaacactgatagcaagggataycttgatttaaaaaatcctcctatgctcattatgcagccaaaggtctcagctcagcagaactctgagctcagatccagcttacaaataaagatgttgcattcctttaggtatcttctttaatccaggctgctctcatcctgcatgggtggaactgaatggaggtggcagggaggtctgtgtagctgtgtttagagacgagaccctgaagccagatgtagccacgtgtctcccagggatcttatgttcaacatgaaaagcccagactcaggataaaggactgtcaccacgagaacttctctggctctttcaatcaagctctggtggttttcttccagggcatggcccatgggaccaagcacatggtgtgtggagctgtgctctgcttcctcgtgttgatgtaacatgggctttggcagggccccaccacagatggggccccttgacatgcgtatgttttgattttgtggtgcctgcatggtaactagagctgtctgtcaaggaaattaataaaatggatgtgatgctgattcttcagtgctattagcagcagggaaaacctctgcccaaccttcctccagaccctgatgggcctcacctctaaagccaaggatgtccgctccagctcagctaatcccattgccaagttcctatttaggaagagcttgtgggaaaggctgggcctggccctggtgtaactgaaaacacattttcctctgggggttatgttaccacattatttctgtataaggccaattcccgcctgtttggaagtagctctctgaatatgaccttttgacactgagatggtctttgtgttggaattggctaaggtacatgacctggaaatcacaagccttcccctcatatatttttctcagctaaaatagagatgccttattcacatgctccccattctacattgctatctttgtgtacttacctccaaatcccagatcttcgtctcctttaggtcatggtgaacaccataatggcaccctccttggcatgttttatgtattatctcccattccagggatcacaaagccctcacttactttygttgggggtggggggtaggtggaaaagtaaacctacaaatggattattgtttacagaaattgcttccttctccaatgacctccgtatcctatgacggagaattcatcaatatttccatggggacaagcaggcctattaggatggacaaagaaggggtgaggctttggcagcacttgatcctttgggaacaattagsatttytggaagccaaggtaaagtgttagctcaccctctcccttcccctaggccggtcgtgtctgttttttggtgcggcagaacccctgttaaaataagagaaacaagactgtaacagcaaagatgtggcacaggcagaagcacagtgactatccactgggctttttaattttattttaattttttgtagagaccagtctccctgtgttgtctaggttggtctcaaactcctgggttcaagcaatcctcctgcctcagcctcccaaagtgctgggattatataggtgtgagccacttccactgggcattttatcatgcatgagaccaaaatgccaagactgaaagtgggggtgatatgtttaataaaagaaagagggattactggccaggtgtgttggcccacacctgtaatataagcactttgggaggccaaggcaggtggatcacctgaggtcaggagttcgagaccagcctggccaacatggtgaaatcccttttctactaaaaatacaaaaattagctgggcctggtggcgcatgcctgtagtcccagctactcaagaagctgaagccggggaattgcttgaacccaggaggcggaggtcgcagtgagccaagatcatgccattgcactccagcctgggcaacagagaaagaagaccccgtctccaaaaaagaaagaaaaagaaagagggactactggcatacaggaattacaaaagaggcccagcctggaggtaccaagaaatatggagcaatgcttctttatctctccatcaatgccactctcaaagataccaaccttaggaccctaagtctttgtccctgaaaacctcactcctatgtggatatatctctgaattgatctaaactttttaggaatcttttttatattttatatacccccatatctttgggggtaatgaatttcttaactttgctaactactgctaaatattttttttctggmtatttgtccttaatttactccatttaaacttcaaggcatgccctctacagcttctgcagtgctaggatttaacaaatcttatgctaattttatatctaatacctttaggaaagagactcaagctggcaatccagggatcctccagctcagcagctgctgttaaggacaggttaagcattttgtgcaataggatcttatttgaacccttgagttcctttaaggagttcgcacgaacatcctggtgcctgtgacttatctgcattcacatcatcagccagccctggaacatgctgttcatttgccactgtctgatctcctactcctagcctgtcaggttctagtgagactctccctgctgtcttctgtaaagacccaggcaatgaacttacttagcctatctgctattgcctcagccctgaataagtggccacacttactctctacttggcttcctcacttggatgtaatttaagatccattgatttgtttttgtttttgtttttgagtcttactatgcatacttagcttctcttcagcgtatgaggtttcaagttggggcatggcctgccatcttcatgaattgtgctatcattcttactaggattagctgtctttgcacatgacaaatctgtgtgctgctgctgtgtcgctgcccaccctctctctgtcctccagtctccccctacactacatctcatatcactctctccttctccaccgtcctctctcgtatacctctcccaccctcccactctcttacacgcctatcatcgacgcgcgtgtacacacgccctcggcggccggcgtcacgaccacggccagtcccgacccgaagtcagctgccgcgacgtgccgacgccaccgcagaatgcagacgctcagcggcaggcgcgcgcccctgtcccggcgactgnnnnnnnnnnnnnnnnnnnncacacacaaaacctggaacacagtatgctctccatgattatttctttgttgaataaatcagttttgagaatgaagaaaatatgttatgtatttctagtgttgtttttttttccctatgccgcaagatttggaatttgcgggtgaaatgttacttaatatcgataacaatacacgcttctctgtcatgttttctgtttctgaatgagaatgcactagagaaatcagaagcatgctattcagattgtatcttggctgaagtggatatggctggacacacaaagtttttgtcctagcactaaccatagccaagggaatcatttaaatatttttagtctgggttatgtttatgtgtatatgtgtgcttgtacatatgtatgtatagaattagtctggtttagcagctaaaaatgtaaatcaaggacttttaataatagctaaaaaatactgattcccatgtgctaaatcccgtattaagtgctttagctgcaatatcacatttaattctcacaatgaccatacccaaacttgtcactattattatcctccttttacagtggcaggcactatgggttaagagaatttcaacaacctgcatgcggatgtgtgatttggaattcacaaactcaggtgttcaaacccaagcaaactggttccaggtttgcccttgagtatactgaaaggaaatgtgagaaacgataagggaaaactttagctagtgccatcatcttagcacaaatcttagctttctatagttcattctatgtgaactattgatgcaatagagatgccctggggacctaccatgttccagacagtgcgctaatcccatcagcatccttaggtctaggaagctctggtaagcttcagaaagcttctgttctgacttggatgtatgggcacatgtttgcatagctccattctgtgcatcttctttacctttctgtctgcccagctctgcaaaagcagaggccactgcatcataacagttaccctaggctgggctgagtcagggtaaggaatgaactaggctcccaagaagggattgacacacactgctgttttgaggaggtgaaactaattggagtctaaaccaagtggagctgaagggctggggatgacttaggtaggtgcttctgggacaaagtaagtatattagggttctctacagaaacagagcaatggtgtctctstgtgtgtgygtgcacacacatgcgtgagagagagagagagagatgttgattataaagaattggcccacagggttatagtggctgggaaatcccaagctctataaactggagacccaggaaagaagatggtatagtctctgtctgagtctgaaaatctgagaaccagcaaagtcaatggtataagtctagatctgaaggcaggaggagactgatgtcccagcttaagactgaccatcaggcagagggaggaaattctcccttactcctcctytttattctattcaggccttcagtgggttagatgaagcccacccacatgggttgggttgagggttgttgggggagcaatctgctttactcactccacaaattcaaatgttaatctcatgcagaaacaccctccaccctcaaagacacacccagaataatgtttagccaaatatctgggtacactgtgacccagtcaagttaacattaatcatcacagcaagcaattcttattgtctggtgggtgtaagctctgctaaccaggttgaaggaggcataccagaagcagaactcaaccttgcgtggcagggttggagttgacaagagctctgaaatggggccagggctgcaactgataaggctgggattgaggtggctctctacttaggaaagaacaactagtggtaccagagtagagagtttgtctggcaaagtaaacccacatggtggaaattagatagggagatgcaagatgttgcttactctattacccatggacaatgtcaccctaaccacagatggcattatgacagcagacttctgcacatattcctcaccagtggagagcagctcccaatacaattatactcacttccttgataatctcaattattctcattgcttttagatacatagatgacttccatatttatatttccatgaagaacctctcccctgaacccggcgtcaccgattcaactgctgctcaacacctacatttgaataccccatctcctctcagacttaccattccacaatcgaattccttttctttgtccacaaacctgttctttgctcattttactattggcaatgccatccttcccatggctgaaactaaaaactctggagtcacccttgactcatttttaaaaatttatttatttgccctcaaacaccacattcaatacagcaggaaatcctcttggttcaagtttcaaaatattcccagaatcggagcacttctcaccacctgcactcctactactagctccaaaccaccatcatgtctctcctagaatattacaccagcctcctaactggtctgtctgctctgcccttaccaccccacctccaatctatcttcaacaaagcatccagaacaaccttctcaagcatgaatcagatcctgtcactcttctgcataagtctctccatggggtcccatctcatctgaataaagtccctacaatggcctgcaggtcctaagcagtcaggtccctggaacctcattggcttaagtcctgagtgttctcctgcttcttatgttagccacactcccttgggctggtctagggatttttacttcttgttccctctggctggatattccttccctgagcagctgcttggctcccctctgtccaactcttgttgtctttgcttaatattaatttctcagttgagtctttcctctaaggcattagaactgcatttttaaaagggattaaaaatgaattttttattgaaatataataaaagtgtgcatgtaataaatgtacaacctgttaaatacttataccctcagtgctcatgtaaccaggacctagattaacaaagagtacattacaaatatcccagaaccccctgtttttttttaaataagtcaggtgatactacatgatcgggtctgtttctggattctcttgggagaattgacatctccacaatactgagttctccaatctatgaatatggtatatttcttataaagggatactttatgattcaacaacttccctggcaaatacaggaaaatcaggaagaaagtaactaagctcatacaagttctctggggcttgtgagggtctctagagagagtagatgtcccacttcatattctctaggaagtatacagctgttcttctcagcttcattgggggatgaagtttccatgtggaaaaaacagaattgcattttaggaatctgcaccccctccccctccacacaccatacatccacatccttatttactctcttggctttgttttttcccgtggcactctttggtgtttattgcctcttttccctgggacaaggtgagcactgtgaagatggggctacttgctgaatcctcagtgcctagaacagcgcctgactcataatagctactcaatacgtgtttgtggagtaaatgaatgcatcggttggcctcagcctagcctgaccagcctgtattacagacagctgggtgggaccaggaccagcggggacttgtaatttggtgtgattttggtgcagaaaacttctttctttgctactgtatatgattcccttgccaaattaaagagctttgattcaatgtagaaacatgaaatgcaaagctctttaatccttgrcaaggattgtgcagaggctggttagatttggttataaagctcttcaactgccagaaaatccagtcagtgtgttgtttaagttcacaaatcaaaataaacacccatgaattgaaatgaatttgctaaaccccagtatcctatttgggtcaacgtcactgtgtacccgcttttcaccctacttagatcccattagatcagaggcttccatgcaggatgctgcctcccgcagtgccactcagtctgaccaagcccactaatgcccacctgaaagtagagtaacttctgtgaaaactatttctaataaagagagaagtaatccatgagctattaacagggattcatttcccctatggccctggtaatttctagaacattgaattaaagcgttctcagacctttacaaattctcaaggcaaacattattagcaaaaagaagcccatacagcatgttagaagatagattgccagaaaatgtcaacggatcttctgaataaaataaaagaagttgaaactcctttccccatcttcttcccttctccctccttcccccaacatgattagaaagtcatttcatgtgtcttatatgtttggtgaatcaaargcaaatgtacatgattgatggtgacagggaacacatttaactcattattctttactttgcagcaaaatgatttgtgtaaactgtctgcctagcattaaaggtaaagcaaacttagaaaccccaaaatgttatattttcatctaatattttcctcttggtttwatagctgtaatcacatatggattcttttatatgggtcttggcatggactgaacaaagagaaaggcagcacagaaagattacataacatatacacagagtccggtgcccagcgaggatggrgcccgagaagcggcaatggtcaggacttaatgcgaaaatccagtagaagctgacactcaccctggcccttctcggctggcaggatatagtcactgatgtgaaataagagccatcttattgaacaagcctctggccaagcatcagtctgagctctttcagagataattggcctttaattaattgcatgcattcctgagtccacctgggtatccacagactgggtctactctgcctccccactcttccaamtttttgactttggttttttgagtgccatccactgttagtgattgttacatgaaaatcgcaaagtcctatgtaagccataaggaataaaatatcagatttccttaagtctattggttgtcgttgccctaaggtgattttaagtgtgaatctgtgtccagaacaatgatgaggaatttggaactttgaggcaactattctacacatctaggggtgcaaaacaaggaagcaccattgatttgataccgtgggtattctgttaagaactttggaattatagtaatactttacgtttgcacagcacttttcagtttacgtgatataccttttttttttgagacggagatttcgctgtctcacccaggctggagtgcggtggtgcagtctcggctcactgcaacctccgcccacctctcccccagcaacccagccgctgcagcccccaggttcaagtgattctgctgcctcagtctcccaagtagctgggactgcaggcacgagccaccacacccggctaatttttgtatttttagtagagacggggtttcaccrtgttgcccaggctggtctcaaactcctgacctcaagtgatgtgcccacctcagcctcccaaagtgctgggattacagcatgagccaccgtgcctggctgagatatacattttcacttaaattctttatttgaccagatacacaaggaaaccagatacatatggaaaacatgccaaatgcaaagaacctaatgtctctgacctttcttcagttgtagaatagtaagccacaggacccatcaccatagctctttgggaggaggaaatcggaagatgacttctggttgcatggctggttggggaatggtagagctagggccagaacgctacaacatcattggcttctcagctcagcgctttccccactgttacacattgcttctccaagagaaatgtcttgaatgtaaacactgctttgttttatattcaaatcaatagcttctaagaatagaaaccactttgcaacatttgtaaaatgagcttatcctaggtttcccctcaaccatgaaaaactataaaaattaagctcttttccaaggtaggagatacatatgtctgccccattcccttggtggtagcttagtctggaaaagacccaggcaagtgctgtcttgtctagaccataatgccttgtagtgggaggatgtattgctcaagccaagggacgcaactgagtacagaagggagatgatgactggtttgttgagggacatgtaagaaagctataaagtttagtctcaaccatttgaaagaaggaagcagtaggttacagtgcagtatgatagacttcccatgtgtgaaatgtgtctgtaaaggggagtgagatccggacgggttaggtagtgctaataagatgaagaaagaaaagtatcttggagaaaaaaatatagttaatcctaatgtttacagacaccttctgatcataacaaaaatattcaagtaactcaagcaattcgagtggaggtgttggggctttggattgataagtcctcaaggttattagcagagtaatccatttgcattataggaaaatgctgaaggtacatgattccagtaagatttggaaatgattatagttttccagaagtgtttttcattttattttttaaattaacatacagtaaagttgattttgtgtatgtgtagtcatgcaaccaccaccacaatcaggatacaggatagtttccatacccccaaattccctcatgctgtacagtcacaccctcctgtcactcctaggccctggcaaccactgatctattctctgtcattacagttttgtcttttcaagtctgtcatgtaaaggcatcatggagcatgtaaccttttgagattggcttttttcatttagcatagttcccttgacatccatccaggttgttgcatgtatcagtattccatcctttctgttgatgaatagtakgacatcttatatgcaggtaccagtttgtttatccattcatccattggacaccatttagttttcctccagttggggcgatcatgaatacagtcgatataaacatttacatggaagtttgtgtggatataagttttaatttctctagggtaagtatctcgaattaggattgctggattatagggtaagtttatatttaactttaaaagaaactgccaaagtgttttccagaaggactgtaccatttatcattcccatcagcaagcaatgcaggagtttctgtagctccgcatccttatcatcacttggcattgtcaatactttttattttaaacagtctagtaggtgggcagtgtggtatctcattgtggttttcacgtgtatttccctactgatgttgaacaccttcccagtggttatttgtcatctgtatatgctttttggtgaagtgctgggtccattttaattgagttgtttctttgaatttgttttttactgtttaagaattctttatatattttggatctcgttggatatacaatttgtaaatatttgcccctaatctgtagcttgtgttttcattttcttaacttaaactttctttcctggaaagaagtttttaagttgaaatatttggagtttttcttaaaaggttaaacattgagttaccatatgactcagaaataccactcctagatatctacccaagataaatgaaactctatgtattagtttcctatggctactgcaataaattactacaaacctagttgctgtaaatatcacaagtttttttccttccttttctggaggccaaaacttggaaactgagtttcagtggagttagagtcaacatggtggcggggctggttccttctgggggctctagaggagaatctgtttccttgcattttctagcttctggaggctgaccacattccttggctcttgtccctgtcatcgcatcactccaacattgtgcttccattgtcacatctccyatttcttcttctttagccaaacctcctctaaaaagacaatagagattacatttagagcccacttagataaccttcctatcacaagatcgttaatcacttctgcaaaaatctacattcatcccacatgcaaaatacattcacctcattcccccatccccaaaagtctcaaccctgcaaaacaattcaagtccaaaatcagagctgaagatcagcaactcacatgtcccaatgtcatcatctaatcagttatgggtgagactttgggtgtgatcaatcctgggacaaaattcttctccatttttggatctgtgaaactagaaaacaagtactctgcaccccaaatgcaatggcaggacagccataggataatggctatagacagtgccattccaaaagggagaatatggaaggatgaaaggaggtaccggaaccaaacaacttcagattccaatatggcaaactccattgagcttcaaggtctaggaacaatcttctgttgcttaaaatgggcattacaaagtttgagtcctccaaatgtattctttttcaaaattgctttggctattctagtgtccttgtctttccatatatactttaaaatcagcttgcctatacctaaaaaaaattcctcctgtgttttgattggaattgtattaaacctatagaccaatttgggggagcactgacatctttactatgtcgtatcttccagtccatcaatttggtctcttcatttatttaggtcatctttaacttgttttacccagtgttttatagttttcagcatcaagattctgtacatgttttgttagatttatatgtaagttttacatttttggagctattataaatgacatcttaaaaaaattgggttccaattgttcattggtggtatgtagaaatatacattatgtttctgtattgaccttgtacctggcaatcatattgtaccggctagcacttcttgcagaatattgaatagagggagtgggagtagacatcttttctttgtcacctgtcttcaagggaaaacattcatttctttcaccattaagtatgatatgaactatagatgttttgtagatacctttcttttgaggttgagggagttccttcccatttctattttggtgagagttttatttttttcaatcatgaatggaggttgaattttgctaaatgctttcctgcmtcaatgtataggatcatgtagtttttcttctttagactgttaatatggtaaattacattgaatgattatacaatattgaaccagccaccatacattcctgggagagaccctagttagtgtgattatttcttatacatgttggtggatttggtttgttaatatttttatgaagaatttgtgtgtgtttgttttttggtgtatattagtttgtacgtttcttagactgtctttgattttagtgtcaggtaatgttggctttataaaatgagttggaaatctttcccttccttctgttttctgggagaaattgtgtagaattggtgatttttttttctttaaatatttagtagtatttggcagtgaaatactactaggtttgggcctagatttttttcttttctgaaagtttttaaatacaaattcaatgtcttcaatggttataggactattcaggttaaatagttaatcttgggtgagttgtgacaattcaaagtttttgaaaaattggtctaatttatctgagtttttcaatttatgtatgtagagttattcatagtatcccattattgtccttttaatgtgggcagtgataaccactctttcattcttgattttgttatttgtgtcttctctcttatttgtcactcttactagatataaagtttgctgatctttgttaaataatcggctttggttttattatttcctgtattttttgtttgtttgtttcctttctgcttgctttagatttactktgctcctcttctctagtttcttcttaagatgaagcttagattttggatttgagactcttcttttttggtgtaaacattttgtgctatatatttcttcctggtccctgctttagctgcattccacaaattttgatatgttgtgttttcatttttgttcagttaacaatattttctaatttcacatgaaacttctttgatccatgaattatttagaagtgtgttgcctaatttccaagtatttgaagatattcctcttatctttctattattgatttgtagtctgattccattatggttaagaacctacttggcatgatttcaattcttttaaatttgttaaggtgcattttatggcccagaatgtaatctgtcttggtgaatgttccaggtgagcttaaaaagaatgtatattctgctattgttgggcagagtgttctataaatgtcaattattactagtcggctaatggtgttgttcatttcttctatacccttgctgatttcctgtctgctagttctgcatcttactacgagaaggatgctgaagtctccaattataactgtggatttgtctactttagttccgtcaggttttgctttgtgtgtgtttgaaagtctgttaagtgcatatactttagattgttacgttttcttggtgaattgacctttttatcattatatattatccctatatccttgtaattttctttgttctgaagtctactttatctgatattaatatagccactcaagctttcttttttgattggtgttttcatggaaaaaagtatatcttttctcctcttttttgtttgaaccaaacctatctttaaaacttaagtgatcttcttatagacagtttatagtcgggtgattttttaaaaatcgattctttgaatctctctttcttaattggttgcattagacaatttatctataatattattatttatatgtttggatttaggcctaatattttatttgctttctgtttgtttcctgtttcagttttgaaaattagactaatttttcaaaaactttgaactctcttctttcttcttttgaatcattttgaacattttcagaattttttttggtctgtggtatttcttatacttctttatatagtttttaaaaaattgattgctcatgggtttgtaatgtacatacttaactttttaagtctacttggattccatgatttgcctctttaagtgaaatgtagaacccttaccaaactataggtttctttaccctccccattttatgttatagttgtattatgtattacagctgttgcaaactatatcagacaatgttataatttttgcttttatctattttaaagaattcaagagaagtatagtctattatattattctaatatttattaatgttgttgttttctctttgtttccttccttttagtatcattcctgttctgtttgtccaacttatgttagcagttccttcagagccatgctctggcaacaaacactgttttctgtcatctgaaaatatctttatttcactttcattacttagggacattttggtggatatagaattcagggttcaacattttaaaagtgttgttctactttcttcttgcctccattgtttctgatgagaaatccatagtsatttgaattgtggttacctataagtaatgagtcatttttctccgattgccttctagattttctctttgtctttagttttctgttgtttgcttacaatgtgtctaggcattattcttttgggtttatcctgttggagttcattgagattcttcaactgctaggtttgtctctggggaagttaaagaagttttcacttattgtttcctcaaaaaaatttttttttcctgcaccatattatttctgctttccttctaggattcctatgatgcaaatgctaaatctttttctgatgtatcagaggaccctgaggctctgtgtgaaacttttcaatacttttttctctctgttgttcaaattgcacaatttatattgacctagcttcaagttcattgactcttccctccatcatctttgctctgctgttgagcccattcagtgaatgttttagttattgtattttttaattgtagtatttccatttgatttttaaaattttgatttttaaattatgcatcccgtcttttacttctttacaaatgtgttctttcttagttatcgggaaatagtagttgctttaaggtttttgtcagattattccaacatctgtgtcatctaggcattggcatctgctgattgtctttttccatgcaagttgagattttcctggttactcttatggcaagtaattttttattgtgtcttggatattttaatttttttattatgaaactctgattcttgtttaaattttgtaagaatgttgataattttattttggaaggtaatgacctgctttattttattttactttattattattattgttattattattattatttgagatggagtctcactctgtcacccaagctggagtgcagtggtgcaatctcagctcactacaacttctgccttctgggttcaagcaattttcctgcctcagcctcccaagtagctgggattacaggtgcccaccaccacgcctggctaatttttgtatttttagtagaaacagggttttgccatgttggccaggctggtcttgaactcttggcttcaggtgatccactcgccttggcttcccaaatactggaattacagacacgaggcactgcgcccggcctgatyggcttgattttaggctacaggttcttatggggcttctatgggttgtgacttcaatgttagttgagttttcaaagcgttggcagtgctatttggatctgtccaatattgccctcagactgggtggtggtctatattgtagtttagttcttagaatctaaatgtgctgtgtagggtcagtttcatccatgcacagcttagcgtgagccccagagtttataaacaatttagtgactacttccccatgtcctctttctatgtgatctctgcaatattttcaggttccctggggtcttcctttttgatcttttgatggaagggctgctgaggctttagttatctggctttctgtatactttctgtgattgtgttcacatctggggccaactggtagaagggcagagagagacaaaaagcaatagggtttggttttcattctctcaggaccataggttttttgggcagagaggaaaattctcctatctcctttaatctttttctggcttgcattgtcaccactgctactgccactactagatggcttggtgttggggcacaggaggagagaaaaagaaaggaagaaaggaaagaagaaagagaggaaggaagagagggaggaaggaatggakggagggagggagggagggaaaaacagtgatttcctccattttttctaagagttacctcgcattagttagttctactatgaggcttctcctggaggttttttgtccacatcttgatgatcccttccaggttctggctgcctcgaggtcaggctagaggataccagaagagaacaatggtaaattcactgctgatttggtggtatttctaattcgggtcttcttcaatctacctgccattgtttattctcaatgtcttcaaatagctgctccatgcattctgtccaggtcttagaacatcattcagtgggaaagacaggatgaactgtgataactccatcttacccagaaccagtaactcagatatctctttagccgccatatgctatgtttgccctgtacagccagaatggggagaatattgcctttaagtcagggtcatcagcatcatggctttttagcatattcaataatcattctctgtggggcaagtttcaggtagttcacctattttttttttaatcagagcctatgaatactataattcagcaaactgcattacagtggcatcctgtgcgtctcctggtagaacaatgtgaggtggccgtttcaacttcaaactcatttggctgatttagagaaacttaggggcacctgtaacatgacactgagatcaatttaggcagccatctgccatcttgaagaatggcatgcaataaaacrtttgaactgagtgtaatttttgtggtttttatcattaactgccacatgtatttcatggtaacgagtgatgcagtcccagtgattagggtttcatgttcggagaaatacaggggtcctgtcttgatggctgtactctgtatacactggaggatgggaagtggatgtaactaattaatatctatgaataagagtcatcacttcctctcttttttccataccctgtaagtagatagggtatctctgcccactgagaagtaacatatatctctgtgcccactgatgctggtgtgcagaagctctttgttgtcagtctggctgtggaagtctgtttattcctggcccccatacctgtggcattgctttttagggtgatggattctatcctttctcctttttctagactgggacaaataggtatagtttcttaagaagcttctgttgatttcttgttttggctaaaatttggcaatgagaaggacatttctatctgtggttgagtattttttttctctttctccttaaataggctagagaggcaagaacaactgaaagaggaatatttgattccccttcagaatgggattgggtattccagtctaactaggattcaattttgatcatctgaagatctcagatagtatttccctgctataagtacccatggaccactatattatccaaaattgctaccacagccctcacccttcctgttatccctggtttgtgaagtgtgaggggggttgtgcggctgtgcagtgggcagcaggatgggacagggcaaggattataagactctgattaggacgcgatttgctgtaagacctggggaaggctactgaacctctcttagctccctatttacctgctgtaaaaaaaatggaagagcttatggtatttttgaaagattatccgtatatgaaagcacctacccctcagtctataaattctctccttcarctttcttaagagatggaggtaggtgctgtttggctttctatttgtgatgagatttgagactgggtcagaactggatcactgatgggagaagatagaggaataatcctgatataaaaccaccctctaaggtggcataaaggcatccctacctacagtgcttacaattttgtgttgccaacacttttgtaaatgactgatgtcggggaaggtccctggagctctttgtggtgagatacggagtcagcagaattttctgactgaatacattttttagggcagcagcattgttcatcaacctaaatgacactggttttcccaaccccttcagcgtctctggcaattcaccctccactccctaaggctagatgattttgtctgcatggataggtgagaactaggtgcatctgtctggtttttcccagtcctctgcaacagtgaagatttgctgactattctttcccatatgttaatgaaaacccatccagcaagtgcagctttgcccagggagagctctgcactggtgttgactgcaaggagaasagctgtgtgctgcaatgagttacctcagtggatagacatgtattattgacttgaacttgctcatgggacaggtgagcatggggacagggaggggtctctttgcccaaacaggatcatagcaagtcctctccctctttccatcttataccaactgcagggtgatggcctgcctgtcagttttctggggatgctgaactacaatgagtggtaaaacattctagaaatgcaacaagaaatagaaaagtgtgcttcccagaactcttctcaggaggcagaaagtttgagattactttgaatactttaataaggtatttgggggaatactttgatackgtttttcggctaggagggatgagtctcctcctcccaaatggcatgttcaagtaatgacagatattttataacttgctttctaaaaagcatgggtctgcttgactgcaaaacttttcttttgctgagtatgcaaaattgggctcaagattgaattactagggtcagtagctgaagactctgaccagggatcattcctctctctatcaccccatctactgctctgyctgtcctccaaatacaagctggacaagtatttttaaaaagaatattttgaataagtacccttttttttttttttgcacactcatcctgtggaccaaggatatgctaggtatccattcaaaatcagtcgtggaggcaaggctggaagtgagtagcaaagccatttgataggaaggagaacgacaggtacgaatagtgtgtggggagtactaactgagagatgtgggcaagtgtcattctggtcatcagggtcctgtttgcccagggctcctttcagaaagccaggctgggtgatcctgcatcatgttaatggtgctacccacacatgatccattttctattttgggagaccatcatgtcccctcaaaatatcaacttctcccttatcatcatatctacccagagttaacttactggccgttaggaaagtccatgggtggcagagaggacctccagagaatattgctgtcttttggggacaaactcaggctgcttaatgtttctcttcaattcagagaaccactgtatgatcactgatgttccagccttttctagcagcagctaagcaataggaagccatgaatcacaggccccacatctaattggcatagttcctttgtctgagcagtagagctatcttgtctatcatcagcatcatcagcatcatcactatcactatcactcattacttataatgacagctgacatgtatagactgtctacaaggtacaaactcaataaatgccatctcttagtatggttagaacacatgctcatctgttgcatagaaagtactccacaaatgttagctatttgccaggcaccctgctaagcactttacatgcaccacctcatttcagctgcctccctaggaggtaggtactagtgttgctctcattttgcaggtgaagggaattaaggcttggagaggttatgctccttggctcaggagcacatgataaggctgggattttttgaagccagaggctgcgtgaacttaggcacttccctgctgtactcagtgagcactcaggatcatggtttcctcctcaaaggaaaactgctaagcccagctaaatacctcagcaatttataggctgcccactttcaatctctgaaccaaatgtctttttgatgaggcctaamatccactctgagaaactgcagaggggaatttctgaaatcgcttctaacttsctgtgaaaatattctctaactgrcaagagattgtccagataacaatgaatacacaataaagctggcgcttctgcctttgctaccaggctcacaaataacccatttggcttcccaatcactctgatacctaaaactagcagaatttatgcttgcggctggaatggctctgttcagccagaaagctaaagtttaygactgaaccctttgctctgaaatgaaatctagtctctttggcgcgactttattaggccatattgtatggcgataggagacataagtacccagaatctgctgtcactaaaacaggactgggttggcgagcgttttcgtcctcacactcaatactgtgtcctaaaatgggaaagttgaatagaaattagggatgcaaatcagggccattttctgaaactttatttttaattgaattcaatatagtcatgatattgcttctgtatctacacaacccacattccaatggagattcagctattactggggtcactgaatcaatggagagagactaagtagataaatctggacccctgaaatattgtttaggctaattatcacaacagcccaaacacttggatacccatcttgtgcttaattgtctaaaagctttctctgtaactggctccaatatctagcaatacttcatggaaagcattctttttcatctctggttcaaatcctttaggctgtaatcgattcttctgaatctcttgtcctcaaggcatcatggagaatacttgccccttattcttcaccgtctttgggaacagctccttgctactcaaaatgtgggccctataggggaagcatcagtgtcatctgcgagcttgttagaaatgcagactcatagacttgaccccacctcaggactaaggcatgagaaactggattttgccaagacmcttgggtgacatacgtgcatatcaaagtatagatagcactggactccatatttcaaaggacttttactaagtaagccctcagacacatccactggtgagaccttgtcatttgctaacagcagtggctggtgggattctcaccaaactgtctaaaatagtaaagatccttcaaaggcacaggcaactctctagttttttgtgttatcaaaagcaagctccccattcctatgtggattcaaatgttctttctaactcccttcctcttctcccagttttttttttgtttttttgkttttttattttttttttttagaaaagatcaagttgttttggcctcaattttagaatttaggaataatgaacttgccaaatatcaccttccctgggctcagtctacttcctgttgaattgttgtttgactttactttggaatccaaaaaatgaagacaaggagaagacaaggagggctgagtcacatggggaagatagaataggcatgagatggggagggacggggcttcctctcccagaggaatgcaggcaggacttctagctagtaggaataactccagttagattggtggcaatatatcagttcttgagagttttgtctttcaaattcaagcctccaagttatcggatttagaatttagaaaaccgtaagtcagttgctaagaagcccaagatgttctgtaatgaaaaatttcccagaaaatattgctcatagtaagaagttttttgggaagtgtaaaaatgacccagttatacatactccctggtagatcctaacagtgcagaaattttttccatgctcagaagcagaattgatttatttcatgccccaacactaaacgctatgaagttattgaagttattcatgcttacttatgatcagatgcctagaaaaattgttcttgtttctttaggcctctctctccagttttatcttgcttagttcaactcagcagatattaacccagcacctcttatttgcaaagtactgtgctgctccttctagaagatacagagctgagtaagacagctcttcctttaaggagcttacagtcgatacggaaatggaattccacctcattgtagttctcttcagatgtcagagaagtcaaatgctgtgatggtacttaatgctaatcaccacacatggagcacttactaagtaccaggtactgttctagacattctgtactgatcatctcattcagcccacatggcctcctgagagatgtgtgcagttacyattcccattaaggcagggacagcacagcacattggtgaaatgaggaaaggcctcagagaggaggtagtttatgacttgaaagttacaggaagcactggattttgacaactgaaaaaggtcatagagagacatatttgtgatagaagcgtcaagggaaacagagatttcagggtgggaagtcaggagaggaagtttttagattagcatttcccatcttcttaagctgctccttgaaataaaggattctgtgactaaatatcaygttctggccgggcgcggtggctcacgtctgtaatctcagcactttgggaggccgaggcgggtggatctccaggtcaggagatcgagaccatcttggctaacacagtgaaaccccatctctactaaaaatacaaaaacaaaattaaccgggcgtggtggcaggcgcttgtagtcccagctagtcaggaggctgaggtgggagaatggcatgaacccgcgagggggagcttgcagtgagccaagattgcaccactgcactccagcctgggtgacagagcgagactccatctcaaaaaaacaaaaaagtcatgttctcctcttggagatttacaattcctcttaacatgttaaatactctaaggagtattgtgctgaaagtaaaataataaaattaaataaaacaagttggctttgttaaattctgtgcttcccaagtttatttcattcattcagaaactattattgagctatgactatgtaccacgcacagttccaggcagtggagattcaggtaaaaatctgtgccttcaacatttcccacattctagtaggggccaccacagaatcccctccccattctcctttgtttcagataacacctgctattaagttttgtcaagttctttctgtgaagtattagttgagaayaattctgcttttctgaagcaggggaaattatgggaagtcagatttttaagacagagtggtgccatgttgtggaccagcacaattccaagtgtggtccatggtccatagatggggactgtgagctgtttgatactcatccgtgacgagttaagtacagaagatgagagtaagtgcttagaaactttcaaagcaattggatggattaattttatatggattgtgaatctatgataaaaattttggatttgtaccttgcattggatttgtcttttcatttttttgtaattcttatttatttatttatttatttatttatttatttatttatttattgtctcwtcatgttgtccagacaggtctagtactcctgggctcaaacgatcctcctgccttggcctctcaaattgctgggattacaggcgtgagccagtgcctggcctgtaattcatttttattagattttgcaaaagaatggatattagaaataaaagctaaaccctggtccctcacctcagatggggtaagaagggctgtcctgaaaaccctgcatacgaagctgaactattctggggttggtttggcagacgtctgactgaaaacatttacttcctgctcaatttacccaaataagaattattttcagtggtatttttaagaatccttattatttgaaggacatgtaaatatgttctttactattagcaaggttgcaaaaccaaattcctctctgaacagagagtgaataggccaatctttaaaaaaggctcttaagtgtaaacaccttttctatattggagagaaaattgaggatagggtggcaaaaccttctatgtgttaaaaaaaaaaaaaaaagaccagtttcctgccacatatgtaacactttaaaaaataatttctcaattattattttaaaaagttctcatatcactcttgctgtttacccttcctttaccttcagttcctctggcactctgtctttccagaaataaacctggttgggataatggagtgagggaaaataccatgtattctggtacttttacatgtggtgtagtcttttaatcgccctctgaacacctcrtgtgggttgattctttttcataatgcctgatggaagaaatctcatttgatagtctgcagcccactggtctgggagtaagagatttggctcaagtccaytccgaaattaatatttggagttgtttatttatttgttcatggctgaagcaaccagttttctggcattccatcaaatccccccaaaattgttttaattgacattgtcctgaagcctttggaaaaatctgagatctttttgtcctagtcacacattctggaaaatgctctctgaaagaggccataattgtggaatgccaaattgttatggagtccctgaaatccaagcaactttcagaaaggcagctgaactgagtccacatccaagaagttcagcgctgagatgcagtttggcacagagaagaaatacattctgaaaaggtgcaaatcactattctcttctgctttcttcctttggcttcaacttgatcactagttaactccaccccrgaaagctgtgcagtgaggcattctctgtgctggcaccatttggacctcagctaacaagactcaaacatttcattttgtttattctatgaattgcttttaggatttgcaattatactgaagaacgaagaggctaagaaggggtagagaaggagataaccacatgccctttgataaaaactggggcaagtttgttgacattggaacatrgagggaaatagaggaggagagaatctgacaagtcccatgatgaagtcttcttaataccttgctggccttaacatcgtacttttcagcaagaaatgagaaaacgcaagattcaattaaacttttccccttgacagagcatgctgttgaggaatggatacaaatgaccccccatccattttagtaaccagcccaaacattcatcaacttagagcccatcaattctgatttcatgtttagtattgtaggcaaggacttgacacattttgtggggytttcttggggggtgtggggtcatgataaatacgttttaatggcatctaagatatgccagtcagttcatatgactgcattctgtttcagacaatcttattataaaggacagtgacaatgtattgcataattgatatatataaatattcattcaaatgtctctaattcttattaagcacttctaagatttaaaactgtggatcctttataggaagaatatttactgaaaattcagatagactttttaaaaatagtaaatgtagtaagttcttgtgaatacactaaccttctactacctgttttgggcagtgttagtgtgtatatgttacgactcatctcttcttattgcagctattaacataatggtcattggtttttataatttccttttagtgctttatttttgatgtgcataatataatgtatatttggattaaaagaatttgcctgttttcaattaaataaggactagtatatgacaatctttggaattatttacatgacttcacgggtagaggtggacttttgcaagattatttggctgtaatcaacacagttattcagactttttactgggaacagaaatcatgatggctgtaacatactcccagccaggagagttgaatttttcacattcactgggctgttagcattagagaaacacagtttcactctaatcagaggaagcataaaaaataaaaggcatcattaccaacccaccattagtgacacacacagaacctgggatcaggaaggtgtgacttcccgtggagccaaggctgaggtttccagttggaaggtacatttgatgggggagctgtctgcccgtggattggtgtgaaaccatttgcttgggaggttcaactagactggatgaaaaattagataatgaagagtagataaataagacagtaaatgagaggtgtaggcaagctagttcattggctcagtcccctgttctcactgatgatcccgtgtgtatttgatgaataaggacccacagagcatcayctgctcatctttgctaggcgctcttctaaaacagctggggtttgatgtgacagccaaaggataaattgctgcctcaggaaatgctctgcctttgactgattgctgaatggctggcaaattaattctggcacctttccctaagtcattttggtcccattccttcatttttttctgctgagaagtgtgtcttcacattacagttaaaaatacattgacaacacaaatgtggggaacagcatgtactattttaggaaagaagttgtaggctaggaagtttccattttgtataatagaaaccatacttttatgctctgagaggaggcttgaaccgccctttcagctagagccaaaatggattattactccttgctagacgtctcgtaaagtcataggctacagagtttgggcttttgagtccttgatgggcttcggttttgatatttccctctttggtacttgtacacagcaaatcctccccattccccgaaatcctaacaccacaacctccctacacctctatctttgtggtgggtggttaagagtgtgaactctgaatcctgtttgtaccacggattcactttgtgactgtcagcaggtttcttaacctctctgtgcctcagttttatcatctataaaaggggaattcataatgacaataactccctttacctggtccagatttctttgttcactttcattttcttagtattaaacacaaggttttatttatttattttagagacaggatctctctctgttgcccatgctggagtgcagtggcgcagtcatagctcactgcagccttgaactcctgtgctcaagctatcctcctgcctcagcctcctgagtagctggcactacaggggtgtgctaccacacttggcaaattttttaattttttgtagagacagggtcttgctgtgttgcccaggctggtctcaaatatctagcctcaaacttcctgcctcagcttccaaagtgctgggatacaggtgtggctaaggatttaaattcaatgtattttacactgttttttttttctgtcctaagaatgcattgtatgagaaatgtacacttttgtttttgcttttccaaagtaagtcaaagataccacactcgagacttagaaaagttaccttgatagaaggtgataatttcagcccttgggtaggtataaagactgaagttctgttgctgagtttgtgatgcactatgatgtaatgactctgggttctcactcctgacttgtctgatgtgattggcctattcgtgtccttgttctggcatgacttaaggattaaatggtctcagtattaattataattactgattctcctgctcttatgttatacataagggttttaaaaatctttttaattgtgataaaatacacatacaaaatttactatcttaatcatttttaagcatrtagttcagtggaacattcacatgactgtgtgaccatcactaccatccacttccggaactctttttatcttgcaaaacggacactgtctcagttaaacgatgactcctcattccctctccctgcaacccctggcagccaccttcctactttctgtttctatgcatttgaggactctaggtacctcatataagtggaatcataacacggttgtccttttttgattgggttatttcaattagcgtaatgccttcaagggtcatccatgttgtagcatgtgtcagagttttcttcttttttaagactgaataatattccattgtaaattaccacactttgtttatctagtcatctgtccatggacacttggggtgcttccacctcttagatattatgactaatgctgctgtgagcatgagtgtacaaatatctctttgagatccttcttccagttcctttggatatatgcctagaagtggaattatgaatccaatggtaattctatgtttaattttttgaggaaccaccatactgttttccacagtggctgtgccactttacattcccaccaactacatacattgcttgagaatatgacagtgtaattcaattagcaattttagactctttttaaagtgaaattcctttaccagaaacctcaaaaacatattgactatccatatggaaatagtgttaaagatgtggaaatcttaaacagatggcaatggcaacggatttaaatgctccagcatttattcagttgattcgatgctactaggtctagtgtgtagagactatccgcaggtctacacaaggatgtggaagaggcattttgttttctagaacattctgtacttttttccagttatacgactttcagtcctcaagcattttgattagccacagaggcaaacttgcaggaaaaaagatatggaaaaatcagtaaaagtcagatatatgtggtcaggtatatcatagtcagatacatctggtgctttctctagcaaagagaaaaatatggggaagtaaataccagttttgatttaatcagaagctagaacagatcctaagattaaaaatatatgcagtcaatatttgctgaatgaatgactcaataaaacaatttttgctaaattcaaaacaaacatgaataatattgttatcctacaaaaaatgtgttccttcttatttaaaaagtttagtgattcacctacaataaaatttggtataaagaatagcttcattaggacataaaggcatgaaaattctgaccaaaactaaaagaaccttgttaaaaccatattaattgaggaataccaccaatgatcaataataaaggtttgtattttcattatttttgataatcagttgttgtatttaaattagaccataaacaacacattataaaagaacacatatgaaaagaataggctgaattattttacttcaggaatactatttgcccataaggctctagtatggggatttgtaattagtgatacctcatatagtatcctattcattaataaaacaaattatgttaatactgtttcccaaatattctatattccaacatttttttactaaggcagattaggctttcttcaaattagttagagttagtgacctttgcttataagtcaagcatatcttttattcgaaaaaaattattgagatcttatggtttggagaaattaaaaagttcaggcttagctaaacacattgcagttaatttttaaaatcataccatttagcaatagaattggttgagtgacttttttttttaaagaccccactctggggaaggccaatttgtagataaactgctcatacccagcagcactgcctagctaatgtctaacctgtgggagtaggctggaagcagctcaaactaatgaggttaacctacataatctaatygcccagactgagctaaaagcagacaaagagcacagagccagggagccttcagtttatttctaaattttttctggcttttgtatgctggagtgtcaccaagtagatggtaggtgtgcccttgcccactgttcctagctctccttctggtccacatgttgcatttctcccagtgaactgactgactggctgccagcaagatgccttttaatacaagataagcacaagccgttctaaagagccacttcctgttggcggggtggcttcctctcatcttcctcttacccatgcccccactggaagggaagcctgagaggctgcagccaaagacacacagcttgccctccttccctcagggaggcctgtgagatccctaagctcccatagcggctcaacgttctccttgtaattcaccagtttctaaagactgactccattgtaagccggtagcagtggctcatgcctgtattttgggagcattttgggaggccgaggcaggcagatcacttgaggtcaggagtttgagatcagtctggccaacatggtgaaaccctgtctctaccaaaaatacaagaattagccaggcatggtggtgcacacctgcaattccagctactcaggaggctgaggcaatagaatctcttgaacccagggggcagagattgcagtgagctgagatcccaccactgyactccagcctgggtgacagagcaagactgtctcaaaaaaacaaaaaagaagattcactacattgtgaaatcctttcagagatgcctagcatgaagagggttgctgggaaaaccagctaaacttgactacttagaaaaaatgcatattttaatgaaatttggagcaagacctctctgaaactacattttacttttgtgatactccttttgaaatttggagcaagacatctctgaaactaacattttaccttttgtgatattccttggggggtcagaaaaatctgtcattttgtgcaaagtagaaatatactgtttcattataatatatacatgcttattataaaagccttcagacaatacaggaatctatagaggaaaaaaagtatcattctaccactcagaggtaacaactgttagtgttttgatataaagcttcctaaattctttttatggctttacaaacattcagataactataggccatctaaaaaaataggatcagattatgtacrctattttataatgtgcctttttacagaatttctgtatgaacaggtatacattttcattataatttttaattgcttcttagtattccattgtatgtgtgccatttacggttatttcccatttttcatgaatagaaaggatgttcttgtatatttttttacctctgttttcctgtttctttgctatgaatacttcaaatggaattgtagtgtaaaagactgtgtacttttacaaattttgataataattgcaaaattgctcttcaaaacagttgtatcaatttccttgcccactaatgtgggtgagtgcccatgtctccgcaccattagaagtcatacagattaaagactgtgcacggtggctcacacctgtaatcccaggactttgagaggcagcagcaggaggatcacttgaggccgggagttcaagacaagcctgggcaacatagcaagactctgtctcttaaaaaaaaaaaaattgccaggtgtggtgatgcacacctatagtcccagctactccagaggctgaggcaggaggattgcttcagtgcaggtgtccaaggcttcagtgagctatgacccactgcactccagcccaggcaacagtaagaccctgtctcaaaaaaaaaaaaaaaaaaaaaaaaagaaaaagaaaaaagaaaaaggaaagaaatcacacaggttaaaaaagtgttttagagggcacacactttatgagtttagggttattgaaggctttatatgggtgcagaggccgtgttcctgattgctgaaaaggtcaccattatctaaccagtgcattcatttgtttgcctaagagtgtaamtcaggtttcccttttacagcccaccgtcatattttaaactctccgcatgtgttcctttcctttagattgaggaagacacatggcagaaatactacttggaaggagtctcaaatgaaatgtacacagaatatctctccagtgccttcgtgggtctgtccttccctactgtttgtgagtaagtgacctttaactggatgctctttggctttcagggatattgaatgtgccccttgcaaggragcctcccacctctgctgggtacagttggagcacttgacaattgccgagggtatcccgtgtgctcggccccatgtgatgaataggagggtgggtcattacatggcctctgcctggggaatttccactggccccacttttcttgacaggcctgagagtcttggacttgaattcatcatttatgctaacttatgaactacagttatcctgcatgccttctgtgatgtagacacatttatgaagagtggcataaacccctgcctgtctgattctaagagggcaaaacaaatcttgccagcccctcaatgaaaggaattttaatctgtcttcccatcaagtctgatcatagagacaacagagaagctactgaaataaagccattcaaagtgttttcaccctttgctgaggaaatgtggaaccaaatatacagaaggaggccttgagcccccacatagacaactgccatgttataataataacaagtcttagcttctctttccactggctcagcaggatggatcaaagccacccgccatggccactgcaggtagaatagatggtcacytatgggggatgacctcaagagctccaggtgtctgccgtgaggcatgacagtgcctcagattcctcacttagaatcctcatgtytgcaatcccaccacttttagaagctgaggtgagaggatcacttgaggctaggcattcaagactagcctgggcaacacagtgagrctttatctctacaaaaaataaggaaaattagccgagtgtggtggcacacacgtatggtcctagctactctagaggctggggtagaaggattgcttgagcccaggaggttgaggctgcccaggaggttgattacgcaactgcattccagcctggatagcagtgatkgtatctctaaaataataataataaaaaatctcagatgttgagtttaagatgaacggggtctttgtgccctctgaaaacacaaactccctgaggttggtgaaacattaagcctattctcctgacaccttagcaaaggatttgacaaggattcttctcactgggaagaaacaggggtatctgggagctcactgggctgaggaagaaaagccatttgcttgcacttcctgcctacatacaaaccaaaagagaggtctgaagacatcgaaacaaaactgatcaggctttaccacaaaggaggggacagtcctgggtgcccttggcctcctctgtatcacggttttctttctgtatgcaggagggagggaggcggagcgcttggtggcttcgtgtttacctggagcctcctgtcactgaacacagcaggtgcactctgtcagtccctgggcccagaccctaagcaatccaaaatggtttggctgtttactgaaatttctcaccctgtctctaagcgaaagttttaatgctaaatggactggaaaagtgaataggtaattgattcggaaggagttattttctgaaaatggatgccctattgtgactcccatgtgtgcctttctttgagagctatttctcttcctgccactgagaggagttaascattcagaggcattgggtcctggaacactgaggctgtcccaggggatctccccctccctggagcttggtctgcctaggatacaaagccccgggggaaagcaggctttttaacagaagctagttttataaaaaggcaattgaagccttggctgtctaatgtggtggtggtctgagcacatagcagagctgccagcgcctgcgggagtcttatgttggtgagggtgtcagcaggggctccgtcaagcccccttccttggctgtarggtttccctggcctaactggtgtttgtatctaacaagagtgctccctccccaacccccaggcccttcttgcttttccacccttctcttactcygctcttgggaactgagtccgttcctcttatgggtaacttgaagggtcaggactgctccccctacaggctctaactgggatagtcactaggtatgtttgactcacgtagrtatcaactagttgctgatatttccaaatagtagtatgtcacgtaaaaactagatttctggattctttagaaaatctaatgtgacaatgcaagacctgcatttcctcrgaatgctaactggctccagtttgatgtagcaaaggggttagtatagtcatgtagttactcctccctgatatcttaaaccaggccagatttgcacataaatcccaggcctggccctgtggttgtgtgagtttgccaaccctgacccactgggtggtgtggaacttcactggccttcagccagctcaagagctggcactagtggctctgtgaatattccctttgattgatttttgtatttagaacatgtcccaagaaggagacaaattgttgtcagataatttagtatttgctcagtaaagtttctggaatatatatatattccacttctgatgtgagtgagaatgtgtacaacttagtgctattattcgtttaatacaatgatacagcagaggtagaaatgatcaataaaagaaggacatttaatgagatttaggaacatcccaaaacattgaagctctcctcaagcatttgattatctggaggcttaattatctgtgttttctactttaaattaaagaaaagccataactcaaagttaccagcagtttaatgataacactcttcaattcaggttaattaaagcacagccgtaattagagtgtagtgttgtatatcactgggctggcacataagtattttcattacagtaagaattggctattcaatttcaaaatgacataaaggatgccaaaatatattttaagctggttcacgaagaagaaaaagaattggggaatattctgggtatcataaagcacagataaaatatacagattttcagagcagtttctgtaattatgcgctgcgctaaaacaatatgcagccaataacatcttaaagcatggaaagaaataaatgtgctttttctctaggctggcaaaatgctcccttgcagggtgggattgggagagcttggagttttctcagaagctaggggagtcattctatgaaaagatatgggagcaggatgtaggggtgaaatttgagattgtttcccaagagaacaggaaggagagcaaaagaggcagtgggggcagaaggtcctgccaccccgaaagctatctctatcaatttcaagccaagagattctcagtgtagccttcagtctgtggccaaaggcccaagagcccctggcaaatcactggtgtaagtccaagagtccaaaagctgaggaacttggagtgtgatgttcaagggcaggaagcatccagcgcaggagaaagatgaaggctggaagacttcacaagtctagtccttccactttcttctgcctgcattatcctagccatgctggccgctgattagattgtgcccatccagagtgagggtggatctacttctcccagtccacagactcaaatgttaatctcctttggtaacaccctcacagatacacccaggaacaatactttgtatccttcagtccaatcaagttgacactcaatattaaccatcacagatgcttactccaatctccttctctgaaataggagtgctatgacttatctgtcagtacgggttaatgtcttttcccctctccctcctctccttttccttctacctttatctttctcattgaatataatagaagcacttagaaagaaagaaacacattgcgagctatatgtgtatccmagttatatttacttttaacctttaggaaattctcttatcggttaatcaccgattaatcagatatttaatgaawtgggatatgtgcaccattgtgccaagcttggtgccacttctagaggaaactgctactagatttgatcaaatatatgtgcatgaaaagattaatagcaatacttacaaatgccaacaaatgccaagtaaaatattcagtttccctagggtggctgcctccagagtttactgtctggctaagggaaatagtacccatcgtcagagagatctagacacccactgataagtgctgtggtagatgcacacagctggaatagagatgctgagagttatagggacatctccctgtaggctggggggacatgggggttcttcctggaagagatgacatttgagctgtgtcttgtcgggagttttgattcagatgggggataaagaaggaagaggacattctaagtggtagggaatctggaggctgygccacctggtaccatagggagctctctcaacacctaggtctccgagattttccagttacagcaaattgctttcctctttagatgagacaaagagatgcatcagatttattttgacttgtgatttttttgggggaaactgataacagtgtttttggtgagcacttgcgaaagcgagggtgcactcccctacccccagggagggcagaggggaggggaggggctggacaaggaggagctgcaggaaaccatgggttcagcagttgggctgcctcaagaacactgtgttctaggttctgaatctcaccgggaacctattagtcagtcattcatcatttgcaaaatataaaagcttaattgtatcaggttttacagctcagaggggattaggacaaaagatgtatttaaaatatggtatgtgtctctctctgtccctctgcagctgatggagcagttaaaattcaggtttgatgtggagtatttaatgcctggggaacttggggaactccaatcagatcttcctcagctgtgctgaagggcaggagttctgtccccaagcccaggggcaagtatggatgctactgtgctggtttaagagtgcagggggattctcttttccctcctctacctccctgcattcagtgctcccctcctaaattcagaaaatcatgctctcaacctgtgttattttgcacagacagatctttaaaaagaagccgcttggggaaatttaaaatttaagaccgcccggcgaaagctgggcctcttgcccagtgaaaactgtagctagtttaacttcagttctgtgaaatcattagtttttggagaaagacatccaaatttgaacatggagcagaaaccaggcagacccaattgttatatgatagatttctttagcctggctgcaaaaatgagcattttaagtgaatttatggagaggctcagatctctctctttttttttttttttttttgagatggagtctcactctgtagcccaagctcgagtgcagtggtgtgatcttagctcacggcaaccttgtcctctggggctcaagagattctcctgcctcagcctcccaagtagctgggactagagacgtgtgccaccacaaccggttaatttttttgtatttttagtagatacggggtttcaccatgttgccctgggtggtcttgaactcctgagctcaggcgatccacccaccttggcctcccaaagtgctgggattacaggcgtgagccaccgcacctggcagatctcattttttaaaaaatattttcccctcacagaactggctctattcatccacttgattggggagtattgtaattagggttgaacatatatgaatagagatgtgaatacagtattggtggttatttctactacagagacccaagaggtgaccttctatgagctagtgaataaaccgttgaccctaaagtctattgaaatcctcaataacaggctactgaggcagtggtgggtccagaattctctacagaagggtcagggaaggagtcctgttggaaatggggtggacgcttgggctttgactcaacactgggttcttgtagcaaacacatggttttttctttcatattatgtttctcattaataataatagcaaggctctctaaaaatgcagttgttcacactttaggcaaaagttaattgtctgtatcaagtaatgtatttataaattctagtgtcttaggtgtgctagtggagattgtgtgtgtgtgagtgtgtttgtgtgtgtgtgtgaaagagagagagagaaggagagaataagagagtgggagagagggtggggatattctgaaaccttcccactccactcctatcaaagcttcatagagaaaaagagtcttaacatttccatgaacattttaaatcacttctcttttcttggtgctgagtcttggaaatccggatgtttcaaagtttctttacctggatatttcgatttctagcggctgtcattttaaattaaagctcctgaatgtgaatcttttccattccagcccctcgatccagaagaccttgtttcccaatgtgcagtgtttgtatccgtatctacttcaattgcatgtgccaacctgacattcccaggggccctctggatagctgaagaggggctggtgctttgggtggggttgggttcagggggaatgatgacagttgcttctttcatcctccctcacctgacttgtggggtgagtcctcttcaacagccccaaacctcctctttgtattttcttcctgaaggtgcaaactctatgacaggtttccatgtttaattcacaccagcaagtaatgtttccagtaaagggggctgatttaatggcaggaacaatgtatttccctctgggtaggcagaaacagttggactctaattcttaagagcctttgttcaggaacatctgggttgaaactactgtagttaacagatgatgttggcagtaaaaaaaaaaaargggggttgggctttgtataatgtcgttgtcaaatttggtagacctttacctaataattatcaagaaagcaatctaacttgttattataacagttttattgcagattgctggcttaagacctttttgtgacaagtggcattttttttcttgaaaaaagaagtcatttctattcccctgtaattatttttgcaaccagcaacaacttcctgcgttggacatactggggcattttattttagaaaccaataattaaattattgctagcttatggctgattttatcccatttatcacattgtgaaggctttcttacttccttttttccccttacctcacctcaccctgcttcctgatttcacaccaattctgtatatgttgaaacactgtaagttgagtaaaggcagaattagaataaggattagatggctaatgctcattcttctttaccaaaaaatggtgttgagtgatgcaagtaaatgtttaaccagagaacatcagttctgggtatactgaaagtatatatattcttgggagtgtaaggggtacataagggtataagagggtctctagaaggtcccaaggacaaattgttgtatcttagaattggacttgcatcttggcattgtggattgaaggcaaaaattagattcccagagcatatcactacttttatttccttctgtatccttcctttcccatctgtctgcttctaacaaataagacaagctaagaagcagcttgtttcatgattctatactcacttccaagctttctctgcatagactttcctagtttgccactttatcttttctccatccctccagccagtcatgagattctactccccattcatacatgcatttatttatccagactttactgaaggcttactctttgaactttgcaaaatgccagtgaggcaaagcatgcatcctgtacaggaaaaactcagtctagaggggagagataagcaaacaagtgattaccacaccagctcccctgttcattcaccttgctctgctcttccccaatggacacctccaacagaggctgcatctctgcaacaggatgcagtccttaagcccaggattgtgacattggccaactctctgtggcaggatctaacagaaacgtgtgatttgaacactcacagagggagccatagctcttgcttccagtgtaaatcatggtgtattatacttgatttgtattttgcaatatctagaggatacctattatagtagggattaaaaacttagatacctatagggttcaggcagttagcaagaaagaatgaagagtgaggccatctgagacaatagagagtggtgggaactgtggcacattggagaacaaacatcccatccagagggataagtgcttcacagctgcactcccttttagcatgtggaatgtggtgccaatgtggccctatctgattttgcaaggaaagctgaaaagccagtttytatgtgaattcacttgttggcatctatttacagttttttaaaaaacactgtacttaccaaacagaatgtgtctgcctgttgggcttgtgactgccacttcatttcctctcttctgatgagaagcatctgtgcagcacattgcgtcaaagactcgatttccacytttggctttttacataaaagtcaattgaccttgacctagttgctctcctctgtttgggctcagtttgttatctgcataggaagggcaagatcagccaatcttgaagggcttgagtctgaaaatctgtgttgtggcacggcttgcctatgttctctctgttcacatcattctatccctctcctttcctttggccagtgggccacagcttgttttgggtcaaaggactttttaaaaggggcttctataaggcattgtagaatcagcttgggtatggatttgaatgttttgaagttatggatttaaaactggaagaggactcagatctgcgggtccatcccctataaggttaaggaatgaatacaaggccacatagaccttaggactttcttgtagaggaaactcttttctttttatatccagttggtagatggtactgtagtagctaggaagacataattcaccattactacgaactgttacttcccttcttaccagcgggattaggtttataaaagcaatgaagatctttgatcccatgaactaccagagtcccaaagtggactggtcattgctcataggatattagcaaattaacctttgcacgatccatactaagtttaagatcagccttctccctgatgtttwtgtatttagctactatttacattagaaagtggttacttaatttggtaatttggttcaataaacattgcataagctatcttattttttaaaaaaacaatttaagctccagaagtaacagtcccataaagggtgcatgttagcagtgctctttgggacataaattaaggatggcattttccagctgtagttggatatgtgtgttggtgtttcagcaagctgcataatcagcacaaagcccaggtcattagattctgctggcaggaatcagaaaacctgcaaatcaccaggagatcccagatatgcctggatagaagtggtcctttgacatctgastgtctgctgaaggcagtgctgtggaccacaacctcacatgtaggaatgagcaattggtttcactccctggagagcatgaggccttcagcagcactttccttgaaagcaacacatccccctatccagcacatctgattatgtcacttttctcttttaaaccaactaaaatcccccaattccacttataataagctgtagactccttgctctggaaagcaaagacctcatgatcttgctcccccctcatttcctgacctaatcactgtcacgcttgactttgctcactcagctgcagtcttactgaatttattgctgatcctcaaacacycagagctcttccctgcctcagggcctctgtgcttgctgtttctacttcctagaaagctctttccccatatcttctcatcatgctgttgtgctccctgcatcctcagaatggtcctcctgaaccatcacagatgatataccccttctgagttactctttatattcttaggttgttttattttcaacatagaacttgtcatcatctaggaatttattgtttattcacttgtatattttcttattgtctgtctctcccaatacaaaataggcttcactggagatcaagatgtagggtatcctgccaggtattagctagagaccttaggcatgttacatggactttctgatccttggtttcatcacgtgtaaaatggagctatcaatagaagtctgaataattggggtaatagcttcctcttagggatattgaggggattaaattgacccacaaggaagccttccccacactgtgacccagtatcttatcccccttacaatgctggagctaaataaataagcatcaactcattgttcagtctatcagttaatcaatattctattattcaaaatggtaatgctaattgtagacacttgtcatacatcatgtatgtaattattttgtttatgtgagcttttattctgtaagtatgtaagtgtataggttcatctaactgtattgtgccatttacatattcatgtatttttatatatttgttstatttacatgttcatgtctttttatatgatattatttattgatcttatatcttgaaatattctttgaaaagccatttagaatgctagtaccatattgcactgtactttatggccttattattggacatttaggttgttttctatttttctactccatataaataacacttactctgaamatctttaagcataaacattttactgcaccttttgttattttcttagacttgaaacccagtaagtggaaaccatttgtttgtttagcttctctgtatcggtgggtctattcactatgcactatggagaattccaaacaagtccaggactcttaaggaagttgctctggttaaggagacaaagttcagacacatgaaacaatagggagcgaccacagccagtgtaaaattgactaaaggctcagtgatttggttacagacaaggtgctgggagagttttgagaatagaaaatcacagggtagcagtagctggagaagacccactgcttgcaagattagagttgacgtggcctgtgaggatgggttgggaagagagaagaagggatcgagagtggggaacgcacaagggaagggatggaaacaggaacaagccagcctcaaagcagtctgctctgcagtcgagagcaccaagcagatgaggtgagacagcttggatggagccaggagtgacaatgccatcgtcatgtgctgggcacttacacagaggccaagtattattaccatcattgcaagcacacaggggtctgctcggaacaacaatatgagccatttgtacaaaagaccgaaacggaatccaaataacaggtccagctggtccaaatctttccctccccctgtagttaacattttactacccgaccgagtaactaatgaatctggcccagagtaaatccccaggcacaaattcctgcttgggctctgtgtctagacagccagccctgagtgcaatttgcactttgagcatccagcaccttatcacttgcaagaaatcaggtttaatagggaagatggggaggtgttgcttccaccccctccctttggcacagtgccggtggaatgaggatcccctcggtaatgactgcattaggagaccgaaagatcgtaatagtgtgtgttatgtggctctggtcattcagaagaactgattgggaggcttctccatctcattgcaggctgtgttttgtgaagctcaagctcctaatgatagccattgagtacaagtctgccaaccgagagagccggtaagtttgcggtgacccagcagccagctgacacttttgatggtgagagtgcgttctgagaacggtcggttcacttctgctttcttgtgcattatttatctgcatggaaccagatgtaaaacctctctgaccctagagcacatttcgaggcatgccccatcagacactgcagcttctatgccagaccagcctggcacccaaagccctgctgggcattcagagagygtttctccagggaagagggatgagtcctcaaaatatctccacctgatcatgccgacctggacttttcaccttctaagtattaaaccagaacttaaaacccctttttactgctgtgagcaaaaaagcaggtggactctggcctcctttacagcagccttggggtagagctgtgaggggagacaccaactctcttgatagccaaattacaagcagcctattgtgtaccatatgtgcttctcccggtgcaaccaaaatccaggtggcagaatatcagcttcatgtaaatgagccaggagagtggagctcagaggcaggagctctctttatttatttattttacacttaattatgtgcaaatcagactgatgagggactgggtctggttgaaatagrtaacatcccagtcaatatgtgagttcacactggaggtgggaagcatcgtgctaacaagaaattttgctgatggagtactgtacaccttacagataaaatagagatgatttttttgctccccagttcttgtcaatagttttggaagaaagagagctcattgagaaatgctcaagcttttgttctctgaaatgacacccacagtctattcctctatagttcatayttttgatcctgcagatgcccaaatgtagagtgcagatcccctccaacaaacamcttaataactgagcagagtacaggggaagactagacgtttccttttatcatcatttaaggagttttccttatctgggtgaataacccaatacagccagactttcaagtgtatagtctgtgtctatgacaagacaaaacaaaagaaaagaaaacactggattgtaaacagatcaatccaatgttttctgttaccttaactaccagatcagattgctcacaaagtcaatctgatcaaatgttaagctattttgaaaacccaaatcaaccaaaaggaagaaaaaaatggtagatttggtggccatatgtagaacatggctgtagcagttaacaaatatgtagatagataaatattttctttttcatgttggcaaagtgaagaatattgtttgcaaaaactgacagtcctgattattagttgttcagcagatgaggtggaattttctggggttactgtttacccatgtttttgccaatactcacttgtacctgtgtaggggaactgtatgtatcctggatttttgcaaatgatattccccgtgttgcgaaatcgcaaatctttgtgtaactcagtgttctctatttacttttgtgcatctttcaaaaaaaaatgtcatgatgtgggtgatgctgatgctgcatagtgtttttcgaccattctggaataatctgactgcaggagattgcaccctgaaccttgagcagttgtctttcacttgttgccttttggttccaaggagagaaaaagagcgaaaggctgttaatggttcattgtgaactcaatgtcactattctaagaaaactaactcagagcactccctgaagatgaaacttttcttggataggcccttcaattgagtcacaattctgagatgttttcaacaaagccatatttgtagatatagtttttagwatatatatatatatatatattttttttttcttcagaaaagggcaaaaaggacttgtttggctttgtttgggctttctttgtgcagttgccagctttaattctcaaatgtggcttggtctcagtgtggaagcacattggttcttgtggaaaaaggtgtgtttgagggaatgtggatcatgcctctgagaaaacacaggacttatcaaacacaatatccacgtgaaaacacacattttttaaaatcttccctgagataataattttaatgtttttctttatttaaacatgtcccacttctttccctctcacattttctaactgactgggtgtgaaaattcaaaggacctgtttctccttcccaccttctttaacctgtgtttaactgcctttgttgttggtttcaccccatgatactgttttcatgctttgccaaaaaaccttgttttcacatgcatccttcaagtgatttgaaacaaaggttttattccttctttccttctggtgtcagtcgatttattatcaaattgtttgattttaaattcttttcttgtcgttttgcagaagccgaaagcggtatgcactcttcgttaacttttcttccaacctccaccctctatcttcactcctaaccacaggactaaccatttgccaagaattcaagaagagagagattatatatatgtatatataatctcattcccttgtctggtgtatctatattatatatgtgtggtgatatattttatatatatatatatatatatatatatatacacacacacatataaattatatataataattaaatatataannnnnnnnnnnnnnnnnnnnggggtatcagtacgtggaagagagttgtgagatattgtcacatttatgcagtccgatagaagggtagatgctgttggttttcacgagtcagatagtcgtgtcgttccaatgaagagatacttagcttgcatccatgcatcgagtacgcgatgctgcctcgatggaatcaggcatctagtgaaaggtggtgcgtaataattggtattagatatagtgtgattgatgcgtatgtaaatgaagattgtatggtaggtgtggggaggggggggttgataagtggggttagatgagggtggtaagggggtatgaagttggtgagagtggggtgggtggtataagattaaagtgtggtggtttaatgattataggtggaatgtgtaatgcaatgatattaagttataattgtgtagaaaatggtagagtttaagtgtgtttagtgtgataataggatggaggaggaaggtataggaggatgttgttgatatggtggagggggaaattgaggtagtggagatgagaggaaggtggtgagtatttgggaatgtgaatgtgtgaagttgttgtattgaaagggggatagaggtgggagtggagagtagaaaaggagggaaaagggaaggagaggtggaaagagagggagagagaaaggaaggagggaagaggtgaggagaaagcggggaggggcggaagaggggagttggagaagaagggaaaaggggggggggaggggggagggggtgggggggggggggggacacccctctccaactagagtacataaattggaagtagcctatttctgttcctgtttgatttgttggttcttttggatgacgcactaacttctttgcaggaaacctaagaaaggaaaggcacactcctgttttcagtcatggcaccaataatgggaacaaatactattaaagttgaacaggaggatgcttctctccagccctttgtgtctgtttctgtattgtcctgacgtgtcttgatgtccattgcactctrgtgccattttgtctacataccacttccacattcccagtgacctcctcctccctgtgtcgagtttcttgtctatagagcagaattcctgtccttttatccacaaaacagagaccaagcccttacacttctatttttccttacatttattttggtgataacattttgaatattttatttcttgggcagtgctcagtatagtcttagaacactgctattaaattgccagattatcacacttgatttacagagttagtactgtttattgagacagactcatggcttttttttcctagtgtgtttgggcatatttcttaatatgaagtttctcaattttcaccatgtgatttcaccctgttttgctgctgttttacattgcatgaagcatgactaaatcatcatcaatggcatttaaaaaaaaacttttgggttaatagttccaggatagcttttcaataatgtgttatctaagacaatattgttgaaaacatactgttgagatgcctacttgttcatcttttcaagttacttttctctgtgattgtaatcactgtcatgtgtttgtgtttgtaattgtgtgtgtgtgtgtgtctgtgcgtgtgtatttgtctgtatctttttccaaaatctgattcttctgttgtttttttgagtacatgtgtataaataaaggtggcttcctgtcagtttggtattattgatatgatccaactgcaagaagttactgcaacactttgcatcttaaaggtccacagtggttgcacctctgctgttggcttttggcctttgagtccttttatcttgtggtgaaggcatgttgtgatgtaggcatgacttgtcctaagtataccagaaaatgatttggcttgctcccagaaccaaatatccagcattatcctttctagatcacctctctgttccccatcccatatggctaatatttttttgtatgtgcgaaatatatttgaaaatgccatttctaaagttactgagatggatgcaggctgagtaagtcctcaccagtatctctggtggaccacagtggcagtcatttgagtctgaccaactgggagcaatctttatcatgctgtctgtgtgtaagtgaactgggcttaagtatattgacatatgaaatacacaactgtgtctccaatggtatcctaaagtaaaagtgtgtgtgtctagttgtgtgggactccagcagcagcatgtatttgaaagcccagaaaaaatgaaaagttccagaaaggtgataagatttgagatgtggggtttctctgaactgtgcctgcacatagcctgtaaactacaaatgcagtcatactctctgagaggggacacggattggttcaaacaaagttccaactgagagtcattgtatatgaacttgtgtgatcaaagaagcctcttctcaatggcatgattcatctgggcatagcatgaatggaaaccctaaatggttcttatttgcttgctttagttaatgaagtcccattagcttgctagacacaaatataattactacgttatcaagcacaaagtatgttctcatataagtcatgctattttttaaaaattgcctgaggaatggtacattacacctaccaaaaatgaaagggagaggagagaaatatatatgtatcatatttacccataatggatagaagtttccttaaacaatatctgtttcacttgaattacgaatcataggttgtcttcagaaacaggaaacaagtaaagtttacaatgattgaagacaaaactagatgtcccccagttatgcacaagtggtggagaaaggaatgcattactttcctccatcaagctgcagtcttccaacctgaccagtgtttagcgagagatacccagtgaaatgtgatacaacttgagacgcggtgctcctctcatggagggacctgatagaggcatttccctgcgggactgagccccgctagccaattgcacrtagatgtgttttatgtctaggaacccatatttctctttgaagttttgctttcaatgttgaaatcaattgccccaactttgcaagtggcaggctgtttacatattgggatatttacatattcatacttaacacatctgagagattgctagatcattggccaatcccctagccctagcagaggtgtggtcactcctttaatcggcctgactgatgagaattgtagcttgttctttgaaagaaaactgtgacctcctttccacttatttgtgaaaaaaaggaaaacttatggaactgaggctttaaaaacttattttttttattcattcaacaaatagttgaaatgtgcctgttgcgtgcaaggctctaagcctgctactccaggaaactcaaaggtaaatagaatgtgatcatgttttgtacccctctactcaactgtgggttccttacagaaaatacgtatttgctccatgtaggaggtgagtaaacaaagaataagtcgagacttaaaactagtctgagagcaaaagaaacagagacagcaagggaccacaccagccccgtgcttccagctgtcactggatgttttctgttgaaaccagtaaggtcaaagaagaaaggataatttatatgttccttgaaatgagggaaagtccacctctgccaacatgtccttgttggaattctgttaatggatatatgggctttttctcttagagattttcctgattcttcacatgacacatgttgaagtttatctctgataaactagtgaattatataaagttggagctagagaactgattcagagtggcgcacagagagagagacttttggcagtcagtagaacaaaacaaacttaacattggatactctcctaaagagatcagagatccttggaaaaatttatgtgttcctattagaaggtcaataacgaattctaaagatagtaggcaaaagggggagaaggttatcactatccagaatccttgtctttttatattttgaagaagayggggattagcattttatttaaactttctagatttggaatgtgtatagaagacttaatgtcgaaaatattaaaaacaaaaacaaaaaccagtaatgtagtttctggtgcttcagcgccaagagcatctttatgtatctagatttctttctttcattatttcaaggactggatccattctttagawtcccacccagaaggctgccttagccttagcttagtatctgcaaatggttctgccttacaccycacatggggatgatttaaaccccctcacccctgttcacagggaataagagggcatcctggaatccacatgatctgtgaggtaattagagatgctttcgattccttacacaatcagccatagatttaaggaacacaggatacttcactgtgcagacaaaagtcagtctaaattagcccatcaccagatattgtgcagggataaaatgctttggatttccttgcagtcagtggaaaagtctttcaatgccaatagggcacctcctgggtcatttattagcagcagggacaaagtggagggtgatggtgctgtgaggatttttttacctctcagttttataatcacctagctcactgagagtagcaactaagaatttaagaccttctatgtgtcagtcatgtagcacatagtacatactttaactctcttagaggcattgtaagctagcgattattcacccattttacagatgagaagtgtgaggcttacctgcatttgcaaagccaggacccattttacagatgagaagtgtgaggcttacctgcatttgcaaagccagtgcatggaattttttgtgtatgtccttatacattattctgtagcgtacagttctttaccctataatttcatctcattaatgggcaaggtattttgataagaagactgtattatattccatggggtcagctagagaaaatctgtgataactttgttgaaaatgaaatacactttggatttttttttgcaagaattaaaaaaaggaacaataacccacatgcattgagccttctatacatcatctctcttaattctctaaagattattgttaccattatccacctcttgtaggtaagaaagttgagttctagggatatttagtaactggcccaaagtcaaacagctattaagtggtagtgttggaatttggacccaaattctgattgcagagccagggcatgtaaaaactgccttgcaggaaaggaggtwaaaaaaatgtgcaaaatttataatcctgcctttctaaaacatcatactgaattggctttgaaagataaattcatctaaactgtatgagctctaacacttcaccctcgtgattgcatgaagtcagagggcttgttatacccatgtgaagagttggcggaggggtcattaggaggtgcttatggagagccgctgctcagtgcaggccgtgctattagtgtggactgctgctgtctgatttgggaggaatctcactgctgcctgtggttgtagggcagaacagttaaatcttcatagccttttggtattattgagtgttaataatagtcatgacacaagtacagtttcctcctgtcaggtattgttataagtaatggtagatgttcttgtgaccacaaaaaattattttgcaataatgatctgctcggaggtctcccaaccaggtgaacaaaggttcacctgggtccttcctgtatgactacagacgtatcacttcatgaccacaacacttctctggaatggtttatcagtaggaaaaaagattatgtgttaattaccatcctctatattttgattgtttggggcagctgagaacttcctttagactgattccaaatatctattaccttattaagcaacatcttttcagaacaaggaatacctctgttgtatctgttgttttattcagaatccctgaattcagtatccattaagcctgaagtcttttctcagtctctgcatcagacaatcttgtattctgcttttgatctgcagaaaattaaacttgtttgtttcatccatttattagattaggatacatttatctcttctgtcagtccaaacacaacttggtccgctaatctatttatgccactttgaaataggacaatgtatatttaggttcccacttctctgcagggcaagtttttttaaggggaggtttgcatttgttttctcaatttgcctcaattaggacatgctagacacacatcttattcaaacaccctgtacgtttttataaacagcagactggaattgttaagtatatccaactgctgacttaaaaaaaaaaactgtttgggtaaatccaattcttcctataaaggctgtacatggaatcaatttccatgtccttatcaatgtcatgaagacgttcagcttgcttccgcattggttacgggtgtcttgtaccattccctgcggtaatatgtggtgtgtgtacatgatgtttatgtatatctataggggtcccattaatgctctgtcatttaatggaaaattgttgtagcaatagcttcatcaggccaataatgcttccgtgttgaccaccaatagcagtttcaaaaggaatttattctgatggactttgcttcaaatcatgtgcccatgatggcagctagactgctccattatataaacccaggccctaataccttgatttgctttgatttcctcaactgggagcatgccagcctgggaagtaagcagtagtgcttaatgatggcattatccaactaaatgtatggggcagtggacattggactctggacaaaatctttggggaaagctttagactagtgggccccctataaacacaacagtatggtgtagccttcaaggttttattcagaacatgacctcacaaatgtatyttctctgtttgtttttgttcactgagcagtatattaattaatcctggaaaccatcttaagatccaagaaggtactttaggatttttcatcgcaagtgatgccaaagaagttaaaaggtaagagtttattttcaactggctttctttctggccyrgctgtagacaccttgacccacggaagtaggcaggcttccataaccccaaaactccttaacatgtctatggccatcaactggtgtaagaaaaacttccacggactccagttcatgtagtgaattccacatctttgaatgagaataataaaattttagaactaggaagcctagttacctgctcatttattttgtgagggagaaaatgggggctcagagagctgaatgactgctcgaggtcatcctgattcctgatgattcagaacaacataacaagacaactggctccttatctagtgctctttacttaatattatctgggaaatttacttgagaattatcagttttctactactctccctgccaaatagaatttcaaaaggttgggattaatttcagatggaatatgaaactggctctatttctatttgtggcctcctaggtaagtggctgaagttgtcagcttcaattgttaagccactgtaagtgcagcacaggatttcactggcctacatgtttcatgacatttttattcgtatccttaaacctgtttaagcagcctaggaattcacagggccctttgcagcacaacatggaatattattgtatttgattctatcttatgaacttggagaaatttactagcagaaaatgtgatgcaaatgttcagacaggtcattcagctcaacagtaatattgcataaaatattttaagtacattattaattgtgaaggtctatcattagttatataagcctattgtcttcattgaatgagttcctagtcaaagccaggcctgttctaggtgtgctacattctttattgctgctcttcaaaataaccctggaaggtaagtcttctcaaacactcagagctttggtttcctcatctgtaaaatcgagataagtgatttgtccaaggccatgaggcacataagtaagtggtggagcccagagtggaactggtctttccttttctaaaatccactctctttctaccaaatttaataatactaccacattcttacagaggagggtttattacaccccagcactattctaggtactaggttctctgtatctaaaacttgttaaactctcacagcaaccccatgagataggtagcattactctttcccactttacatatgaggaaactgaggcacaacttggctaactaacttgcccaaagccatactgctagtgaggaataaagccaggaagttggagcttgcactcttaattatttgcctaggttaagcctgatacgctgagcacagaacgatgacatgtgaccgtggatacttagggtcctcttcctccccatccactctagcaaactaagccatactggctacagaagcttttgggaaaaagaaaacatgggctgttggaaggaaaaagaattcttaaactgagygctctaataacttaaatttatttctgcaaattggggaaagattgccatgattgagttgtgggggaaaaatacctccctactcagttcacagaatctcccggttgttcaagagtatcctgagaactgggtacacctgagaagggaaattaggattaatgggactgaaccttccctctccctgtgctccaatcaggtctcctggagaagaagcttgtgcccttgtccagactgtgagacacaaaagcttgaaacagcatctcagcaccaagtacaggaggctggggagcacaggagaaccatatatcacgtatacctcccagatagcaaatataacatgaaactcccatttgtgtaattctatttcctattgcatctctcactaatgaatgtcacaaatatcaggccgtccaaaaaacaaattacctcctatattagggagtgcaatatgtctcatttcagtgctttatggtattcacaaatacatgctgacacaatcagctacaacaccaggctgtaattttccatggcatgtgatgtgtcaaagcaaatgctgtcagttaggggatctcaaatagatgaagactgcaaaaaaccacagaaaggacattggagatttgaatgaaactaaacaagctttgtaaaaatggaaaagtagattatgatgatctcgtatcgagtttgcaccctccactgcaaaaaagcaacaaaagaagttaatgaattctagcttgtagaaaccttcagatgcagtgttttagtaaatgaggagtgaaaccatcccactgcagtcttaagaaggtcacttgaggatgggcatttgggtacttgctctttcctccttgccaccaaatattttccttttaaaataacgttggaacatagactttaatataggagtcacaaaacggtggctcagtgactcagtttggcttgcacatatgatccttttgagtcacaattttaaaatacaaatgagttgccaaggtgaaaaaagttacgagcttttatataaaaatccttattactcatttctcctgaaaaattggcagacccaacaataccgggaagcagtctcaaactcactcattcattcgcccatcaaatgtgtataagtcgtttacatttagaaggctctatacaaggcaccagggaaacagtggtgaaaaatgaacaatggggagaagtcccaactctcgtggggctcatattctaggcaggaaagaattacagttttttaaaaaataattagtggtaaaagaattaatgcaactgggtcactgatttgggttgggtataagtgaaagcttctcagaggggwtggtatttgagcagagattgagatgaagggaaataatccatcaggcagggatcagataggaagaagagatgggctgggaagaagttcattgtggatagggaccccaagaaggaaagtgcggctagggaatagatttggggagagtggtatgagatgaggttagagagaggcagaggctggctcctaaagcactttatagaaaggttggatctgttataaaatggaagtcattgatggctttaagctgatctgatgtatattttgaaaaggtcattcttcctgcattgtagagaatgagaggaatggggcaggagaagaggtgagagactcagcgcctattgcatagtttaggtgagagatgatggcagcttggactgacccctgagtggaggtggagagaggtgggttcccattcaggctgtatttgggagagtgtgcagaaccccccaatgaattgggcagaagtgaggaaaaaagaggaatgaaggatgaaggctagagtcagggcttagattgtgttgatcttaaccaagatgagggatactagagaaggagcaagttttgggtagtaggaagttaagcattctatctgggctatgttaggtaggagatgtgtactaaacatacacacagtgatatcataaggcggttggatcttagagtctggagttctggggataagtgtgaattggagatgaatatgtaaatgtgggtgctgtttcttgtcctggcaagaaacagatgacaaacttaaatgggaaaaaggaggagagttttatgaagagactgtaaagttatgggcaaatagtaaaggaaaaccaacaagggatggccaagcactgcagagctagcaagaaaggggaagccaccttcaccctagatctgtggggtcaaggggaaggagggctatcaggagctggagagagaggctgtcgtgtgccatttcatagacctgtacaggagggcacccggggggtcaaggtggtgacctcatcccccctcaccctagtctcctgctgactccttccactggacacgcaggccaggaaaccagaggacaaggagaccatacaggccagccttgcaggacacaaagctggtctgatgatgggtgaagcaagatcaccagctgaaggctgcttgtgggaggggtacggtgagctggagcaagtggagaggagaggagagagagctgttttggagtgtgagaaagcaagcaacaggagaatggggtagatcccaaagagtggaaaaggcccctgaaatccatggttgtgggtttaaagtgaggtcagcatgttttctttcccagcgaaactccgttgctcaggtgcaggtgtgcagtaagggaggggctttgcgaggtgagcatgacagaggcaaagatgggtggggaagagaatgattcttgcaaagaaatgccacttggcagaggtcagctgagcttagatactctgcctgctccagatcaccatggacacccccgacccttgcctcatttcacttattaaccttaattgcctagccttggaggacattatgcttagtgaaataagccaggcaaacatcgcatgttcttatttacatgtggaacctacaaaagttaaactcatagaagcagaaagtggaatggtggttaacaggggctggggttgggagggattggggagatgtccatctaaaacatgaaatttcagttagacaggtggaataagttcaagaaatctattgttcaatgtggtgactatagttaaaaatgaattatataccagaaaattgcaaagacagatttttttttttttttttttgagacaatgtcttgctctattgcccaggctcccaggctggagtgcagtggcacaatctcggctcactgcaacctccacctcctggattcaagcgattctcctgcctcagcctcccaaggagctgggattacaggtgcatgccaccatgactggctaatttttttatttttagtagagacagggtttcaccatgttggccaggctggtctcaaactcctggcctcgtgatctatccacatcagcctcccaaagtgttggattacaggcgtcagccgccacacccagccaagacagtagattttaagtgttcgtaccacaaaaggtgtgcttcagtttctttatctgtataatgtatatgttaattagcttgattcaactattccacattgtatatgtatttcaatgtgttgcataccacacatataatacaattattatttgtcaattaaaaataaaaattaaattaaaaaagaatccaactttagttcatgaagtaatcaaactttatcttttcacaagtctattcaggcttattatcatgtcatcatctctttagtatagaccttgggctctggtgccaggctatgtgaattcaatctcagctttggtacttttagctgtgtggccttgggcaggtcacttaacttctctgtgcttcagtttccttatctgtaaaatagaaataataatcatacctccttcaaagggttgtttgaggatcaaatatgtttaatgcttataaaatacttagaaccacacctgacatgtagtctgttctctatagatgttagctatatgattgttaccgttattatcattatgtgttaagagcaacaaagggggagggaaaatggccaaaggaagtggacgcagagttactttccccaacttggatgctttctactttcctgttcttcctgtgccaaggcagattgattgggttcttagccacattgccactcagggtcaacagtcagctaggatttctttttattttttttttaatttttttgagacatagatgacagctggcatttaaagaaagagtggagaatttgctaggatagagcaagcattggacttggattcagaagtcctggggctggctgaatcccagcatggaatgactgggcagtccacgacaacctcctcagtttacagatgaggacactgagtcccagagatttaggctgcaggatctccaagacctcgtgtggatccaaaagtcttaacattggtttccaatgagtgccaattataaatcaagtcctgtgaaaacataaaaaggaacctaagaatcaaatggtcaagaattgtgtttatttctgcagccstggtcaagaaaaggccatgttcatagctggcattcagtttcctgttgggagtggtaaaggcaacaagccagggattttgttagttcttggatccagaaggttgtagggttgttccagtgaattttatcacctccccagtactgaaagggcacaggcctcttgtgctgttctaggcactgtgatttcaaatagtgcttgaatgatcttatttttcttatccagaatatctttgacacagctaatrcactgtggaatcacctatggacattcaagtcagattaggggattttctttttgagtgcttcatctcattctccttctacctacctattgcttcaataagctctactcacccccttccagtggtcagctgagctttgctccatagtgagaagaaaaccmtcatttagtgcatgttctcagggctggatagcatgggaattggtccagtcagctttggagtaaaataagctgtgaaactccagagggggtttgacagaggaacccactgactcgtggctttcgtttttccctctctgcagacctcctcaactctgtctccctttggctgcccagaaaaggtgctttcagagtgacaagcttgatatttttatttgactgagaaacgacatacttctgccccctcaaatatatatttgaccagactgtgggaattttggtgttgtatttaacttccccaccaagggcccagggctcattgcccacatgtccccacgagtagcatcaaaggctgttctcaaaaatgaaagacgaatgagcagacacagtgtgtcacatcagcaacttttttcccagtttctttgtaaatggaagtttatgaaaaggagcactaactcaaatcacagaatcctgtgtttgaaataaatggtcttgcaacaaacatttccgtctgcaaatgtctaaacctttcaaaagattaaaggaaattaatgctggcgtgtttcattaatttggcaccaccgtggaggaaatgtggtactcatttcatttgggtggattatgaaacgtgtcagtttttccattctctttctccagggcatttttttactgcaaggcctgtcatgatgacatcacagatcccaaaagaataaaaaaatgtggctgcaaacggcgtaagtagtgtttctctccctgtcccctccctttctcattcctattccccaaattccttttccttcccttttcttattagagaaacactaaacatcgagagttttcttgagtatgtttatgtttcacccagcagtttaaagaaatatgaaataaatacctgtccttgctttgttagagcagaggatgaaaaatcaccaccatcaacacctaggaatgaaacctgtgcctagtccctgcttctttactctagaggtgcctcagtagatgtgtccagtctaacagagacaagtatgatgtataataaggaggagaactaaagccacagagcacaaagtgtttttgtatcgtgatttccagtggattgggggtccctgagtatatagggttgagagagaaactaaatctgaggacttggtctccaaaatgggagttgactctttccatttggaattcctgctagttttaataccacaggccagagttggcaactgtgataccttcagactgcccccaagaaaagaactttccactgccaaagggcttcagttgccatcgtccaaaggtcgacctcaagcatcatcgctctttggggtagactagactgggctcagttgtttctggcatattctgtctcaagtcccttctaaagcagtttgccactggggcctcttgagaaagatatagtgagtccagaacgtggaattgtgagctcctgagataccatgacttaagtggtctttgctttgagaaggttgtgccttttgcagtaattatgctgtattgcctaatagaaattgttctcaacccttgaaaaacaaacaaaaaatgatgccatccttcctatggtgagttagtcttttaaaagctccttataatcattgctttgattctcaccctaaccccatgtaattggcaggggtgttattaatcccattttacaaaaagaggaaactaagcttccaagtttgagaggatgagattgctgacagtcacacagccaacatacagggatttgggcacacctgaaggcctctattgattctctgggtgctctaacatttttttgcagaagggaaaggcaatgtgggcagtcttgggtctgatgagtaagaacaattatgaaagagtaccccataaaatccttgttcacaagcagaagccagacagaagagcaccattcctaaagtatgccactgaaggaaggacctttttcattgtactcctagagtggggtacagaaaatgtagaaccagtcatctataaatatcactctgctggagggtaaagaagttcctcaacccatggggaaaattcccttggggtgcactcttggtctagagaagtttctgcagaaatcccctcagggtggggcagcttaggaccatgggtttcctccccctgtttccactgacttaatacagctggtccccttcccccagactcttatcgagatgagtatttattgatatctcaaaacaagagcctctaatttcttgggacaagaattccccgattctgacaacctaccgagaagagcatctaagagagaacaaggcctagaatgaacctcactccccattcaacccccacagaccccatgaatccaaagaccttcttcaccaggcagtccatcccagccatgcttagttggttgtggacacagcagcacggatgagttgaccagacatctcctgaatcatttcaatcagaaggagcacagcagtctgagggttgagggaaataagagagaacaacaaatacaagaggtgaacacttctgtaaagaaacgcttgtagtgaggggttgggaaagggaggaaaggtgaggccaataacccctgacaggatatttgccagaccctcatcccacagagtatcaaggaaatagcaagactgtgattcacatattgattagccgttcacatatttttgagtatcttctttggatgagctgctatttttggtttcagggatggagtggtcaacaaggtaaagtccctgccctcctgaatcctttactctggtgaatggagacaaaccatgatgatgtaaataaataaattcagagatagccagtgctaagaagagagaagagactgcctgagggttgaggaatcctgcagtggtgctactttatagcttggaaggtcaggaaggcctcagtcaggggtgatgttgaggccaagacccaatccagatagggagacgagcaaaggtcaaggtcaggaggcaggaataagtttgtggtgtttgaaggatggaagaaaggccagtggcactggggaaagggtagtatgagatgagattagagacggagacaggggacgtggtaagaagtgtgggttttagtcctatattaggaagcctttggaagattttaagtgaggaaatgtcatcattagttcttagtttaaaagatgtccctggtgtctggatggagagcattctcgggaggaaggagtggaagtggaaggatgaagtgagaacttctctgactcttgctctgacattggaatgtccctcataggacgccatagtggaacacagcagactaaattgtccctagaaataagaaataaggatttggcctctagggtatttttccaccttggttccagacaggtaaacagcagcaggctttagcttcatcctggagagagaggcccataattgtttgaaataattttcttctcttcatttcctttaaagttggtggagctagtgaggtatataatctcccattatgcactgcaccaattgctgcaaaaggcctgcctctacaaagccaagccagtgtaacaagggcctcgcttccttctctgtacatccctgtgcctcctcccccaacctcagcttcttcatctcacaaaggcctttggctatgtaacaatcagaattgtctgaatattgctcctactaattaaaaggccatagaacagagggcaggatgcagatgtgtgtgtgaggtgagggggtggttagaataaaatgaattattaaaaataaacctccccatgtaggtcaggcaagtgaggaaattggagaagatgttttagttgcaaagaaactttaattagaagaaactaggattattaataacacactggggggacccccatgccttcgaacagacattgcttggttccctctctaagttggagaagacagctgacccacatactcatctgtccaaacgtgttagtccaggtattaataattcaccctggaatggtagatcccatgagggcagagctcatgacagtcactggcccttacccatagcttcctaaccctccttccccaacccagycttcccctttcacttccacccctagctcctcattcactttcattcagtaaccttcaacatttcacgtcatctcatccggagaaatatcaggtgcggacattccatttctggaaatcctgtgatagtatagtttaacgtttgcatttctttccatttcttcatagctctctatcaaggaaaagagtcaaattcagctgtctggccgaggagcaagttctcagggtctactatttactcattttctttttctatataacaaaccttgtctaatgatttacatttcttcccccagactctaaaagtttgccaaagtgtggactcctagtggacaagtaatgtctagtttgatgtgtttgaaggaattttctttgacttcaaatcattgacatatctttgatttattttttttctctttgctgccttggaatacggcccctactctattttaactgcacactggtagtgatatattgtgagtaaaacgggttcccagcagcccggagtccagttccccctgtctttctctagaagagatactcttttaattttctgtacagttttagtttcccttttacttttggtatttatgttgcatgtagcagtgacatcatgccccaactccttcatcccccagagtagcctggagccagagagtccccagggagcctgctctccatccatccaccccagtccccgggctctggccagcttcgggcactgtcttatttttctatttgaaaataagaccttgacaacagtgtgtttctcttgaaggccttgtctcaggacttttaagggacactgattaggctgaagtaattaccactataactccagatgcttcatcagctggggtaattgtcatgcttgcctttgataaattatacttggtctcctttgttattgagcttggattcctctcctaaaggaaacacatatgccacatatatattcccatgttgtgatacatatatatatatatatatatatacacacacacamaatatgtaccatgatgtatcagagtatatgtacattcttatatgtaaaaattcatatttttacatataagagtagagatattccatagagtgatgtatttattgcagtacatgcttctctgtatgagaagtgcttgctagataattaattggttactcaactttgggactgtaagtatctcaattgtcttactggagacaagtatttgcacagtggtaattattatctgcagtctatgaagttcccttgctttacaacaaagtttttcttttagtcagtactcagtaggacacacccagttgctttatgaatgttagtcagacatcttggaagatccctttacctgtttaaggcagaaaagctgactggaggagaacattccatttcagcaatgagcaatgtataagtctgaacaagtcaatacaagtgtctgaacctctaacttactcaaggaataggatgcccttttactcaacaagatgtggccattgaggaggagcttttaaggccagcattgarctttgggtctttattcatgtttgtaaggctctactgaaaaggagacccaatctgtggaacagttcagtccaatggctctggaatttggagaagatgtttcaaattcagtcccctcattcctttgcagcaaaagaggcaagttgatcatctgattttggttagtcatcagtgtttggagggtatagattgctcactttaaaaacaaaacacaatgatgaccttcttcaattcaatgcacagtcttgccaaaatcgactctgtggctttcttcatcgacagaaccctttaaacatggcttgagggcatggcccactttcatacctgcagagctgcatactaaattgaatggtccttcagaattggagagaaaatgtggtgtcaatcaaccaacaactctagtgccaaatacttctgccttcctcagccacaatacagtcrttaggggcagaatcaactagctcagtgtgctctgtgctgctgacattaactagctttttctttctcctctgtttttggaaaaccacctggaagacctttcttcttactccagaaggtaatgggaggaattttgctaagtgaagacatcatttctcatttataggacttgaaagaatattctctgattcccagtgccacatcaaaggcctcaccttaaatcctggtggactttttcttccgtggatatttttattagtaacgttagttgctgcagagcccatgaagagtagctccatgtttcttgcttggaaataatccctccttcatttgactgattttaaaagtgaggctgtgacctgaaaagtatctattgattgaatggcagatgttttttttcttccatcccagtcttcccttgaatttgctccatttgaaatctaaaacattttccccagcagttggaaaactccacctgggcccctcagtccagtactgctttttcctgcctcttccaatccaccctggaaattaagattctgcattggaaattggctgacaatttggttgctgatgcaggtggcagatggtgctgaggataggatggaatccaattcttccttccattccaggcttggctcagaaaggccagccagcagagaacctgagtttgacagctgattatccatttgactcaaggaaagagcagtaactgagctgcatcttcaccagccactttccaacaggtttctggtctcatgatcatggcctttgagaatagaggaaaagttgtccaagaacacktctgagaagcctttttgttttaaacactcaagagtaaacaaatagttttgatgatgtccattagggaaatacttctattttgtctctgtaaatagtactatgaagttatgatggaaatgttggttgaatatccacttcactgtggtgaagaaaagcacataaaagctttttctcaaattgtgaaactgccaggacctaggtcttcggaggaaggtgagactcagggtcaaattcttagcaaccacataacctcatagaatccatggccctggtccaataacaagaaccttatgatgtgaaccagagggtaaactgagtccctagagccttgtatttctgctttcctagagttaagttggcctatcggggcagttaattgagcatgaagtttcaagagccctaagatggaatgacaagtagctttggtgttcacacttgccagagacacactcttgtctgctcccagtctcaggaagctgcagcagggctttaaaaaggagacgcagtcagctgccactgaaatagtcctcctgtgccagctgtggctgcagaccctaggctcatctcctaggacctctcaccctttcactgcccctacccctaatcatctgctgtggatcatgagaagccattgaattgaaatgacactgcatatatttcaattctcagagacagcagggtcctctttctgctccttttggagaaaggctagttccaactgcccatgaactagctgctcttccacattgatccactagatgtcctcatagatctactttgtattaccattgacatcctggggaaaaccttgtctgagaattgggatttgggaagggaacaatgggtgactaygtaagaaagaaaattagcaaacaccaaaggagagaggatgctttgtgtggccagggagtagataagaaacttacttctgtttgaaataaatcctgaaattttcaaagttgcactttgagacctaaccttgggaatttaaagtggaactcttcatatctaaaattaaccttctaacctaaatcagctctagaaaaggaaacagtcactgagaaatggaaacaaaacaccagtggttctgaatatccatgattcactgtaacaaaaytgaagggttaggaagccagagagagttgagagagatgaggggtggtaatttccaaattaggaggtccatgacttaactttgatataatttaattttacaacttaagagtataattttacacagagagtgttcaattcttctggaacatctaccaccagggagacaactcctcatcagcttttagttaaagagtttgttcatgatttgtataatggcccagaggagagctcttcctggccagtactcatatccttcaagcctgatgaatcgctccaccagatgggaggtcttaccttttaagaaagtggacccagaagtctctaggtgaagatacctgacagggagtcaatggaaatggactatgccagcagtagcgaaaaagagccaccttcccagttggtggcaccttgatctagacattctgattcatgaaggtttgtcaacatgtggggctcaatagtttttaactgtttctgtcttgtctttgagcctctcattgatcgttcttgctgattttgtgtgtgtgtgtgtgtgtgtgtgtgtgtgtgtgtgtkgtggcacttgtttgtcttttgagatttctattttgcatttggtgtgagtgtaaaaatgattgggaaggaatgacaagtaatagcatgttttcttttttatgcatatgctgctttggaatgtgactgcttataattaacagttaatcttcttatagcacatggttttttgctgcttcgattaccagtttcagcctgttcctgcatgctaacaataagaaattttagaacaatgcatggtcgccagaacggctaacaataacagttgcaaacagtccctgagagccactggtttgtcactgtgtttcctcctgaactcatatcaaggaggaggtttacatcacccrttctgatctgtttgcctctgaacaaatagtttcaaaagttatttcatccccatcatccctccccttatccttaaagacggtatatttataagaactttctttctccacaaatgtgtcagattctattattgtacataaacccaaaatggcagtatggaaatgaaaaccagggaccgttgctaatgagaagcatagcattccagagtttgatgggcttctcttctgctacagcatttgattaaaaaaattgtttttcaaaatgatttatctacggtgaagcaaaaaaatcatccttgtttccctcttctgtgtaaataacaaatcaatattwccagtaaaagaaataagaaagagaaaacaagggaatgtctgcagattgtatgccagatccggatgcatttaagataaatttatgttcatgtctttaattgaagacttttttccctttcttgacttcagccgttgctgtttgtttgggatgtctgggcattcacaccatgccttctaaattcctctgattcaaatgctatagtggaacttttttattttttatttttttttggtaaaagctaaagctcaaaggaatgatataccaccattgaacagggctggggctgcatgatgatctgaacaacagactagctaggacactaaaagaacaygtcactaaaaatgtgagccaagtttacaagaatggagttgctgctgaagagatctctcattcatctcccccagtgcctgttcttcacaatcataacgttacccttgcttgacaaatatactgtatggcaagtcataaaggtcttagaacaggacttgacccatttgagagatttaaacccctcttcctggtgactgtaacattcaaaragggcaaaaccacaagccatattttaaaataagagtgcaaccattctctacaaagaaaaagaaagagtgggggaaatgactttcaaaatggaaggtgtgggtgcagggaataacacctcctcagtttaggtttaccatttggcagtaatgcttagaataaatgtgaattcttctcccacctcgtgagagaagcaggccagttcatgataagtgataagcaaacatgtttgcctgttgtagcatcaaaatgaggtacaaaaaccttctcttgtactgaaatataaattggcttgaaaggcaaaggtgaagggcattggaaactacgatgctgacttccaacaacttttataggttaccactcagtttggatccccaggcagtgcagaacctaccataccagctttagaagagctatcaatgctgcatgcaaattgcattaagatatttcacgtggaacctattcttctatttcatgttttgtcagttttaatcgattttggcgaatattttctgtataaggaaaaaagaaataatatgattaaccaatagcctgattgcttcctgaatttctatttggtggggagagaaaggcagatgcgattttcagatcctctcagctttaagcagaaaatacacccatgagtagctaaatgcattccaatagagcaacatctcatatgcttttggtgatttcttatttgtgaactgcctttaatgtcaaatctgcagcgttagtcttgagtagctgcatttcttatatggacagatttggatatttgttctgtcaagagtaaatttaaattcctgtagccatcatataaactcactctcgggaagttcagcaaaggcatccttagatactgtattaacacrtaatcgtttcacatctaatttgatgaaagcttgtcccagcctctgcctaatgcccagaaatggatggaaattagaaagcctacatattagatatttttgcatcttgcaaaaaccatttattataccaaataagcagctaatttcattgattggcagtgtgtatattttgtcctcctgtattaatcatatcaggggaaaagtgttggttacgttttttgctgtcgataatttgctcttcttcccatttgagaacccgagtgtattcagccatgcccttttcctgtggtcaccgctttacctaggggagaaaaatcatgtgcaacagccttgggagacgataaaggcaatttatattttcgctgcttttttgatgtacaaccaaactgttaccaacaatcactctgcatttttttctgggtcaagactgttaaagtgaactaagacctgtgttaaatcccttcagctcccttccagctgccttgctgtgtgtgaccttgccattaattgccgctcttcctctcctcccatccaaccacacggttatagccaagatgtccatctacaagagaatgagacgggcatgttgttttgattgcggacgttctgagcgtgactgctcatgcatgtcaggccgtgtgcgtggtaacgtggacacccttgagagagccttcccactttcttctgtctctgttaatgattgctccaccagtttccgtgcctgtaagtttaacctcaacacacgtagttccatgtttgtgctgtctgtggtatcatccctgtcttgtgctgtgccctgtggttctgagtcagtcgggctgatgtcttcttcccagtgtgaactcctgtgtgctgacatgttgccccagctgcctatgtctctgtgtacgtgcctaggaaggcctcccttctgattttcttaacttacgcttctcgtaacagcatgcaggactgtgatattacagtctggtgatatctttcctctctctcctttaaataaatataaatggaaattaaagtgacagcatatcacctactgtattaatacagagatatgcagaagtgtacatgttaatatttttgaaatggctgtaaattgaattgtatcaaagggaggaaggaaagggtgtagcgagaacaagccagctctagcattgaattgcttttagtgagcttagatagtttcttagatagtttccaaaatacaacagagttttgatgcagatggatatatatatatatatatatatattttttttttttttttctttttactatgtctctctaacctgtgcctcattcctccagtgccagattttgtcttttgttctggaaacgagttttctatgtctgtcagcctgcactgggctagtggattacagagctttttctcagaatgatgactattttgaaggactgttccattaatatcttttatttttccaatagtatagcccctgtttaactaaggtatcttgcagcaattgtgattccaaatgccaacaaaaaatttaagtcagaaacctctgtgatatccctgagtccatagcacaggcctctgatgtcagtcttctttgtcatccacaagctcagagatgttaaagaacctgtcaaggctatgcagctggtagctggcaaggctgagatgtgccagtttcctgagacctcccttatccttgcttccccatggactttgctgttttcctgatacggttcataagtgaagttcctgaaagctccagtttgagaccctgrgactgtgggtcttggtccaagtgcagaaaaggctgtggttccactggaggactttacttgaagtataactataactttgttttcatgttttggtagcatagaaggtaggagatggttctcgtttctgcacttcctcccttcctctttaaagcagccaacacatatattgctaacctcttgctccctgtcctctcaccttccaagtgctcagagctggttgagctacactttcctagcaggggtaggtgtacactgacgacaggaggaagaagatcactgagctcttaagcatttattcccatggaaaatgaactggcttgactcccctgtgctggtgttgaggctggtcccagcagagtgcggctgtgtagccgggatccatgaggcctctagggctcagggaaccgggacttcactgtgtgccatgccaggtgcttatgtttgggcccaaagttcaagtgcaaagcatgatttgtgcatcgagccatattagaggcatttggaaaactttgatctaggaccagagagtcattctctctgattcacgatttcctgctgctccagagcagtgccaagggacaggattcacttcaaagtaatacctaatggaggttgcattgagagggagtgtggactgccatatgggcctaaaatcttggaaagatttctgttacaatccttagatgctaccatatgaatccttatcactttattttcccctgaagagttatctgtagtttgcatgccattacagagataagctagggcacagctgcacagagaacttgtctgtctacgatgtgcagcaagacaccaagttcaaagataggtgctggggaggaagagcagaggagggcctgaggtggcatgaattggtcacatctctttgactgatggtggtgaaagtaaccacaagccccygggttactcttctgcctaatgcacaacttctgttctcaaataatcatgaggctctaaaaccttagcctagactcagtggagaaaagaaaggagccactctggctctgagctagggccccttggtcatgtcttggcactggccaacaataccaatcacagcacactctgtgtcccccatgtagaccccatggtgcccagtgtgtgtaatttccattatatccaagagaaatcttaattagagggatttctcagctgtgcaatttaatccaaccattgatggagaccagggagaagmaaaccttggggtgggattgtcccattctctaagaaacattctgtgagtggcatgttgtccctcccttgcctccaaaatcagcccccaccagggaacacgtggagctttgggctgcgtgttgaagccttaactggtattgacagctcagggggcgatttgccttctccgtttcatcagtcgtcctgccgtcatcactccatcaaacaaaagcagatttcatccatccctgtgtgagaccactcacctttgaccattaataataagttagaaaaatccattccaatttgagcccctttttgggcctgcataagcccttcttctccaattataaaaatgtctgtctctatgtgaaattccactggcagtgctccaatagcaatccccaggcatccctcgctggtggtggagttgggtggtgcccatttgacagagcaagttgactcaagagcagtggtgagagtgggcttttcattaaatatgaacagatgtgaaatgtagagggtttgacaattagaaatggcaggagaagggcccttgaatcaaagtgaggtcagatgggcggatcagattacttctcttacattctttagttgttctgaaaatcattttgaattagtgtcagcagagccatgatgagttttgccctttgtcttttatgctagggctgtattgtttcccaagacactcattaaaggtcattatactattatggagcttgctttggtcgcagtttcccagttgagccagtgtgctttggagactgcctaattcatttctctctttcctttcgtttccctctttactctattttttttcttataaggggaaaaatttccgttttcaagggatgttaaattgaaacacaaagtcccattatgtgttttgtgaagtgggaagagaagtagctggttcccagaggaatggtaatatattaaaagtgctcacacagttctgaaaacctgccttctaacaacaggggctgcctgctcggtgcacccctctatggaggtgtggcccattactgtggatcggttgagtcatgtgctattatgatagttgtcttctgttgaactcaggaggagayggaaggccagactgtgttgaccaaaagaacttcagaggggaaggactagtttaggaaagacaaaaatcaaaataaaaggtgtcakaaaagtaaggcaaattgtgaccgataaggattcatcacaaaaggattttatttctggcaagactgaaatgttcaatatggtaggctagaatcagtgcatagagtgtcattttatgatcatcttggttttgtttccacttcagatggtcctgggcaagagtcccagctctctcaaaagacatcaggatggtatgggcctcggctttttcacaagtagctgtgttctagtactattaaatgtaaaaaatgaatgtctagcaacatacacatgcacataaatatagaagtagattccaatcagtacgatttcttcccactataattttgtaaaatggacctttctctctctttagaagtttattcttgttatttcagtcttgcctgctatctgattgctaaatgtaatagaaagggacaattaaaattatgatgcagtggcaacgtagggccatactgattcagacctgctgagacctgcctgacatgattctagtcacaaagcatcagtaactctggcacaaacaaattaatcctgtggtagaagagaagcagacctttagacttgcacttggaaccagctttagctaaagtacatgtgtgattgctcacaccaacctttcaatttactaattgtttaaacctgcacaattacatgcagccttttgcaaactactgtagctaattttaaattacacatgacttttatttygggtataaatataatacaagaaggcattcaactccgatggttaagctgagagaagtccaatatgattaggttgaagggagacgtaccaaaatcagtttagtgtartatcgagtcttgtcagataataaacaaaaatcagcttatcctgagtagcctttggtttgtgcagacagagaattaacattgtcaatagaactaaagtcacttaagtgaactaatggcattttgaagtacataaaatcagatacaagggcagggggtggaaacagctctaggaaaatgtctataataggacacaccctatcctgacagtctccaacgcctgttaaaggagagttaatttaataagctacatttaaaaatcaacagcctataattatctcattccttttatgtgcagttttaggtgacttcctcaaattccccaawcctaaattctatttgcttattttacttctgggccctaaaatcaattactcccctctttccaccaccactaccagtgagaaaaagacagaaaaaggagagccaaggataataagcacgaatcgatgtgatcatagtttttcatgtattagttttaaagcctgttcrtctgagtctccattttctcccatcttcccatgcttgccgtgctgatgtgagtgcgctctctctctctctctgtgtcaatatccatcacacatgtgcacaccaaacactaccagagcctttgggttgtcccctggctctttagttaccctggcccatgcgtcttgatttgaccctttgtacttcattgcagraagtaaaaacagagtggcagatcggcctaggcagccaytgggtcatcccctgtgactaagacctagtgatgggcctggaaggggcttcttaagacactcttattggtagcaggtgaggctacagaagccactgcctcttgcttgattttgtgatagccacgctgagccataggttgactggaaatatgccttactgtgggccttagctcactctgtgcagtgggcagcttcttaaatcagcattgtaaggcagaaatcatgcttgggcaaaattgcctttgagaaggatcctttacatcgctcatctgtcaagagctcccaacacactgggttcttctccagaataaatagctggttgtttcagttgagtgtcaggtaaagtcactggcttgtatttggggaccttgttgtgctttcaccaccttccaaaaaaagagtatggttgaattcctgaagatgaatacactatgaagatgtactgcaggtagatgaaaggagacgggaacagtaggcaaaaggcagccaacttctcaaaagaaattctttgaaacaggattgggaaacaagaaggagaaaggtcagaatgagggaagctgacagggtcctttgtgtataccccatcatgggacacctttcttcccagggacaccatgctgtaataaatgactcggctctttaaggacaaactagaaaagatgttggcatgcctcatgtaagcccagaagaggcccttatgcaaggtgacatagaaattatgtttgcttttttatttcaggacagtggccggttctcaggatactcatcctgacagcttctaccaccaggcagtgaatgcttcctcttacctccatggtggagggcagatgtggccagttagctcctcatcttccatcctcctccactatctcaggcgacagatgccagggccagcccgccttccacttgagctttcttgtcaaggctctgccttgagcccaaatcctgacctttactgtatgaaataaagtactgatgaacaagcagaggtttgaattagagcaggcttggagcaaatgtcaagtccgtctctgcctctttcctccacctgcaccaggagcctcgattagacccagtgtggagtttgcagcgccttaggctttatgggtctggggagacataacttattaacaaagagttattaaatttttatcaattttacaacacaatgtaaatgcctcctatgaatctacattgtattcattatcatttaaaacgttaattaagtcgaagttgcatttaatttctctctaaatgggcctctgggaagacgcttttagaaacatctgtgggagcgtgcggctcacggagctggagaatcccccagcccgcattcaggatcgccccctgagttgattgctatcacgtgtctgtggctaatttgttgtgatgtgattgggtattgtctcaaattagtatcagaccaataatggtgtgaagtcactcgagagaggcttgtggggcagtggcacaggcttcactgcatcctgccttccttccccatccagacagaaacggacagtgggtctgcagcacctgtggtttccatcatgccttgggattctccttctcatatggtgcccatcatttcagttggatacttccttcatcggagatggatgcttgtcatctggcccagcacatttaggacatttgccagcatgctcttcaaaacgatcttaacatttgggatctttgactcccagtgaagcctagaagctgcaagcacagagcagccaaaaatggaaaccagaatggagtggacctagtaatcataagcaggtcatgctcattggtgaggagagacagagggaggcatactaccaacatttgctgaaaaattatgtttctcttttgaggctagcatcatgttttagtcttatctgagcatggggtcactccccaaagagatctatattctgtgtatactgcatcaccaagggagtgagacttgttgacacagcattactaagaaatggctagttggttaacttggattcatgttacgactagaattagtgtagtctctactcttactgtgtgcaagcaactctgagtacacagggaggatgtgtgtatgtgttgttgctgttgttaaatttaacacttatatagcatttgctgcattacaggcactactccccctattaccacaaatattaattaatttaacccttattatgtggtaactgctgtttgcagttgaggcaactataacctgagacatctgcaatgtgccccatttacagataaggcaactaaggcacaagggtctcatagccagtgagtctggccaagggtctcatagcctcatgtcacagtctcatgacttgccaagggtctcatagccagtgactggtggagctgggatttcaacacaggccgtgtggctccacagagtgtggagtcggttgagttgctcagttactcttgcagttgaatatgatggataagtcacttaatctccaagggaggagaaaaaagtgaggattctggtaatgaaacctcgagataatgtagagagtcctgggggggcctcctgcacagcagctggccacccaatttggctagagtttaagacttacttagcatgcagggaattgacccccctgaagggtaaaatggggccccattcctggcaggggccaggccaagggttttgttcttagtctgtaatatgatagaaagtctttagacagtgcgacactatcatattggtgtttgatcagggaagtgacctaacagaggctttgttttgggagggctgctgtggctgcaggggaggaagggactgactagaggggagctggaagcccccctctcggggaggagacaaacagaggggagcctgttgtgggcgggccccagctgttctgagaagccttcagaaggaagacttgatctatagtctgcaggaccctgcaggtgaagcacattgcccagatgcaaatccaagaagttacagtctttaaaagacagtttaattagtggctctggagcagctgaattccatgagcctaattctccccagctgacctggcagccattgtgattcctagctgggtttgctagagtttccttcttattggaggaagatttcctgacccctgacccaggactaggagacccactcggctgcatccactaccactggccttggggatctactgcttctgtttccttttcctaaccattatttcttccttattcctcatcatcttccccagttcaaatatatcttacatcttgagtgtgttgaaggtgacaggcaggcagctctcacctgctggtgtgaagtattggctcaggctgagcagcagacacaaagcaagtgggagccaccagtggggacagctggccagcgctgaggctcttgcttccagctgcaggtggtagcttcagttagagctcatgggaattattctttaaatccctgtatatggcaaggagacttttctcctcctttctcaggaagtcagcatgtctccttacatcgatggggggaaaataataaagtgcttcacatcccattcactgaaaatccactgtagttttcaamcacttawccttctcgagtggaaatacaaaacacatttcctgtgaagtactgccacacagagtcctaaagaagtcatgtggcatttctaagtatcatgcacaattttcttttcggttttactgctttgtgcataagacctttgtctgtgtccttacttatgtcagcatccgtgattgtggcatttgtgtacaccattgacctcagggggtcattaaaactgcatggaaaagcacttgagtcctgggttccctcatggtggtaggctgtgcatgctgagaatgccaacttctggaagtgcaatgtggcaaaatgcaccaagccaaccagctgtgtgttgtccttctctctctggggctttctccmaaaccagcttgttgaattacctggatagtcaggggaccctccatcgccacatctgcttacaggggttctgcttccccagctgacctttttcccaaagggaatctaaatggacagagctaaatccagcattgtcagacccttgcatttgaaatctcagagggaattgcaaaggcctttctgtaaatagctagatagtgcctgctttggagggagattgctacacatgcccacagatttttattctgaggagacattcttttgatgtccagctcagatgagcaggactaacaaaagtggcctttcttctcagaccatctcatttggtcatcctcagggggagctaatctctcatattcaagggaaacagcaagaaaaaactcccccagccttttctagtaaatctgaaagttttcattctagccccttcaataccgcaagatgagtcccaccaaatgttcctagagctgcagagaaaaccctatgcaaatagaaaatggaatcttttgaggcagatctgcattagggatgatcractgcactgagagacttataaatgaagtgagaaagactccagccctagagctggcactgcaccagctgtatcgacagtgcatagatgggcatctgcacaccatagagcatgggctatcttctgggaagggagctgactgcttgcattaaaatgatcttcattttggccaatgtcagctttctgggctggagcctgttggatcacactcagtcaagaaaggacccaggggctgccttccctccctccaaggtcaaaaatgtagcatgctgacatccttggctgggcttcctatattggcaagartacttgaataggaaatggcctgaaggattccagttcagtaaatatttcatgagtaaaagaatgaataaatgaagggcttcccaacccttaaaggaattggtgatgtgctagaagccagatcgccctagatccatgaagcttcccaaaactttctaagcagcaacttactatatagtatatatatgtaaacataaaaaactgggatgtacaagaagagtaagagggaaaaatgtagtaagaaagaacaaggacatgactgaaggaactagaaaatgatcaaatggcaggtgcaattgatattctttgtgaaggataaattatgggaaagaagatctggaaacaaagtaccagaaaaaaccacataggcaaaaatccaccaatgcttccaatgaggagtggcagggttactaccacatatagagcatttgctctggaaaatcaaggacttgtgacattcacattcagttttattaatttcrgcaaacctgattattttggtgtgagtcagggcagcataaaaccaatgcattgggyagggctcatgtgaggaaaggagtctgttgtagctagagaggtgtcagcatctgcaggtgggcacatcaacctgcccaaatgtagagcaacattcgaggccttttatggckgtcagggtaatttgactctgactcgaggtaggcagcttgaatgcaacagcagcacccaaatgattcctcccrcgtggaggtatccaaaagctgaatgtctcatagctattacctattaggagccattattctgtttgttctgctcaagccaaggaagagttttcctgattgttctcaaagctctctcaggctgcaccaagcattcccttacctttgaatggttctgaaatgctctctgcattttgtcaaggctgatctggccatttcttcagtgcagatgagtaaatttccacatatggcctgtaacgtatccaactgagagaacatatccagcagggatgcttcaaaaccaaagccctaaacagatgttactgagaagggatgcacaatgacctgcagagaagagagatgctaggtgaaaataaaagctgcaactatgctaggaatgaagacagggaggaaggggctcaggtcatgtcacagggtctggaagttagggcatgaatgtgaaatttgcaaggggctggttgctggaaacactgctccttcacaaacatcttctattaagatgaagatgggaaacaggcagacatctcctgtatttcctcctctctatgttaggggattctgatgccattcccctcactgtgcagtgaactgagagatcttgttggcaattacagcctgaaattctaggaaacgtcagagcaggcagatacaagggtgagatctgtgmattttctggaaactttggaagtaagtcctggtgaagtcatgctttgacatgttcaccaagtagatgctcatggctataataagagtaatgtcttatgtgtgtttgagtctttgtgcttctcaaggcaccaacatcatctcatttcatctaggcatccccagcatagacatcatgtcctactaccatgtgactttgagtaagttccagaacttcactattttttagcttcctcatctataaactggagataataaggacctatctcacagagtggttgcacgaattcagtgagtgaatatatataaagattgcctggtatatgttgaattattatttttatcatccttcattaacatatgaaattaacaaagaaacagagatgaacttgacsaagatcacatagcggatgagtggactgctagatcagaagcttgccatctcccatagtattgatggaaataataatgataagccactttaaccataactagtgctttttttttttttcaaatgactgactgtcatcaagctagccttataagaggtcatatcagctacaggcagagaagcccacagatagtggctgagagttgaacagcttagtataacagactataaaagttaaatggagtcaatttgtttaatttctaggtcatggaataattgtcccaacagaaataagccaacaaaaataccaagagacagctatatctccccagaacattgatttccatcttgactatccagtaggccttgcaaaatttgtgtgtaaaatgaggaaattggaaggtcatatttctaagtttcctttaaactctgagactctgattatcttccttcttctgattgagaaaggctaaaagtcctttttgcttcaacccttactgttataaatccttctaaaatgctgatgtctattacccaacatcgtggtaggtcctgtgaggaacaattatgtgtgtagaaacctcgtagtatatcagtgttagtcttctgtctgtgagttcgcagcttctagggcaggaactgggcgcacagggacacaccgaaagagcccagaagattcttacaggtttctactttattgtcagcttgttttcttccaaggtgtcttttattttcctcaaggaaagcacagaaaaaggccctctccctaacccggggtcctggtattatctatgctccagtgatttgggggttattagtaatcagaacattgtcagctactgaagctatcccagaccagttcatatgcagtgtctctacaaatggccctgccctcccacaatgaatgctaactgttgacctccccaaagagcctcctcatcatatttgttacaccttgttttgttattgccaggtctccaggaatgaaatcgtgtagcaggaagcatatagggccaaacggggacaccatctccaggcaaaagaggcttcctagttggaatagtacagatttgatggatgaaaataaatgtgtgtcttagattttagcccagctgttagaatccttaggtcctgggatcattagaaaactgtgacttcaggtctcatcattcctcatccccctgaaaccccttctttatggcttgtccatccctaaaataggtctggagatcgtcagcaaattcaawgtgtttttgggagagggagggaaagttggaacacaaaaagaggagaacagatggggaaagaagacattcctgtcctttcaaattccatcaaaatttcttttttgatgatggtcttgatctcaactcatctttttctgttgttattgttgttttttgagatgggacctccttctgtcacccaggctggagtgcagtggtgtgatcatagttcactgcagccttgaacttttaggttcaagcaatcctctcacctcagcctcccaagtagccaagactacaggcgtgcaccaccatgtctggccatatctttgaggtccagttggtgttgagacttcacatcatcacctttcctaccttgctttatgagtagctgggctctgtttcttgttgattttgtaattaattagatgagtgcttggagcaaggccaagactgggcccaagtttttcacccatgccttaccactatccctttctttcagcagacctgatgtgtggataggtctagggatgagtggaatgagtatcaatatgcacatttgaaattctgagttttaccctgtaacactctctctttcctcctaccgatggccaagtcctctgatttggcctccagattacatttcgaaccttttctcaccattgccagtggcactgccaagctcacatgctcatttcttcttcagctagtctgccattgttgcccttcaacctttcaattagttcctcttgccaccaaaccaccaccaactttagtattctaaagcacagactttgtcatgttatcccattttaaagagagagaccttttgatggttccttgttttttaagaggataatttccaactttctgctattaaaatggcattcaaagccctttgcagtttggcctcaaccagtttccctagttccgttctccacataagcatccatcatctaacaattctctagaagcgtcttattctcattactttacacatttctggaaccttttcctgagactgtgattcttttcctctctgcttctagcagattaaaacttacccatccttcagagcaggggtcagcacactgtcccatgggcccagtctggcctgccatccattgtagtaagtaaagtttccttgtaacatagtcactcccattcatttgctcagtgtccatggctgctttcaggctacaactgcaaagctgagtaattgtaacaaaaagggtatggcccagaargctcaaaatatttactatctggccttttagggaaaaagttggccaacctctgctgtgaaggtacagctcaagtactgccatctctgtgaagccttcttaactagcccacccrgaaaccaaattagaaaaagtgaatctcttttctgtaagcctgtaacatttcatgtaaaccccattagacagtttttatgttgaggtttttgtagaagtcaaaattggtctttgaattcttagcatattgcacacagtaaccaagacacacagtgtgaattcaataaatggctgattaacatgtaaactctgttgasaatatgtttccatagtttattaagcatgtatctcaaggaaaaaggtctttcatgagaagctgaaccagaggcaaaaaaaaaaaaaaaagtctcaaggctagagatcttcctttcttccttcttgttcctttataccttcttgaacagaacctttgtttctgaacagccaacagccaattcctttgactgctggacaactcttgaatagattgatctcaaattgatcactgcttcttctgaaggtaacacatttgttccgttgtttctgctgacagcacatggtgggctctgtagtggatctgggggtgctgatgttttctccttccatatgtcattgggtatttgagtcggggtaggaagccatggcaaacccattgcttctgttcatccacctatgtttccttattgatttgaatttatcccaaataaatttggatatttaaggcagggtgtgcacctttaattgttcagaccctagccaatggcctagaccttatctcactggactaatacacaagctaacactaggagttatatctaggcagggtaagcccccaactcgaatcttgacagccctgaaccccaccagattccccttcaccctttgcatctgtccagaattgctcctggaaaccctgtctctccagagtgagtggtagccagctgagatgggagatgggatgcccatggcctatgcctgagaccctcctagtcaagctccctgtctggataactggagacacttcgttctcaaagcaagcattgtgacatttggttctcttcacacatgtgccttacccagcttagacagatggaagaattgaatgtaaagagattctacagaatgtattggaaataacaaaattgtgtatgtgtgtttttaaaggatacccttttggttgccgcatgagttattttgttgttgttgttgttgttagagattaaatctcaataactttttggaattagaatgggcttcccatcagctgaatgggctacacactcgcctccttttcatagcaatccaagaactccactgccttcctcacatcccctgctatgttatcagcatggtagttttgcttgagatcaaatcagggcaacataggaactgtcatttttcatttaccggggccctttgatcccatttgaggtttatttgtttcaagtgagaaacacaatccctattgcatacatctattctttagagtacttttttattttatttttttatgttagagatcaaatcagagttgtaagtagtatggtcattagttatcaccactagatttcacaggctacactttatttctgttcttacaaaatcaccaaccttctctgttgcataatgatcacttccagtgaagccacaatgtgcctttcttgggtacttgggtgttaatttatttcacagtttcctttgcagatgcaatcagagtcacctatcacattcctgtttctgctttttattgtgttcctttgctatcgcgtttgtgtgatcttttcctgaaaaatgacaggtagtgtttctctgctcactgtatcagtgacatattttccacracttctctattgctattttaaaaatataacattttatagatgtaatcttagttgtttgtaactaggttttgttataggagcaaatttcctaaatggcatgttggtttaggtacattttttaaagaaagggaaaaatattttctgcaaaatagtttcctctaaattgtaagtgaaggaaaagctctgttagtaagattataatgcattttcctgatttcttagtacatcgaaattcatgaacattatttttatgtaagtgattaagttgtggcttttaataacacgttgttagagcaaaaagagctatcccttttgatttacttgtgtatttactgggtgacttacagtgctttacatattagaattggtttgtcaacaattaacattctaggtttttatataacccatacttcaggtaatataggattattaaactacaaccagtgtgttagaaatctgcctactggtaatacaattcttacgtataacagcagctgagaaatactgctgtgtatttatgcatagattgcaagacagatggcctgcaagccgcagaagggcctgacatgcaggtccaccagcaggtggcgctgcttttctagaaataaaccctctacctggattctaggtactctcctcctcctcactttctgccttttctcttgcagattgtctcctttatttctctaaaataaatatctaaaactgttgttgctgttgtttgaagagatatacttccagtacgacaatgcccctcaattgctaaggtttatttgaaatccaacttgcctgatgcagtgcttacttgaagcaagtccaagttraatacatgttactgtttttaaaaggtaactacacmatactggattcagcactgagattggattgcctatgctatctgattattgttatgtggcaagttcccattttaatctaatatctatttacacaaattaatcccataggcttctattcacctcaggataatgaggggcatttttattaaagtgactgattgatatactgaattaatgttttatataaaaatcaccttagtatgatgttctttcatcaagagttactctagaatccaggctgggtgcagtggctcacgtctgtaaccccagaactttgggaggctgaggcgggcagatcacttgaggttaggagtttgagaccagcctggccaacacggtgaaaccccgtctctactaaaaatacaaacattagtcaggtgcctataatctcagctactttggaggctgagacactagagttgcttgaactgggaggtagaggttgcagtgagccaagattgcaccactgcattccagcctgggagcctgggtgacagagcgagactccgtctcaaaaaaaaaaaagtaaataataatactaataaaagagttrctttagaatccaagtcatccaaagaatattgcctttctctcggggccagaactacattttgacaaacaggatcagagtttctgttaagttttgttctgttttttaggaagacttttcacagaaaagttgatcagctcatcaactagggcatcataaatgaagagagaaatcaaatgtgcaagcaaaactatttttaaaaattattttgtccacacatacccaatttttcaaccgttttttaaaaaagacacagctatatctttttactgttttttttatggtctgcggtattcctttgtacagaatatttagtgcaaacattagcttatgtgggagaaaatgaatttattgaggttacagaaggggagaattgaaatatgtctcaggatgactcacttatttgtttatgtttttcattattaaattttcttcctttttttttttttttaaacagtgtctcactgtgtcatccaggctggagtgcagttgtgcgatcttagctcactgcaacctctgcctcccaggttcaagtgattctcctgcctcagcctaccaagtagctgggactacaggcatatgccaccatgcccagctaatttttgtatttttagagacggggttttgccatattggccaggctgatcttgaactgacctcaagatatccacctgcctcagcctcccaaagtgctgggattacaaatgtgagccaccattcccagcccttcattattaaatttctacctatcaggccgtaaagaactttggaagcataggcagtattttactctttgaataggatttctctcttttgagtttttaaacttttctcaggcatactgcgctaagggctgcaagttgaggatctagataatgtaatgtatgttcttatttaactcacccatgtgattttcacagagaacatcttgaaatgttattgattcaacaaaatcaaggaggagaggattggggaaacattttcttctcagtgaatctattttaaagcactggttttgttgaaaatgattttttgaaaatatggattgcagtcagttttcatgtaaaagtcaaaccctgacgggtttccttccagttctctgtagaggggatgggatcagctggagtagttgaagacaagaaatagccatcctgaaatcagggtaaatttacctggctgggctgtgaggaataggccttgtgagtttcacgggacccctttctgaggcattagataactttattttcctgttgaataagctctccagaaaaaaaagaaaaatgagaacttcaatggaactggacagttgccaagggcctccctgctttatttccatgcatgaatgtgtgtttcttaccttggaaaggaaagtgggctgagcgagctaggcagtttctgatagacttttscaagatgcaaagcccacccactatcctctttgaacttcagtatttaaatcagaagaaaaatagctttcccagaggcttcagattattactaaatattgtgcaaattctatcatttggaatgtaaacgcttacactctctgccctttatacctccarctgtgccctcaaacacattttcctgctctagccaaattgactttcttacagtttatacagtttagtattttccaaccaccttgccttggttcaaactgtgtcctccacctggcatgcccttcccaccctctactgccactccttagtctgttcagcatcatgggtcaagtgccccctgagtgccaggccctgtgctccatctggggatatacgggacctctctattcatcctattcttgtttcaagtcgtcttctttttcttcctttcttttttttttttcctgaacaattctctctctaggacttaacttattgtctaagacatttcatgtagccctcccttgacattctcatgcaacatcttttgtactgttgcatttatgtaacttatgagttcgtatattcgtatttaatgcaattatctaatttctctggctaggcttgtggttctctcttattgtgcatctttaaaaagattttaaagaaaagaacaagaaaaaggtatgcccgacattaaactcagagtcattacaaatcagagccagaagggtctcatacttaactaatgctcatccccccaggaaagggaagtgtcttgccaaggccacacagttgatccaaggcaggcctagaaccccggggctcctgatcactaagctgtgcttctcccctttgcaacatcgcctctgtagctgctcggagctatttattgggaacttttcagggcccagcattgtgagagactcagtgatatgtgaactccaacagaggagcttataagcctagctgggggagtagaacacattasaattgaacacaaattataataatgcaaggcatgagatcagaagtgccaggggattttttaaagaaaggagagaattgatcttgtcataatcatctgggaaggccccctggaggaggcagcctaggctgtcccttcaagggtggtcaagtagtcaggtgaaaggaagacatggtgggagagcctggtgaaggagtcactgcctctctaccccgccatgcctctgccccttcttctgtctcccatgtgtctgcayacgccgatcaatcccatgacctcccagcagaaattcaagggaaagaaaagaggccctcacaatcagacggcgtgaatttcctgtaatttagaggaaacagtggggttcctctgtccccatctgtctttcatttgttcttgccctgaatggttccagccttctccaattgaggtccgtttaaacgttttctggcttttcttgtttttatgacatttggcaaaacctaattatttgacttgagcacttcattggggccatatgaaacaagggacaaaggtgacagttgaatgagatgcaaggctaggggtcaggtgggggtgggaatgctcaccccattctaagtgttggttagcggctcaattgcttggggaaggagagagagtatggacccatgtgaattacaccatgtccaaatgtggcagactggtgtggagaaggacccagcagcagagaactctcattgctctgactcttcaaagccaaggcaataatcatgggtagcatttagaaagagctcaccaggaattcttttaagtgcttttcacattttcagtcaattctcacaacaacctattagataggtactctaattctcattttattggtgagaaaactgaagttagataatttgccaaatacctaggttcagacccaacaatgtggctttaagacctgtgtggttaactcttaacctctctacccactcaatgtgagtaggcatttgtggagggatatcccatgccttaaaatctttatttcggggatggtacacttgagtgtcactggttccagggccagaaatgcaaacatggggtgtctgccctatatatgggggtacagtaggcagcagtggggcatttgagcagctgataagctcctgccccaggagaatggcacccttttggaatgaagactcagtcctctacaagatttttaattagaagttagaaatccatatttgtatggacaatcttcagacttaaagattgtcccacatgtgaaatcctgtgtatcagcaggktggtgccaagctcagcacactggggacagtagttggtcctcaggctgtcagcctgcagccccctggttatgtcacataatcccaaagcatctccgaaatttggtgtccttggtccagtagggatcacagtagatcgtaggacattgaggtatggagtaactggtctgagatcagagctctaaagagggtcagagctgggacttgggcaggtggactgactcaagaagctcatatcctcatgctgttctcactcacaggcagaattctggcagcaaatgatctgaattagaagtcagccgacctgggtcctgggtcagggtctgcgtatgagtgcagctatgacgcaaaagagggtgaggccagagcatccccaagccgcttccagcccttctgttgcactccacaccttgttctccaatgcattgaccagaaaggcycaccatacactagcattataaaatattgcacaggatgtgtccgaggataaattatgatagcatacagataaagattttatagttcaagaacatctatagaaggtgattatgcccttaagaaatatactaaatgctgtgtttagtgtaaagtcataatccacactggtccttacctcccaaggttaaaagcatactgtatttctaaagtgttctggcagaatattcttcgkcgggcacctggcttgcactaaaaacccatgcattttacctttatctgagtttgaaagaaattatcagtgcacccatctggaatatatattagaattctagggggctcttgacaccattggctcaatggaagatatggtatttccggatgagccaatagtaataatgttaataataatagtggtttgtatttatataacatcttatggtttagaaaacagtttcacatatacacaattagattctaggctggtctttaaatatcacaatcattggggcaagcattaatttaaagaatgtaaacagcaaagtgaaaatggaaatgaaatgtgattgacatcttctgccagtcatggctatttgaacctgtttgggggtggggggaaagaaaaagaaagtaacattggtgtcaaaatatgtaagcaaataaaaactttcaccccaaagtggaaatgtaaatcaacattgtgttaaccaggaggatttgatgtgggatgtgaaataaagtccacgagagacctgaccccagctctcttttctgtttctcactctgggcaggtggcaaatctcagattcctgaggcagcatgatcttttctccactccttgggatgcctgacaatttgtaaatccacgaggaagtgtttgttgcaagggccttccttaacaatctcatgcaaacagcatgaagtgatcaaaagaaataagtcttgtgttagatttgccttgtccagttctgtggggtggcagaaccagtacctcaaacacctttgagaaatggtgttcagggctggaaattgggcgaggtgagagaagcttttgccctgggcaccaaatttaagaggagacccaaaacctcaggaatcaagataaatgatagtttcatgcaatattttcaaactatcaaaataaaatattttcaaaataatcaaaatttaaraaatccaggatgaacagaatgtcataattttaagtgaagacagtataaatattgatttcaaagctgacatttaagtactgaattcactaggggtggaaacaatgaggacaccaggaaactagcagctgtagccatgggtgtgagcccttccagggtgccaggagcagtgtttggtatcttacaggcatttttttcttgatacacatcgggggacctgatttgacctacagtaaatccaaatctatttgattataaaccgtcttagaaaaagagttcctttacaggctccataaattccattacagtccactttgtctttgttaaatgtatgggttggaaattacaattcttttattcacaatgatgattttagacacacagctcagaaagatcagcattcacttaaaaaatatattagcatgcttgtatctattaagcactattgctttgtaagctccagctgatgattttattaagtagactgcaaaaggggaagaaaaatcaaggataattataaattcataaatacataattcattggcataaaatgatttaatggaatggatgtggaattatctatttcctcaagaaaataacagagatattctgattaagcctataatcttgtgtatgtgaaattctagccaaactgatggggcacattttcttttctgaaactacctttgataagaaatgcattacaaactcatcagtttggcttcctgttaacaaagagacagcagccgtctggatcattctggattcacagtgaaactgccacaccatgtatcctccaactaaagctgtgcaagtttgacaaggggcagatgaatccaggagttattgtgcagaggtttaaatctatgcggcagctgacggttgaaataatcatctatatatcgctctgagctagctggggaaaggttgaagctgtatattttcaacatatctagtctaatggttaatctgttgtcttgtacggggctctcgcagggtggactggcagcacacgctgacagcttcgaggaattgctcacggtagatgtggttcgccttgctttccaaagtactgggtggatgaatctracttagcttgagttggaaaatgtgaaactcacctgactcatgacctcaaacacgagcggaccagcagggctaatagcaggttgggtggtagggacagtagagtcactaagctacctctgttcctcccaatgtccccagatctgtgcacttcaggtgggctccacgggtatttcttttgttatttggctgtcttggcaggttgggaagaacattgttctttgtggagactggaaagcaagggaaatgtgagaagattaaactactgcaggggtcagcaaactttctctgtcaaaggtcagygagttaatatcttagtctttgcaacccatatggtctctatggcaagtcctcaactttgtcgttagagatggaagcagccagggatggctggtaaaccaacaactgtggctatggtctgataaaattttatttatagccaccaaatttcatatctttttagtgggttaccaaatattattattcttagattttgtttccccaatgacttaaaaatgtaaacacactcttagctcatgtgatgtacaaaaacaggtggcaggctacagtttgctgacccctgaacttgagaaagatgagaaagaagcagctgttggtgcccaggatgtggcaggtttcatccctactctaaaagttgtccctcacaaacgcggactgcaagtgctagggcaacctaaaggagtcaggtttaacttttgccacaaagccgaaagttggcttttggtgtcaggagtagggagtagggagagaaggaaaggaaagttgggaggggctgtttgtattggacttctatacattccccagccctcccagttggatgtaaagtaaaaattatctcccatctcctagtaccttcccattctccaaaccccatagcaaaaattcagggaagttctcgaatttttcttttcaattgtgcatttcctcttagaattccatcgttcatctctgtgtctcatctctaagaaactaatacctagtgatctttgcttgagacttttctttgcccttgaggtaatagagagtctattccagggaaaaagaaaagggctaaaggcaaccagaaaattccaaaaggattttctwctgaatactgaacagggcggagtgttgggcaatgattctaacaggtcaagtctacagcgaagatatatgagctgcgattctagatatggggggctttggtacatgctgagttcctctcaggatgcatacagaacatagtttgagattggggttgagggcctatggcatgggtagcatgggcacatctaatttacccaattggattctagwggatccattaggcccgcagtattttgtagagaacactgcattccatgtcatgtggattctgttcatatatttatatagtattttttttctctctcctatggaggagctgaattctttcattactctgtgttgatggactcaaacttacacaattcrggtttcctaggcagtgaatagagccagaaatacaccctgtgattaacttctacataacctattgttccttaaagtctccctccccattttcctattagctccacaaaagccagaaatgcaaaagctccaacaagcctcccttccctgccctggcagcctaccatggggtgggcactccctatgcctgtcctagggcagtacaggtcacttagacattttttgaaattcttattctgcataacgatagattttttaaaaactgatacccattaggttttccaagtaaatgtgtttcctatttcctagctagaagttgtgaaattatcctgccagaataatgtatatgataatgtggttgtttgattttagagaggtgtatatgtttgagatattatgatcgttggggttgcttttaaggggcagcatctttcttcttttcctaatctgtggattaatgttagccrtgatgtcagaggttgcagtgaactaagataacaccactgcacaccagcctgggcaacaaagaccccttgtctcagaaaaagaaaatattagccacgatctttcaaaaaatagatttatagttgatttttatgaagaatactgcagtgcttatcaaacttcttrgtgatatgtgctattcaaggttgtcaggcaagaaactctcattccaaggacatcacccactttaactcccctgcaccctgatactgcccactactctctgggcgtagaacttggctccattgcctggcttgcctgatcctagctgtgcttaatagctcagcctcgtcgatggacacatggcattccccaccacrggatccatcccgaaacagcagtcaagtgctcctttacaggaatcatactaccaaattcacagtatgggttgttcagctggcatgtattattatttttgtggttgttttcccatcatcgcttaaggaaacaaccacaccctcttaccmgtctggttcgtgtgagaaacagccaggcaccattccatcctccaatccagagactgcgctcttgtggccatgccgtaagactttgagagttaacttgcacaaactttctggtgaaagtcttaaacagtcatatcagagagagcttaggtcagcttgggagttttgttcatggtgaattacattttgcaacacgactgttgtaaaattccaggaattttaccatcactccatacccttcattttagtaaaacaacatttgaaacacccacttttcactggtgtcgctgacggccgaaggaaatgccgtggatctgtctttctgaggagtggcaaactcacggcatttaatgttaggcactgataccacaactaagggggctgaccaagccggcagttcgagacagacagcaaaagtttatcaccaaggattgatgactcggaatataatgattattcagtagaatttgttttagcagacttcaggaaagaaygggtctgatcctgctgctaaactgagttttcggtgtctgtacatgttgtggggtgacggggaactcagtatatttttggaaattataccaagaagattgtcttctgaatttccagaagtattatccctactgatacagatgacaataagacrgcaaaaagaattgcaggaagtcatcagggtaaaagaaagggraaaaaatggcaattcagctgtgagggagaaacttccagtttgattcaaagctattcaatgttaaaattgtttggaacttttctaaaagaaatttcactatggattaatttccattttcttttctccttattgtttggcagtcaaggttgcagctagatcacgctattccaaagatccatttgagttcaagaaggagactcccaattctcggcttgtgaccgagccaggtgaaggaagactgggacccattcccatttttaataactaccctgcagccctcaacattctactttaccatgctgagctcagttgaagaagagcgatgcactactgtggatttcagcttgcacttagcttgttgggcagcaaaataccaaaagggaaaaccgtaaaaaacgattaataataattaaaacgacctcacccccaaactggcagcttgtgcaagacttcagtcggaagccctgttagctagatgcctttgtgttcaaaccactttgcatgactcttattctgagtgactccagtgtgaatatgacattactaatgacctgctaagtgtgtacagatgtgggtttctccagatgtggtgatyaataacataatggagatagcggttgactcatgtttatgagttgtttgccttttattacgtttctgagtttatttgctttgaactgttttttaactccagccaataaactcacctttaaatcttaaagggcatcatccccttaaatctcactggggaaacagggcagagggaatgtgccccaggctagagctgagcatcaggtccatctaatgcaggcattagactgaattagggaaggctgggagttgcaatcattgccccatttcactccaaggaccataaagaggcttggtaaaccctgacacagtgtttgcagtctggcgcggctgataaaggaagatatttctttttttaaaaatctagtgaaatatgtaatcattttgaagtaagcccagagttctggccagtgtttctggaagacgttgcttttgcttgaaaacagaatgctgatgaaaagtcgagtaaaatgttgttacagatgttcaactctgcattaaggctgttggaattaccaccacatcttaaatcaattctcagaacattgtctggaggttatgtcattgaaataacgaatcctctttagtcaagtataagcaaacatgttaaaacatcattgtaactttaaattaaactctagcgcaaaccaggggatctgaagcctcattagacttgcctgacatttttctagcactgagtcttcccaaactgtaaaactgttagattcagtgcctattagacaagggagcgctgggaagttacaacagcacattaagtgttatacttagggatgtgcaaaaacaagcccttgaattttatgagtacttggagactggatggagttcagctcctataaaattccacgttagattcctgaacttgtttgtgttctaaagaagtcaggtttctttaaaggatcatatcttcatgtggcttccgcagcatgaaggcaagtgaaaatgccatagatggaggtgtattgtaattagccaaaatgtaggttaaataagagcttgtaaatttgcatcgtcatgaggtagtggcccactacttcaacacgtttgtctttcatgaaagtgagtaaatttaagtctcccttttaattccatttttattcctctcatgtagtcacagaagccatgaaatgaaaattatattttatagcttaactaaaagttttcctagatctgctttctttatgcagaaattgataggatccatataaaggctgataattaaatatggtttatatcctacttatgagaaagaagttatcactgcttctcttgagggacctaagccatatgtaatggtctccattacacagcgttcatatatttaagctggagacattttcccccatctcttcagggaacagatctgcatttttaggctgtgagtgcaggaggaaacctttaaacacaagtttcattttggagaacaaatcccactttaaatgcagtatgattacgatggatgatctttctgagttgcaatgaaaataaatagtttctttgcatagaagaggcataactttactaccagaatgaggtgtctcccttgagctggctaacaggtattaacttgcaactctcccatctgaagatcagtgtagcaacaaggtgtaaagataatggccacttaaccaaagaggattmtttgttataggcccaatgcaaaaagggaagccaatgctcagcaaaataatcccacaggcatgctagggaggatgacttctgttcaggtcttaactcatctagattcattgtgtaactggacacaaccatggtagcatctggtgaccttgaaaaatgctagccgtggtagactaggttagataaaaacctttggatgtgggattataaccttaagaagtctaactgaattataaccttaagatgagaaaaacagaacttgcaccccgactagagtgactcacatgcactcacacaaacacacacgtgttatttgctccagcatgctacacaaccagtctaggtcaccctgaacacaatacaccaattgcaagtggcccatattaaaagatgaccttgtcttatacgtctagttagtgcaagactttctacttcattctaagatggggaaagtgcgaaagcatacctacacacacacacacacacacacacccacacaccctcgctgcctttctaccccattattgcctcagatgcctggtcccctatcctgtgaaaggaagatgaattcaggtcaagctcagagtgcctgtttgcttgccgagagatgcatatcaactctaagtgattttttcaataccatttatgtggcttgtatttatttcctttaatcttttaagtgctgtttagtctctgtgtgatttgctttggatactcatttctgataagatgcgatatcatcccagccacatagtctctgcctggagctctaaatgactgatacagtctcggcctgagcttgggccctggtgggtgtcagaggaagcaggtggtacagggggtcggctgtgggtgtttgcaggtgctttcttgccttcatctcttctggtctcactctcaccttacaccacagtcattcccttttcctgcatcagccagggtttagacaagcccaaactgacagcagaataggagagtgtaaaatgtgtaatactttgaagcaggtttggagggtagttggattattaaaatagctttggaagcatgtatcataacctactaaatttatttagcgttttcagggaagtaccatataatgcatgctctaatatgggtcttcctggataataccaagtagctgacatggcactttctcccccatctaagactcctacaccattaacatatatcaagtctcttttgatgtcatcactgctaatatttctcttcttagctttaaggtaactgctgtgcattctgagtttcagggtgctttcctcctagtctgtgttgcagtcaactataagaatccaaagatcttatttttccttcttgatattacagctttagcctgaattgtgggggtggggagaggaggactagaattttgccgctgatgcccctgggtgacaggctgggtttgcatctgctaattatcaagcagttctcttaaaaagaagcatgatgcaggctaatacatctgcaaagcttattagtgggtgtctttgggcaagagcagtagagtgtgctgtggtgtttctaagtgaagcttcacattgcttagcaatctgtgtggtttagacatttggaaaacagcttttggtttccaatcccctgtgctgccctccatccctgccccgctgctgcatcatcagagatttcattcaatggcaacctcctccttcattccggggctctcctccaacctcaccagccccggtgctcctgtcttcatgggttgaaaaaggaccccgttggcacagccccacaagccctccctcctggcagttggagggataagagctgagttgggctggggattattgagccagcatgcaccaatgtgccccgatctgattgaaacattggctgtcaaggccttgaatccttgcctcttttcaacgctctttctctggtatgcaggggttaggaaccagctaagttggttcatctggagaagcagcaggctggcagttatgctgacatttcaaatacaactttatttctgattttggttacaacaaaacgcagtctattactgggcaaagcaaagtaaccaaaattaactctaagaataatgataagtattttttttggtatacagataaatcatgatttcttttttttttttttttttcttatggcagggtgtttacaaactgttttagtctgtttaaagtgtatgttcaaaggctggagtgtaaagaggtgttgccttcaccttctctaagccggcctctttgactaacacatttggtctttgtcattgggtcctaaaagacagccatgaattcctagtgagtgactgagccttgagtgtgtgtcctttgatattttgcctgtattgcacagtctgccctcaaactgttcataatctcatgagctgcctgtatttccagttgaagatgagcagccgtcaacactatcaccaaaaaaaaagcaacggaatggaggcatgcggaactcacccaacacctcgcctaagctgatgaggtaaggagaggggctggttgcccacggtttccctcttagcccttctcttcctcccctcgcccyctcctcaccctgccaggcccagagtctcccctccccagcaagcccggggtgggggaggggagcgagatcgttagatggcttcttaaaggctggagtatttattctgtcagcttgtcagcagttaatgatagagctgaaaaaattctgtcatgaaaaacagtttgaaaagctgtttgaaaaatacataggctttaaagtcttagctgtcaccatgtcctgtctgtgtgtagttcctaaacagcagtggcactaatgatggcggtaaccaatcagagaaactcgtgtggttagtttgcctgcggcagtctctttctgctggagtccctccgaggactgttttctgtacttaaggccatatgtgagatgtatcatcacaatcaaaaatgaacctgaagattaccttccttttatcctgtcgattgaaatcaaatttctgttaattgattttgactgataagaaaaagtctaataatctgtggacttgccaaagcaaagttcaaaagtaatccagttctgctcaggctaaaagcaatattaattatgaaatacagcatgcatgtacatgttccctcctttcctcccttccttccttccttccttccttccttccctccttccttccttcccttcttccccctccctccctcccttcctccttctctctctttctccctcacttctttcttgactatggcttcctctggtaaatagcaagtgaagtcaaatttcaacagcgttctgcagtttcttcttcttggcctatctgtcttttatctcccctttttgtcttcaattcatctgccaatcccagcatttttttcctccgacatcctgactctctaccacccaaatgaaacaggagtgatttcagatttgcactgctcaccctatgtggtttctgctctggaaatgcctgccatcttgacattagttttgtcttttcatggccaccggctttgatttttgaaatagaatagtggtgatttccactccccatattcaataacatttgcatgttcctggccctccacatccacctttctggaaaataggcaagggcagtctttcttcatgtggttgaggacacaggttttccgtggaagactcaccctgcccaactccttttccatatcaccatctattcctgttaaatgtttccttaaaagttctctgccttccrcttcacccagccttccttgggtttggctgatttgcatgcttgtttacagtttatgaggaggaataaaatgtgccaactgccaagcttttcgtttttatgatgccagtgtcatgctagcattcatttcctatttactcacctttaggtaatcaccttatctaattctaatagttattcccatttaaagtagagaaaagcccagccactttccttcacctaaatttagagaagcaaataaataaataaagagaagtctgaaaaatctgaaacctttggagccaaattccctgtccctgtttgctatgtaaagtatggctcatttctttgatcttgagtaataataattctgaggagttatactgttttcatatgcttcaaagctgtgtcaaagttttgctgcttaagggtacttctttattctgttggctcttgggtaccaagatgacaggtcttctgtatgaggtggaggcttttttaagtcgtagccttcagcaaaacatcaaattaccaaatccagggtarcatacttctacacaaatgcctttcctgtagatatattataccatatatattaaatactttagtgttacacgctacattttatgtgcaatagaaagtgatggtttgaggtagccttggggggactttttttccacaagcagaaaaagctagtgtatatcgtatcaagtatggtttttacaggactttctgcccgaaggcctttgtaaataagtaatgatcaacagattggctgtgggtttttgaaaagcatgcctgtgtcagtttgcatgatgggggagaattttcaaagtggatcttgctttcattcgttgctggagaggggctgagggaggcagtcatcctgggctggagctgtctgtttcatggtacatcaaaattgctaaacgtgggtcaggtggtgagtggaaacttgccaagctacagaactcgggcttctcatgttggttgcctttgggctgctgctaaggcctcagttcctgtcgctgggatgtcttatcccaccagcccaccatggtctcccttcgcagcccagctggaatgggccatcccatgacaagtgagaaagtcttagacactcctcccttrccacgtctttctatgtcccaggtgctccacattctccatctgacctgggagcaaagatggacccctcctgagccctctctccatatcccttgacttccagtttacagaaagacctcagggccctttgttttacatttgaatatctggcactggcaatgaagtcatgggtccatttttgctaaaccccctttgttgattggcagaaaacaagggctctcccagctccctgtggcttttccagttgcccccgcctcttccgacacctgctttctactctccagtaaatgggactttcaggtcctattcctcatgacctgaaaaayccataaaggaagctaatgacttatttgaagtggatttttcgacatgagtttgtgacttgcagtttgagcagaatcaatcattctgaatgcgggcaggttttagtggcctatgggcagtgacaggaatagctccaagaggaactggagaacccagaatgggctaggatgggctgtaatttaccactgtggcttctgcaaataaaacagactcctgcgtgaaggctccttccaaatcatctgccagcaggagatgcaacggggactctgcactaatggtcttttccttccctttgttcttgtatcaggcttaccctagtgtttaagtgtcacttaactctgcacgatcattaggtgaacagscttgttttgtatatctggatcctgaggtagtatgtttttgagtcacctcaacagaaaacaaccctcatgtccagatagagctgaatggcgagtgtctgggccccaggctgaggacacacgtgtaatgatggataaatttggctccacacccgcagaggaggtgtgagccatggaggcttccaagtccccggctctctctgcctgttatttcccttccttcccggtctcttactgtggaattattgaaggagcctcccgtagttttcctctaaaattaccaagcacccgttgcccaattctccctacttagtggggtggtgccttgtaaggatagccacgtctttcctcatttgtaaagtcctaggggggcacaaagtttgtctctaaatagctaagtcaagagttcttaatttgggggccttaccaaccctatgaaccttcaatgaaaactctctaggaagtctttctaggaaaaaataaaaagtacacttgatccccttttaccacagttgaagcaggttaatggattcctgaaatctccwttcaggatccctggttacaatcacattcagtttattccagagccacctccacatagttgcacgtacaaatgctttttggttgatgagatttctccaatgggtaggtggtatggagtaaacacctgggttctcacactgaatcctcacatggaatccaaaaagtctgtgcacttcrgctgcctgcttttaatctttttctcagattagctcccatccagcaaatatttagcgagagcctactgtgtgcaagttgtcatggaagttctttaaggaatctaaagtctagcacccaaatgactttagatcccttaaagaacttccacacagtctaatagattagattagatccctgccttcaaaatgcttatagtttagcagaggagaagacaagcacataaaaacacagaattgggtaagaacaagctgggggttccactagcatgggctgtgagaatagaaagagctgtcattacctctggtttgggaggctgagcctggtttaggaggaggtcttattgaacctagttccataccatgaggagaatgctcaactaataatattacttgyctaggtttaccgagactggatgcctgtaactcactgagtcctaactacaactctataagtagttattactcttgcccccattttacaggtgagtatgttgaggtacagaaatgtaaagtctggtaaatctaggtaagttttccctaattaggatgatggaagacatagggacagtgctcagaccacagtaaatgcctgggtgtggctatagccaggggtctttggagtggcctagatggagtggagaatgtaagagtattctggcacccagtcatgaaggttttgcttgtcataggcattagggaacccctgaaggttttcgaggaggcggtaacctaacttgtgttttgggggaatcactggtggcagcagagagaagggttgggagtcctccatcaggagatttctgagacacacactacataagcacagaggtgtgaaatagaaggcccactcaaccccagcctctgccaaggccgtttgtgtgctaagccattcagggtctgctgtagaatagtagaccaggactgggatacatagttttcccaaggacacacgtaattcctgacatcagtcctgagacctagagttttcctctaaaatcatcctagttttcctctaaaatcatcaagcacccgtggcccaattctccctacttagtggggtggtgscttgtaaggatagctacatctttcctcatttgtaaagtcctggggagcacagactttgtctctaaatagctaggtcaagagttcttaatttgggggccttaccaaccctataaactttcaatgaaaacttcagtgaaagttaggatttacataggatgtatcaggtggacagtttacacagatagcacccagctgggctggcaaggataattgacaacacccagaaaaaagaaattgaacattttgaggagagtttcatgtcaggagacccagaaaatattagacattagtttcctgaatgggaggcaaaatatgatttgaggaaaacagattatcctcttgggcatctcctggtcattaagtgaaataaactcatctacttgttaagtctcatcacctctcttttgactcaaacctttcgtggggtcattttgttaggacttctcacatcagagcctgctagcatgaaagattttagtaatagaaaatggcaaaatggactgagccaagtcaccctcacaattccttccactgggcaaaagaaagaaggaaggcagggacagcttagctaagtaaattcatctcttaatgcacaaactgatagcatatgacaggcctcccccaggactggagaagaaaaaagtagttggtgtcatggtactgaggcttgggtggaccacacaggtccctggacaagttcatgctcagcagatggtcatgaccttgccctcttgtgtcaagagcatcttgtacaacctcctgtaggactgatgaacgtgttggttctcccaggctgtctcccaaacataaaggcaaccatttccttcttctgagaatgctggctgcctaacactagataacatcttargtggcagcagggaaaataatgcaagtagatagatgcagagaaattgaaaaggaccctagttctgccagggtggctacagcctggcctgagagttttgtcagtgtggctccagggatggccgtcaagtgggagatggggagagggtggtgggcagtggtrtctcgggggtgatgatcattatcagaagagtggaagccctgttgaaggatgtgttaaggcaggagccaggatttgctctgcaaagcctcaggaagtatcaggaaatagtaatcacccaggagccaaggcacccaagaatgaggcagatccagttggaaccatttatggtgctgaacacccaactatgattccttttgaggagaccacctaaggcctaatccagccttctgtgtctgatacaggctcagacagacccgtgtggcctgatattcttgaacattgtgctcaaggtcttagygactagataccatgttgttaaagaagggtagaacactgaattgtaagtattgcactttgcgaggactagtatttaatttgcttgtttaaatttatttgctgattagctcatgggaagagaagtcagcaagagagagtcattagtgcagcatctagtcagtaaatccccatcaagaatcaagtgttgacacaatgcctcgagttccacagagtcacagagaatcagagtaggcacccagaatgtgaggcgcctccttcaattttgcaccctaggcaccctcttgtctagctgtagtcctggctttgctgaatagaactacagccttataatctgtgtgttgttgacaattgctaacttgggtaggatttactgaagccatatagattctccatctgggcaaaactttatagtggtggttcttatactttagcaggtgtcggaatcacctggagggctttgttaagatatagcttgctggtccacagccctacacagtctaattcagcagatctggcctggggattggaaatttgcatttctgttaaacttccaggtgatgctgatgcggctggtctgggccacagtttgagaaccactcttttgaagaatcagaacagtgagaggagcttgaagtgatgggggcccatctctaagaagtgttcagactttgcactggagaaccaaatagttgcttaattaagaacatctgtctgaccactgacatgagtcctccctgctgattagttacagcagctggctccaggcgaacttcaggcagccttgactggttagagacataatttagggttgtccttcacatcacaatgccctttttatagcaaatgctctgtgtcctaattcatacgcagtccctgtaaatgaaaaatgatgcaagaaccctgattgttcaaaaacaaattgttgcaagatatcagaggtaaatgggttctcactgcacacgttttggatctccacgaaaggtttgctgagtctctgttgactgcttgaagagtgtttggggactagagatgattcatcagttcctttagttagtttgattgcatcctctgctggattctggaaatacatggaagagcaaaatagatccctgcccctaaatagttcaccatctaatggataaaacagacatggaaattattattgccgaaggagcatctctagaagttcccaggaagggaaaataacttcagtctctctggctgttcaggatgatggctttatgaggaacacttgagccaaactgtgaagtctgagaaatgtcttgttagccccatcatggtgccttacataatagatgctcaataaagtcagtatttgcagctcggataaaaggtctgtggagggatgagaaattcacctccttttaatcaagcctctcatctcccagggagaccactgtaggatgcccttaatttggatgggatgctcataatgacagaaaaggccttatcgtgtgataagacatgaggtctcgaaaatcaagcagagaaaagaatgcaattttctagccattttgtaactttcctttttcataacatttttgtgtgtttggctggttttttgtactttcatgtaaatttctgaagtccagcgttgaacccagtgccaccgaaggaactgggatttgctgtctttgcctgtaagggaaattgtgcactttaaaatatgatatcagcttcctcacagcaggtttgctagaaaagggatttgtggttttgctttaggctgttgtcttcaaggcgagctttttctgttcctgttgtagcagggcatttagttcacttcctgagattaattgatgccaagtggcatttcttgctctgcgaatcctcaaaacaaagatcttttgcaggcacacctcagagatattgcaggctcagttccagaccaccacaacaaagtgaatatcgcaataaagcaagtaacacacattttttttctagtgcatataaaagttaggtttacactcttctgtagtctattaagtgtgtacataccttcattaaaataatttactcctaaaaatgctagtaatcatctgagtcatcagtgagttttaatcttctttctggtagagggtcttgcctcagtgttggtggctgctgtctgatcggggggtggtagctgaagattgtggtggctgcgacaatttcttaaaataagacaacaatgaagattgctgcatcgactgactcttcctttgacaaaagatttctctgtagcatgtgatgctgttggatakcattttacccagagtagaacttctttcaaaattggagtcaatcctttcatactctgctgctgcttcatcaactaagtttatgtactattctaaatcctttgttgtcatttcaacaatgctcacagaatcttcactaggagtagcttccatctcaagagaccactttctttgctaacccgtaagaagcaactcctcatatgttcaagtttgatcatgagtttgcagcaattcagtcacatgttcaggctccacttctaattctatttctcttactttttccaccacatctgctgttacttcctccactgaagtcttaaagccctcaaagtcatccatgagggttggaattcacttsttccaaactcctgttgatattttcacctcctcccatgaatcacgaatgttcttattagcatctagaatggcgattctttttcagaagtttttcaatttattttgcccagattcatcaaaggaatcactatggcagtgatagcttattaaatatatttcttaagtaataagtcttgaaagtcaaaattaccccttgatccatgggctacagaatggtagttgttctagcaggtatggaaacaacattcatcttatacatctccatcagagctcttgaataattgggtgcgttatcagtgagcagtaacatcttgaaagaaatctttttctctgagcagtaggtctcaacagcaggattaaaatattcagtagatcatgctgtaaacagatgtaaatgcctgacttcaaagcttcaaaggacaggctgattcttgttggaactaatgcagctggtgactttaagttgaagtcaaagctcatttaacattctgaaaatcccataggcattaagaattatgtgaaatctactctgcctgtgctctagcaatggaaaaataaaccttcaatttgtaaaaaaaaaaaaaaaaaaaaaaaaaaaacaaaaccataatatctgcaaagtgcaatacagcaaagttgaataacatgaggtatgcctatgttcttcttcttttttttttaracagggtctggccctgttgctgggctggagtgcagtagtgtgatctcggctcactggcagcctcaacctcctgggttcaagtrattctcrtgcctcagcctcctgagtacctgggactgcaggcgtgcaccatctgcctggctaatttttatattttttgtagagatggggttttaccatgttgcctaggccggtctcaaactcctgagctcaggtgatctgcccacctcagccctccaaaatgctgagattacaggcatgagccaccatacttggccatgcctgtgttccttattagactttaggcacactgaatttctagctgtggacactggagggtgagctgagatgcaagggttatggggtgaatttctgctaatcattcacataagtggtgcattttgtaaatgcctgcgatgctggtttccctttcttggctgcttagaacactgcaacttggggtgttttgatggagaatgaacaagatatggctgcctccttaaagtgggagggtatgaggtgggcaccctgcagcactggccttcagccaagtagacctttttgttaaggctttgcctctcctctcactggctgtgccacctgagcatgttacttatctattttgtttcccatgtatacacagagcccgataataacagaaattacctacaggtgttcttgtgagtagcaaatcataaaatgtaggtaaaagttttagtgcaccaacatttggaagtgttggactcatggcagctattcatcatagtaacaacaatggtaatagcactagtagcagcaatagtagtagtattaatagtagcagtagtagaaataatagcagtagctctatatctttattattgaactgctctccctttcctgcctcctttcaccataatcagagctagtaatacatgagtgggtcctaagcaaagtataaaggatgataaccataagactagttaacacttcttgaggacatgctctaggtcagatgctgtattcagggcatgaaatatctttactcatgtaatcctcaaatggaatccattgaataatgctaatgattaacattcccattttacagatgaagaaactaaggcaatgtacaacttagcaagtaataggtgagccaagccttgaagacagacattttggctctggagccagggcgcttaaccactatggtatactgtcactaargaaataggtggtttcctgcccttagtggtatcaacccctgaacactccatttggagatggactctataagtcagactgctcaaattagctggctagtgttcargcttcctctttgctttaagctgggctttcattggcattgatcctcaaatgcatgtctaagttaaagacggagagaagttaccactctggcagagcagatctaacatgcctgtatgttggtggtggggtagagaaggtggttggagaggggarggatattggccgaaaacctttagaggagatactgggtattacatatatatgtctatgtattcctgaaataatggcgggatgcttttttcccccccttaaatggacaagaaaaacttaagattcaagaagggcagccgggggccttcagctaagggatatctgatatattgtgcctgtttttcttcaaggtgggctattgtgttaattttctaggaatgctgtaatcaagtatcacagacccagtgtcttaaacaacagagcttctcacagttctggtggctagaagtctgagatgaaagtctgggagggttggttcctcccaagggtactgagggaaggatctgtttcaggcctctcttcttggcttgcagatctctgtcttttccctctgtcttcacatgattttccctcctgtggaaaagttggcccaaatttcctcttcttgtaaggacaccagtcctattggatcagaactcaccccaatgacctaattttaacttaattacttctttaaagaccatatttcaaaatacagtcacattctgaggtaccggcggttaagacttcacataaaaatttgggggagaacacagttcagcccataaaaatgaaacagcagatatatctcacatcatagagtttctattaccctaaaatagggcatgtacattggctaagtcgcaagtgacaagtgagccttgaattaattatggtgccttttagggaaattgaaaattactttgtgagtggaagacttaggtaatgtcattatgatgtgaaagacaatatctaatcctggtccttgatttcaactaactggtctttgaggagttgtgggagaggctttggaagtgggtctctatcaccttgcaaactgaagatgttgggatcccttgttcagggagatttctcatgatcctcctttccatacaacaaacggcccmattcctctgggtctccctggatcacagcagtgttgattggtgtgctcaatggcaaatgcttggactttcttctagcaatagaagctttagaaactttgatttagtccctgtggacaactgactgtacactctccacctgttccagagatctctctgcagcacaggccagcctaaggcacttgaaattactacagcaacagccatagtaaagaaatttatactgtctggccagaaacagttacagactctattgttgctggaacgaattgtgttcccagcttactcccagactgtgaaatccagtgagtgtgtaacagtgctggcccttactggagccataaattaatccctctcccacgctgcttacctctcatcttcactctagcaacctttctttacctactcagggctctccagccttctgatatccaacaatggtccagtactttcaaaattcttctagctgtgtctttctccagtgacagcacagtgcttcaaaccttcaggatcttctaggctcgcccaacctttatatgcatatgctcactgtatcccttgctcttgtggaatggctcaatgatagaaaacccactgtcttgggcaacaactcatttcatttttgaattactttcaatttttataacaatcttcctgttttggaaccatgatttttgttctctcttaatctcatggatcattcttagtctgctgtcaatcagtcatactcaatcagtttaatccatcttcaacttgactgtcattgcacatctggagacagctggaaggcctggtctgagtcttctgtaccttaggttaggtggtatggtatggggcatcttcagccatggttttaggtgccattatttggcccttttcatttgggcctcaattctctgggtgggtcctactggctattagtggatcaacactgcaacatgctgagattcctcttcatttctcatggttcagatcaaatgctaatttttttttttttttttttttttttgagacagagtctcgctctgttgcccaggctggaatgtagtggcgtgatctcggctcactgcaagctccacctcctgggttcaccccattctcctgcctcagcctccygagtagagtagctgggactacaggcacccaccaccatgcctggctaatttttttgtatttttaatagagatggggtttcaccgtgttagccaggatggacacgatctcctgacctcatgatccgcccaccttggcctcccaaagtgctgggattacaggcctgagccaccacgcccggcccaaatgctactttctttgcaaaaccttccttaatgctacccaaataccaggatatgaacagcttttttcttggtattcttgtatcaccttgtactttgctgtaacacttgccacaaggtactgtaactattgaactattggtgtatatatatttttttcctgctatcttgtggacctctctttgactagggactttatcttaatcatyactgtagcctccattccatgctcagaataggggattcttattgattgctttactgattcaattggttgcttyactgattcaataaaccaaagttagaattccaggtaccatgctggtcagagagggtaatgtctttgttccgggaggtttttgatgttcctcaggtcagtctcttgggggaaatcctggattgtttatatttaaatggtccaggccaggatgagagatrtgtggggagtagagtgtagtgtggcatacctctaagacttcctggatgcctctggatgttccattgcaaaccatggcttgagctccagtgtgaaattatgcctggtttctggaaaccactaccccagttaatgaagcttgacattagctgtcttttttctttttattgaagggcgatcgatcatcaggcttgcttatttgcttttctggatgaaagttgtaggccactgttaacaacgtctgactccttcccagaaagaatcaagtataccaaaccaaaatgtatctcctcttccccaaggcacacattttctaaaagtgttttttgtcagcttgctgtttcatttgcttgcttgctgatattatgggaacatagttctgagtatcttttaaatcctaaatgcactaggggcaggtctcaggtcatcctgaggtaatactttctctccaaccagtaaacagggcaagagaatttgaacctggctctatatcttcagggcaagtctgctaatatcctcttgcaactgaaatatgttcttcrtgggctggaaagagttaattttgttcattttctcaaacctcttctccatgatggcttttgtctacctacctattccagataatattaatagatatctatgcaactgttaaagactcttcaaggacaaaaacatccctcaaaatgtgctctcaccctgatctgtaaatagttcttatcagcctttttatcttaacatctttgactaagttcagtatttggaagatggcctggtggtttacatacctcaagacctctcaacaatccagacactgagatgctactcggagtgggattgttcttcttttaagatcagatatgacagatattcctatagtagtctagcatgttcgttgaagataactttgcaagttggcttcacatagtatttgtcatttggtgtagtctaaaagcaaattctcaggcataaataaaggcagtgagaaagttttctcaccttatgtgggagtggggagcatattggagggtcgtggtagttattcaaaagcttaatcctaggtttttgggccatggaagagattgctgtcccactctgtactcttgacatataagtgggaagtatcggagacatttcagaaggacaaatagtaaaaagtaaataaaagtcagcctctgcagagcgagactctgtctaaaaaaaaaaaaaaagaaaaaagaaaaaagtcaccctctgatgttgaaatatagaatttcaaaaggtaaaatcactttacaatttatggaatgtgacccgatgtatattttctgtcttgtgttgacaatattactcagaaaagatagctccatttcaagagtggttaagtatagctgggacaatgtcctaattatatggccagttttgcaggaaggaacaatgacttcccaaacccgaggtgctgaatcactatcagagataaaagcatggacattgactatgattcaaggtgcaggagcttatttattgtgctataagcttgttagaactgcctgattccattgcagttcttaaggttgtcagtgaggctctgccaacccactagacgggaggcctttatggaagcatcttccttttccaccaatagacaaggcaatagagggcgaatgttgccctgagaatttgaaacaagtttattaagatgcatctgagcttgaggctctcatctaagatatgcagcagttgggaggtgaaggtggtggggagcatcattggatggttagtgcatatacagttgtcaaggcaaggagagagggtgttgtttagtattgaaatcatgtattccagatgtgggcatttggtagtcagtctgctctgaagtgacatgctgctgaatctttaaaggcttcagccagggagagcaaaatctgattgggcaaattgctaaaatatttaaagtgcagcctgttaaagcttttactgcgaagagcatcacgtcagaagttgtagtcagaaggagcgagtaattggctttccatcctcatgccagtcagtcagcatgaggctctattcctattccttcctcttcattgccgaggctcatagcaaccctttggtgtgtctgtctgtgtgtgtgtatgtgtgtgtgtgtgtgtgtgtgtgcacgctggggagatcgaatagctggtaaaatgagaggaagaggagtgaggtagccttaaaaagggaggctgaatccacaaaatgttaggaagaccatttaggaaaagaggagcgggggaaaggcagaaatgctccctgacaaaggtcacctgcacttccagaagtggggtggtggtttggggcagttgtctctcaaaggatggattctgtaagcagaagaatggccttcagtgacaaccacttcctctgcatctttcacatcctctgagatgtaattcagggggcactttccatttataatttatcacattttccacttaggttttcctgtccttttcttcccaggcatgaccccttgttaattcctggcaatgatcagattgacaacatggactccaatgtgaagaagtacgactctactgggatgtttcactggtgtgcacccaaggagatagagaaagtcatcctggtgagtgagggactgtgcatctgatgttgcccgcttctgccccaaaccacatttgctaggaatggggtttccctagttggacagtgggataatactgtccctggtcctaattatttttgatgagtgaaattctgagcatagattgaagcagctagacctctgatcagaacataagcaatattcagatttttcaatctctgaatatattggctcctcataagagtaggtgagcacttgctgtgggaaagscatggtgggaggtggtatgaacataattcctgtggccatggygctggtgtcagagcctgcctgtaccaattattagctgcatggcttgggtaattcatttgactttttgcacttcggttttcttatctgtaaaaagatgagatgagaatgaccctaactcatagggctgtagtgaagattaaaatccaacagatractcagtaaagttacctcttattcytactattattaaatgctgtgaggaaagctgaatgctgcctgtattgttattggtttatagcaatgttttgtattcttatagataatagccttgtgcatctgtgagctttcttagtgcatgttgtagacagggaaatgcatgatgatgcatgacataatgatgacaataatgaactacagtccccttggggaggctggggctcagagccctatttcgtggaaggcttgtgaacatcttcatagcagcagtgggctcacccagtctctcccaggaatgtcagcataggtaacaatccattctactctctgcccttgttctattaacagctttgggtcttaatgcctacactggctttcctacagtttattgtcttgctaatccatgagaaatggattaataatcaggaaagtcagatggaagggttctttctcccttgggcctctaatccccagattggtatgggtctgttcctttttgtcagccaggaaaatcctatcatttctgatgtcaggaccacccttcctaaacaaggactgttctgggtcctcggaatggctttgtatgctaacacactggactttcccctatgctttatctatgtgtatgtgtgttctcagcttaattataaatgagcattaacagccaatacagtatcaagctggaggctgtctcagaggtgggaaagttgcaggcaagagcacagaaagtcagaattcttagcaaacagcygttgtccaactgaccaggagtgcaaattgttctactcgcaaagctgcttcacgtatgtacattctttttgttttgttttgtttttttgagacagagtctcgctctgtcgccaggctggagtgcagagccctatcagctcactgaaacatctgcctcccagattcaagcgattctcctgcctcagcctcccgagtagctgggactataggttcgcgccaccatacccagttatttttttgtatttttagtagagacagggtttcaccatattggccaggatggtctcgatttcttgagctcatgatccgccaaccttggcctcccaaagtgctgggattacaggcgtgagtcactgcacccagccatatatgtacattctgatgtattcatggcacttttgccctggtggcctaaatttagcctgatgttaccacttgtggcaggtcacaggctggatgccgtatctgggacctagggttttaatgacttgcctggatattggtgtagtatgcatgccaactgatattcaatcaacatctcctgccagcataaaaaagtttaaggaggtgagttactacttctatcctatgaaaaataacatcatttaacaaaacatctccaggaggcctactatgtgccacacaccattctagttactggagatgcaatccctgacaacgactgctctcacagagcttgtgttctagcagggtggggctgggggaagaggagttatctctttgtgttctagcagggtggggctgggggaagaggagttatctctaggtagacaaatgagtacttaataacatttcagatatttataggatgctttgaaaaaagtaaagcagcattgtaggctagaaagagactgggaggtgctgtctggaaagtatgatccaagaagccctctctaaagtaacacggctagagataagaatgacaggtagggccagctacatgaggatgctttgaggttgtgtacccactgggcacgggaaactaactactttggggatttgaagatataagagatagtcccaattgtaatttcctggattaattagagagaagatataaaatgtaacccatgaaacagtgtatttaaagctaagtggtaagaggtgcaaaatgctattgaaatgtaggggagaaggactagggtgtgtttaagtgaccaggcaagtcccgtcatacacacataggttgtgcttgggttgggcctggaaggatgcatgggaattccagatacatagagaaatgatcagtttctctctctagtgtgctttaaacccggcaaaatcagacacaccggggctgaggctctagaattaggatattcataaggttctctgggtgatgtagctgtggccagtctgaggatgggtgttttgatcccagatcgaagttcctggggtcagcatctgtgcctcggccactcaactaactgtgccttccccacctccctattctagaattcacttccaccctgggcccagtttatattcctctggcttgttgaagggagctagcctcccaggtgacctggccaattacaaataattaggagccccatcacataacagtgctttatagactggttggctgtctcctggtggcacccaggcacttgcacttycgtgcggcccagataactaactccaggtcttctgcaggaagkggggatatgtgatgtgagctccccagtgggtcttccttggtcacagtttctaaggcatttcttacagcttatgtctccggtttccctggactattgcagagggaaaccaataatggtgacagcccctgctttattctaatgatcagagagtgaaagctagtttcttcctctccttgggggttactgtaataaccctgacattgttgtgaattgcaacattggcatttatacaatcaatgcagtggtcaattctagagattaaatcaagcagagtttgatatgtacagtggacattaatatgcctcccccaaagcattgtaagccacatggggccatccaggcatgcagtgggtggacaggaatgggaggcattgaaccagaaggagaggcagagaaaggtccacggctggcctcctggcttcactagctcagtgaatcaaagggccagcagtgactaaacatttgtatttcctgggaagttggggttctcctctaatagagtgactgtgttctttcatttgtctcctttgtagatagaggtttggagttggaggaagacactggcctgttgctcttactaatctctctctagccccttgtaatgattatttggggagatcttttctctgaatgatttaagcaaaacagkcccctccagaaatgtccctggaaagtccaaggcagcattggacaggggtcagcaaactttttctgtaataagtcatataatgaaaaatttaggtttttcagggtataagatctctgttgctactgattagctctgctgttgtagcataaaagcacccataggcaatacctaaacgtatgagcatggctgcattccaatacaactttatgggaatttgaactttatgtaattttcacagattatgacattgtcttcttttgattttttttcaaccattttgaagcacaaaaacaatttttagctcactgaacatacaaaagaatgtagtgggccagatttggcctgtgggtcgtagttttccactcctggctttaggtagcatgttccacctgctgatgcacggacatctcactgataagtctagaattctaaagtcaaatttctcccactgagcccagtgcaggcatctgaccattttatcatcatctcagcaagcaagccagaaaaggcagctcatttaatcaacaatttcatggaaactaagacttctctttccaaatagcataaatattccttttcctttttattttacctcctgaaaattattatgaaggtctgctcacacatatttatggcatacctttcttaaatcttttgtcaaagaaggtagcaatgtgtatggctatacatttggacagatttattacaaaaatatratacatatacacrtgctcaaattatagctctatatggcatgtatataacattgatgaaataaaaataatagcacatagtaagctctcagcaaatatttgcttgattctttgyacaaatgatttatttcactccttacaacagccctatgcagtcttctctctgactcttacccacttctccctgttgtagactcgaagtgaagctgccatgaccgtcctgagtggccatgtygtggtctgcatctttggcgacgtcagctcagccctgatcggcctccggaacctggtgatgccgctccgtgccagcaactttcattaccatgagctcaagcacattgtgtttgtgggctctattgagtacctcaagcgggaatgggagacgcttcataacttccccaaagtgtccatattgcctgtaagtccaaggtcacattattgatgccttttcttcttttcattcacaaaagaaaatcccggatggatataatagttgtagctttgatcatgcctgtgcttcttcatctgggtatgggcctgaggactcagcacttcccctatgctctgtcaaggaaaatccaaaccctgggagaccttattaaaaggaatttgcagccaagttcagtccctcatcagggatgaagtttagcttgtatcaagtatattaaccatatcagcgtctaaacactctcactcctgcctatacaaaacctagagcattgttatattatgatgtttatagtaaggatttgcttacagaactatttatagcattatacttatggcatttttaatgcttgaagaaacattgatctgtgccaccttctgtttttaactaaataaatgcaaataacagagttctttayttctgctgtacagaaggccaactccttctgcagctcagccccaacccctgttcatttagaagtccagcaacgtgttcatggttgtgtttgtgtgtgtgtccgtgtgtgcatgtgtgcatgatattcttgactgcaaaacattaggacttcagtctgaaaaaacagtctgggactccacaatttagtgtgaggatatgggatttaggagtcatgtaattaactacttcctaatcataatgaatgcatagtccacaaactctcaaaacattgtagagaattatgcatttcaacatttgatgtaattctccacatcacaaattcatgcaaatctcacttatcctccaaatatttttcttgtaagttcacatccctgaaactgagaaacaggggccaggtgcagtggctaatccctgtaatccctgcattttgggatgctgaggcgggaggaccacttaagctcaggagttcatgagcagcctgggcaacatggtgagacctcttctctacaaaaagttaaaaaaattagcctgatgtggtggcgtgtgcttgtagttccagctacttgagaggctgagttgggaggatcacttgagcctgagaggtggaggctgcagtgggctgtgaaagcaccactgcactccagcctgggcaacagaacaagascctgcctcaaacaaaaacaaaaacaaaaacaaaaactgaggaacatggatttctctacatgttaagaagtctgggttttcccccacttacaaagctaaaatgtattatttctgttatcagcttccaaaacctcagaaatggggggaaaaagagccaagtaatataattcattaaagaacacayaagaatctatccacaagcagtacatgttactcattagatgccaccatgtgcctttacataatgcctgacacaatagggactcaataaatatttaaaggagtgagaaaaagatcggacagttatcttttggatgctgggccaaaaacccactgccttagtgagcacaggcagttgaaaatagtcacctatagacaaacagtcatacacagaggagagcataagcatatatatgctttgctcattccagaaatatggtcgatttgattatatgattccatggttatctttctgtcatgtgctcctccacatagtcccctgacctctgaaagtgtctttgtaaagggtttattattttaccaggatacatgagtctgtgtgtgtatgtgtgtggagagagatgggtatatgtgtgatatttggtatttgtgtgtgtgttttgtgtgtttgtgtatgtttcctcctgtgtgaccttttttgtttgtttgtttttgtttgtttgtttgttttgagtccaagtttcactcttgctgcccaggctggagtgcaatggcacgatctcggctcactgcraccttcacctcctgggttcaagygattctcctgcctcagtctcctgagtagctgggtttacaggcatgcaccaccatgcctggctaytttttttgtattttcagtagagacagggtttcaccatgttggccaggatggttgcaaactcctgacctcaggtgatccacccacctcggcctcccaaagtgctgggattacaggcatcagccaccgcgcccggctctgtgtgcccttgtacacgttcactcatctttcttcatgtatatgaatgagctgtcatctttgcaggtcatttcaaaccctccaaaatttaacatactcaagcacaatagattttcacaaaatgggccttcacctatgtcttcacagagtttattggttaaacagtaccctgcctatagggccagcccagagaaacataagcgatttctatgtatgtcatttgtatttcttgtagtttgaaatcacgtgtgtacaactgcacagggatcatcttatatcacaattacggctggcttccctacaagatgaaaattaaaagaatatggatgcaggcaattgaagcttatgcactggcaaaatgattcaggaagttggttggacttgttttgtaccaagagatcacaggagaagagggcattctccttctctcaaaaagacgctgctccagagcttggaactagttgtgtctcagcagcaaccacagtgctaaatgccccttcctccatagttgcacaatattttagggcctgagaatagaatcatgactaccagtgactcataaaagagggtagataggctccatctctgcagccaagtctctttccaaagccagttctccagaaagggagattagaggaggacattcccagatatgtgacagttggcaaacccttggtctacacaatcagtgagttgaaggtaactcaggtcaccacacaggcaaagaggaagctagattcaagctagaggaccaatgaagctggtggccagacaggagccccaaaatgatgccgcgtggccactggggagctatggcatggggtggcctgatgattttgctgtggcttcacctgaagacacagagcatgtggaggccatggccctgtcctaacctaacccttctattttccctatgcttgcattcccggactctgttgttacttcctggatctgggatttttccactgtcttttgttgttattttttatgttaaaaaatctgtttactggcttatttattttttaaatgtacctgtaatatacaaatatgttcttgttataaaatattcaagcaatatagaagtatataaagtgaaaagcaaactttcccctcacccccacgaatcctatttcccttcccagagggaattaccattattagtgtaatggctatttttcctgtgctttccttccaaatttacatacatttatatatatgtaattttattttgtgggkttttttttttacataaatgaaactatacttttttttaactgctgtagaactttttttttcacttccccctctatcttaggcttctaaaccaatgcctgcatggagagccagctctgcctctttacctcctgcatacattttcactgtgtgcatgtccaaaagtatatttctccattcctatgttgttggacaattaggtcatttccctgtgtatttttttcttgctgaaaatatgcaataaaattatatgatctgaagcttaactcctttccatatctcttttgcattgcacacattaattccactccatccatagcctccaaattgagccgcacatccaggcccacctcatcactctgtgctcactggccatttctccttggctgcattggaactgctgtcttttgcctgagacagaagtgacccgctattaaataaacaggcatttgaaacccacccccttgttacattctgaaagccagaggttgccacaggacagttacttaaatcaagacaatttccaggcaggaagaagatgtagaaccctggcattattcctctcccgcgtttgttagtaatagcttgattgagtattgagaacaagcttaaaatgctgccatcagcaccgactaccctttagattagcacacagctcctattcccttgaatgtagttaggccagcttaatgtcaaggcataaaaaagatacttgttaaataatttcccaaagctccgactcaatctttaatttgttttcctctttccctctcctctcacttttgctcctctctctctctctctgtctctttctccccccatctctgtttttttttctttcctctatgccaaagggtacgccattaagtcgggctgatttaagggctgtcaacatcaacctctgtgacatgtgcgttatcctgtcagccaatcagaataatattgatgatacttcgctgcaggacaaggaatgcatcttggcgtcactcaacatcaaatctatgcagtttgatgacagcatcggagtcttgcaggctaattcccaaggtaaggacagcctgtaatacttctttgctgtgcctgcaggggacaggggctggcaagagggatatccttcactcagtaattcaaagaggctcacatcagcctgcctggcagtgaaacctgcggtcaccatgatggctttcaaaggggcatctgctgcctcttctttccattccagaatgcaggcttgagacctggtcacccacacacagactaggttgcctttccagaggataaacaagcctttaaatagccaccccctcagctttcccaaggagtggcttcatgaccagtgtcatcagctaaatgtcagagcactgaaaagaagctggctgcacaattctgaccgtttccttccagtatatgtttttgccattgagctgggatgggaatgaagctttgctattgttagagccgcctctaggactctgctgaccaagggatggtaatctctggagagtggcaactctatggacactaaaagtcatttagcaaatggtgacacttgtcagaccacacattttcctataggaggcaaagcagccttaagtgacacacgtctgccttcctactctgcccctagtctttcctgtcatttgctttgggaccctgggcaggtggttacaagtaaagatgtctaggggtctcagaaaggcaacacagcaaaaccttcataaaaaatgacctctgtaatcaggatctggcaggataggatgcaaagcattttccattgagtgacacctccgtgtaggctagccatgaattggaggatagttgttacagacgagctgccagagggtggcattggctgcctgatggggaccagaatcccatcagtccaggatggaagggtgtaggagcacagcccatgagagctatggctactgggatatgaagcatcaccttattgatagcttggcaagtgtctgacctcctccccatcatgccaggctttctagaagctcagctgaatcatgcatcctggacctgtgagctacattattttttgtcaacttgacatcaccaccactgccttctaacatttgcttagcattgcagaaaagccaggaacaatagttcctggaatcctcttccctgcatggctctgggctagagtcagctggtgggagatgggcactggggtgagatttggaaagtggaggagaaagataggctttgattctttggaggcaactgcagccagaccctggcagacccaggttcaaatcttctatcagatgagctttctgggagccagtgtcttcactgctacagactgagagaggggctggggcttctctgaggatcttgagattcacagcagcttctggtcaagcttaagagaaccttcccctttggtggtgcatgtgaaatggcttctgtccttctgacatcaccctgatacagcctgaagcctaattttgacctctccatgccaccgtcctccctgccacacccaaatctaaatcttggtatccacctgctcagctgtgcccgcaggacagcacaacatgtgaaggcctaggagaggctctgagcttactcccagctgcatcctgaagaggtagagcccgcatcctgtgcggcctgcccgggtagcacaggcgagaaaggatgtgagaagacagtaagctgaccttctaggagttgaaagaggcaagctggcatttggttcctgcctttaagcccttgactttcaatatgtgtcctctctgccctgccccagtatgggtgtctgttgggggaggctgttagagttacagaacctcatgggccatcccagacctgctgggtcagaatctgcattccaacaagatccccaggcaactcaaatgtgcccttttaaagcacagtaaaccttcacatgaacaggatgtgaccaacccttggtagatgctcctcctctcctggggaggagtgaaccatcaaggggaaaggaaaacagtgaaagcaatgattctccctttaagtacagacagaagccagcaggaggaggcaggaaaacactccctttccccaacatgcctgtttcctccaaactcgatcatgattttccagggccacagattagaatgtcagtgtataatttagttacatacacatctgatatagttgttccttccagttctcttaaacctcatcccagcctcttagatcctatataaaggccaaactggtaacaattcttccactccccggtgcccaaaagccttctttattcttttatagcacaggataagcaagaaaaataggttttgacaggagatatggaggaaagagaaagggagcttatttttcctccaaagaaaaaaagggcactctttcttttgtatacacacatgcacacagttatggtctgaatgtttttgtaccctccacctactccctgccaaatacatacattgaaatcctaaccctcaaggcgatggtattaggtggtggggcctttgagaggtgtttaggtcatgagggtggagccctcatgaatgggactggtgtccttataaaagaagcctgaggccaggcatggtggctcacgccttgggaggctaaggcgggtggatcacctgaggtcaggaatttaaaaccacttggccaacatggcgaaacccaatctctactaaaaatacaaaaaagttagccaggcatggtggcgggtgcctataatcccagctactcgggaggctgaggcaggagaatcacttgaacccgggaggtggaggttacagtgagccgagatggcaccattgcattccagcctgggtgacagagcaagactctgtctaaaacaaaataaaataaaccaacaaacaaataaataaagtaaaagaagccygagagagacccctcgtcccttctgtcatgtgaggacactgcgagaaagtcctcaccagagactgaacatgccagcgccttgaccttgaactttccgttctccagaactgtgggaaataaatatctgttgtctatcagccacccagattatggtgtttgttacaggagcccaaatggactaagaccgcacaaatgacagaagaaggcaaaggatgtgtttctatgctcagcagtgattctcgtagacccctggtcagcagtggagaggagcatctgtctctcactagccagcagtctgttctgctccctaagagagagtgtcaaagctctaggcccaccaagactttatgtcccattgttttcttgtctgtctgtctgctcctctcttgtttttgaatactgttctctggtgatactctaaccttgtaaaggcagtggtccagtgggagccatcaacacagagaaatcgctccttccccagagctcacctctggctgcagacccagcactccactccttgggctcctcccagcctgtgagctgactctgtgagctgagtttccctgcttttctatatctgagacccttttgactaactggagtgcccactggcctgagatacttttgtcatccttcatctgggcatttggcatgatcaagctccaagggaatagggattatggggaacaaaaaggatttcatgttactctccattttttttcttttcttttctttccctccttccctccctccctcccttccttccttccttccttcccttccctacattactctcctcttgccccctgccttttctcctttcctcttcttcccctctctctctccctcttcttgtccccctctcctcctcttcctctcctctaactactactcctctacacctccaccaatactaccactaccacaactataacctcaactaaacctattacaacaccaacaactcttatcaactactaccaccaataacatactctatctacacttacaactaacaataacaatctactactactaactattacctaacatttattaactaactactaatcaaccatctactaattattcaactatcattcacctaaccaattaaccacccaacttatcttcactactaactctatctcccactatgtcattgtacgtacgatattatgaacttagcgtagtacgcaaagtcgcgatccagcgtaagttagcgatccgtggatagcgttnnnnnnnnnnnnnnnnnnnnccctccctcccctcccttctttctttctttctctttctttctttctttttctttctttctttctctttctttctttctttctttctttctttctttcttcttccttccttccttccttcctttctttctctctttctctctttctttctttctttctttcgaggtagagtctctctctgttgcccaggctggaatgcaatggtgtgatatcagctcactgcaacctccacctcctgggttcaagtgattctcctgcctcagcctcccaagtagctgggattacaggtgcgtgctgccacacccggctaatttttgtatttttagtagagacagagtttcactatgttggccaggctggtctcaaactcctggcctcaggtgatccactcaccttggcctcccaaagtgctggggatttcatgttactcttatcattttggaaaacaaatctaacttcctctgagtgataactacacagatttctggccactgacaccttgctttccctcttatgtattctatggtcctttatggaacctcatgctctgcattgtctgaagaactgtctccatgtctctagaacctcactgggtagaaatgtggactcaggacaaatgtcatgctcttgggccagaatatgcatgcaaccctatggaaagctgtcctaagatgatataatttagcatgaaaaatgtgcattcacattgagaaagtagagccttcattggacagctgccactgcatgttattagggctcctagactaacaaagcctctyttttctcttctgttctcttttcacactcccttttgatgtcacttttctagcccacatggtgtcagaactgacccagcctagggattctggaccagacactttctgaaaagacccaagatgtgatggcttgttgtcaaaaacaattacagaaaaggtggcatatcccaagccagatggtatatccgatgtgacagttgggtctatgagatgcagttttaatatacagcaggcaaaactgcagtgacaattatataaagcagatgaagctgcttcttgctggtcagcaaacatcagctcagaaccactttacagctctttaccagcaactaagtgcctttatttacagagtgcctgtcacttccctttggctggagagctggtgtattatttagcacgcatttatctggggaaaacatttcaatttaaatcagctggtacaacagtggctcttgccagactgtttccctgtggttcaaaaagatgagaactgagtctgatcttggaagaaagggtgagcagagggaggcarkgtccgctctctgagctgcttcagttcatacctgaaaagagggagcatgccatggcatttcccattctgctttcatattgttttgaaatgatgatcttgtagttgcttcctgcttacccttccatgaaaggtaactcctaaggaaaagaaaaaggaataaatggctgttctccatgcatcaggcactctaaaggcccagaacacaaaggtgaccaaaggttgcttggattcagccactcactatgcttgcaggattcaggtgagtggaggaggtatccccataaacaatgacagtccaaggaaacaaggacgaggctagaaatagaggaacacaaagggatccttggtttaggtattttgaggaattgagaaggctttcaagaagaggtggcatcggccaggcacggtggcttacgcctgtaatcccagcactctgggaggccaaggcaggtggatcacaaggtcaggagatcgagaccatcctggctaacacagtgaaaccccgtctgtactaaaaatacaaaaaattagcaaggcctggtggcacgcccctgtagtcccagctacttgggaggctaaggcaggagaatcatttgaacccaggaggcggagcttgcaktgagccaaaatcatgccactgcactccagcctgggcgacagagcaagactccatctcaaaaaaaaaaaaaaaaaaaaaaaaaaaagaagaggtggcatctgtggatgacttgaatgcatgtggctatggagcacttgaaatttaggaattaaatttttccttttaatttaattttaacaaatataaaaatttaaagtgatccatagccagtggctaccatattggatggtgcagtcctagagtgtagacttgtcttgctaagggtttggatttgggggagtcatcaaagatttataggaaaagagtaattaattccatgcttgaaaaagataacaggtggaggcaaagtgagctggcttgagacggagcgaatggaagtgacggcaaagattcctggggatgtgttagagggacagggacaagtacaatttggccccaatacagggtacatataaggcagcagggagagatgaagttgaaatgtgggttgggcattgaggaatttcttttctttcttgagttaggaagctgtaaataattttttatgtgtttatgagttaggaagctgtaaataattcactaggcactggggagctacagaaggtttcaaagcaagagagtgatgggattggacctgagctttagggagatggatctggcagccctgtgaagcattgtttggagtggaaaggaagaagatgcaaggactctggttaggaactgtggctatccagatggaagcctgaaaccttggactggaaaaagaatgggaggttctagaaggagtcactgtacatgcaaaacagtctgcatggatgtgtgtttccttctgggggtcagaggatggcagagtggagggacaggctgcaggagaaagcagtgttgggaggattgggttttagtcatggtttatttccacggggacttagtggaaaatccagatgggcatgaaaagctgaagggtggaaatgaagtccttaatccaggaaaagtttgcttctagcaatctggcccattgctcatgctctaggagcaaaggagagcctcagagagagggagagaggcaagagaattgcaggacagaagtataccatctcagaaagagagggtagaggaaaactttggtagaagccggagaaccaaaagctgagcctgtcccgaatgtcccaggggagggaggagccaagatctcaaacccaagacatatgtccactgccttttttccatattttatgctttatagacacacagmcacacacacacacacaaacacacacacacatacgcacacwcacacacagctttcctcccgccctctttgacctgaagctatagttacactaaatgaacatccacrtataagcggacaccctcctttctccacatttcaacaaaggttaagagcctcaagtagrgaatgacatttttctttggaagtatggcagcagtccttggagagatagcattaattgggggcatagggtacaccttccctatcctaaagtctgagatgtcttttactgttccaaagaagaaaatgtgatttctcttttatctttgtgtgagacagtgtggattaggatctctaaattactggatgacaaaaagcagaacgaaaagggccttcctaaagtggaactctgggatcaaatccacaggayagaatgcattgaggacctctgcatgttaattttcaaatgatcagtaaagacaggctagataaaccttggtgataaaagcatcatttcttttgagcagtgactgtttcatctttgttgggataggagggaatgtgtcaagagctgtgaagatttgaagcagaaatttgacaaacaaacagaaaaatgttgtaaagaggacggccagaatggggcagtgcctggacaacatgtcacttgccaagtggttaagagaacaaagccagcaggcttaaagggccatttaatcttctgctccattggacaaaaaccagggccaatggttaataattaaggagaacaggattttagcccaacataaggaagatatttccagaacagcatggacagcctgcaaatgcagcgagcctcctatccctgactgtctctttgctaaaggagagttactgacacgctctttgtgatgggagggagattggtagagagatgagttctgtggtcctttataactaaggatatccagcatgttcttgatttttattacatagggatctgtgttttatatgatttgcattgtaactccagagggasagctatggtgtttgtcaggattggggtcatgagtcttttagtggaagcattcatgtccttcctgaacggcactgtctttgtgttcaaagatggggagcggacggcattggggtgagcagctgcagatctggcttttccattaattggacagaccaccccatcttcaacttccacaccacccttccacacctgcctttttcccagggctctgccttctcccacttctacaagcctggctttcctgacccccaggctgctcactgtttcttgcagacgcacctatacatgtatcctcacacacatttcccctccttgaagtcagagaagmattttttcagctgctcccatataacatttcattaccacaatattctctctcaattctgaaatggtgataggggagaagccatttctctttatacccactaaacgaacaaagctcagcgctaaaatatttttcttccattgtaactgaaactgctgttggcttccgtcccaaaaaccagaaagacaattatacttaactgtttagagatttataawtaccacactggagtagcctctaggtagtaactttagatatctaccccaataattttcttttattggtttgtgatttagatcttatcttgagtcctctataataagagtagtacatttcattaaaagagcttactaaacaataaagaaaatctggcttagggctctgagcagatctcaagtacagaaaggggcctgccctgttacatttcttccgtggacatcccaagatgaatctcatcacaagaatctcaggtgcagatgtatttcagcaaagcagcaattgcagctgttttctaaatgacttcaacttargagaatttttcctatatagcatatttcatcacatgagagatcctctttaaccctgccatttactattctagtaatgtattcctagcaagagaaacaaggaaaaacaacagcagcagctataataagagactgagaaacttggactactttttgaactcatggagggttttatgccctccatgcatgaaagactttcttggagagtggawgtgcagaagaaaaagtaaaaacagacagaatcatcttttccttccaartggatgcagagcagattcatgtccccactcaggctgtgcccggcttgtgacaactgtcgtgaagggaaatcttagcttcagagacagaaagcagattttgggtggtcttggggttggactgaactyatggttttagcatctggctctcacatgccagtttactcctcaaaatttgtgtgcctggttaatgcctyttttaagaaaatgtaatttttttttcaggtgagccatacaccagacacattcctatgtaatatcttatttaatctccctgacaacctgctgagggagagttaccaccttcattttacagttgagaaarcagagattcaggggaattaggtacctttcccatagccttatagctagtcaagggcacatggagttgatctccaaacatctgatttcaaagtctrtgcttttctcggcacatcagcctgtctcttaaaaggcaagtgttatcctgatgagaatgggcctgaagctatacatgtactttcaagggtcatgggggcacccccaggacaaacactcaaggggatgaaagtgctcaaggtgtgccagcctcacttctaaactggtccttgcacctaaggggctgaagtttgttttcaacggttcttgtctytgtgaatccccattttttgagccccttgaccctagctgttccaacaatgagagatactaggattctgttggcttcagtctttcttgctactaccactggacaaatgagtaaatctgggggcaatgtgaagcactgtgcttagcctgtctctgtgaacagtatgactgttggagtctttcttttcygtttttcttgtgaatatagatgggacttcggagctgtaaggaagagagtggaatatttgagacctagctgttactttctttgtgaagacacttaaataacatkttcaggttttatttactccttccatgctcaagcggaagtttccgtgacagcagatgagaatgaagagaccactgtagcgcccaaagcctaggctcagaaaatggtccagagaaattgtcttatagtggggaaaccacagctgtagaatcagagaraagtaaaggaagtcttgtaatcccatggaccctctaagacacctcatgaaattctggataaggataggtcaactaccytatcctgcatgtcagtttggtttgcatcctatgcatgaggttagtgcccctgttgtctccatagtctatgctgtcatagaagtaatggggtctacaggcaaaagggacagaaacataaaataagttgtatggaaygactttgacacacatactkaaggatacagggcttggaacatttcagtgtattccttgtgcagagtgtgagccatttcattcaatacacctgctgtraagatagcacacatgcctcaagctggcagataaatctagccagctattcagtgcatttttgtcttcacctattctctataggcaatagctcatgtgcagtcttaaaaactttacttcttttcttaaaagcaacaagagcgaaattccatctcaagaaaaaaataaagaaataaatggccctgaggccagatgcagtggctcatgcctgtaatcccagcacactggggggccgaagcaggtggatcacctgaggttgggagtttgagaccagcctggctaacatggtgaaaccccatctctattaaagtacaaaaataagcctggtgtggtggctcacatctgtagacccagctactccagaagctgaggcaggagaatcacatgaacccaggaggtggaggttgcagtgagccgagattgcgccattgccctccagcctgggtaacagagtgagatcccatctcaaaaacaaaaccaaaaacaaacaagcaaaaagaaaaagaaagaaagaaagaaagaaaaagtggcactgcaaagaagccaactgatttataaatgactttagttctggatttattgaacatttaaggatatggctagtccttaaatgcttcaattatacttcatggaatggtctggaggaaaattattttctgaattccagaaaagcaggatagtccttgagcatcttgttacagatctccaggagagatgttctaccagatgttttcagtgtcccatgcatgctgccacacaatgtgttatgagaaggcagaggtggctttgggctgtggtagtcaggaaagactccagagtaaagggaccagaatttgaaaataagtgtgattaatataaataaaggttccgacaggcatgtggaaagggctgaagctgagtaacagaaggcacagaaacaggaaaggccgagtgtttttcacagagggtcacctggctatttgtgtactaatggtataaccaaggtacttaaagggctcactatgtcaaaggaaatgcttgtaggtgggtgcactgttaacctgagtagatcctccaaagaagagcctgttctattgttttgctgacctcttcatgctcgccaactgccagaaatctttctaaatgcttagcacagtacctcacacctagtagacactcagtagaggtttgtggaggggatggatacatgaatacatgatttaatcctgctatctgttgtttgcagcctgttctctcttaacgtgccctcaaatgasataaagcagccaaatacctgtattaaaaacctacactttccctccaggatttagtctcccttcatttgacaactgggcactggacaaggkttacagagatcaaagatgttgcacttgtctggaggagcctttatcagatggccaggttgtctctaatataaactgtactattcccttaacctttactaatagctcctggccctcaacctttgactggcctcgctgaatgtactattacacagtaccaacccagggcccaaggctgtaggactgagacctccaaagttcaacaaagggcagaaaatatctctgctttctgctccagggagctgtgaatgcttcctgagagcttccctggccatgtagaaatgaacattcctctcagcggtagactggagcaggaggaacttggaagatgtgttttgttgctctagttcatgatagtgaatcacaaacatggctgtcagagtaatgatgcagtcatggagggttaaggaacagcttttaaatcctggttctgtccatcatgagcaatttgacataataaagattccagatttcatttcctcatctatatatctatatattaaatgaccccaccccaaaacaccgagggatcagtgtatgaatacaaagacataatggctgcagaaaggttattaaacatcaaaggctgtagaaatagcactttgcagtcaagttcagtcatggcacacatgggtctggaatgacagcttgggtttgaagcccagatctgccacttactaggcctgggaaaattactttacctctttttatctcaattttctcactaagaatactaaatgcacctggyttatcaaatgactatgagaattcaatgagatacaggactttctattgtccatacagtacctttaagtaagccagaaaaagtcactcttttctcaagacaccttattttcatctgctgaaaaaaatggtgataatctactaatatgtttgaacaatacacttttctgtcatctgctgggaaaaaatattgtcataaatatgcaaatatacaatgcctattgatatgagtggtacccacttagattagctactgtgtagtgcccaaccttcacaaccatacatggcaaccctgaatgaatggctgttaaagcacttcctacctaggatgggagaaatcaagcaatgttagctatttttgttattattattacaattttactattttatttcatcccctcctactcccagattaacaaatcataagttaggattatccacttgtacctagcagccagaattactgttgatctgtttgtctgtaaatatgcatagaaaatagatgatgatagaaaccaacacacctttggaaggtgagcagaccaggtaaggtagactaacaaaagcctacagaggagttgaggaaggactagggcagatgaacagtgagcatggggcgcttcccctccatagacaggctagcatggcgccatgcaacgcagctgctctctgaagcagagattgggacagctcgctgacagaaaacctcatacacttccaacctctggggtttggttgtggtaggagccctgatgttggtgaagtgacacccttccagagcaggacccatgctactccacctagtcaacagatggcacttggcctccctcctttgcctcttttttttttttttcttaaaacagtaattttgggtctcagccagaaaacctatagcatattagttctcaactgggaaaggggtcttgtacctacccctttaaatagctaataatgaatcttctctgtgaccctcctcctacctcttcatagacacataaatatttatatacaaatttaagagttttgtctaccctaatgattttcttcccctccaggtttattgaaatacaactgacaagtaaaagttgtatatattcaaggtttacaacatgatgatttgatatacatatacattgtgaaattattaccaaaatcaagttaataaacacatccatcatctcccatagttactattgtgtgtgtgtgtgcccgggtgtgtgtcatgaggacacttaagatctattctttttgcaaacttcaagtgtactacacagcactatcaactatagtcaccacactttacattacagccccagaatttattcatcctataatggcaagtttgtatcctttgaccaacatctccccattccccctgaccctcaccacagtccctggccaccactgttctactttctgcttctatgagttcaactttttagattccatgtataagtgagatcatacagtatttgtccttctataactggcttatttcacttagcatgatgttctccagttcatctatgttgttgaatgacagaatttctttcttttttatggctgaataatattccattatatatatgtgcaggtacatacacaacacagaccatattttctttatctactcatctgtcaatggacaccagtggtttctatatcttggctattgtgaatagtgctccaataaacatggaggtgcagatgtctctttgagatactgatttcatttctgttggatatatacccagaagtgggattgctaaatcatgtggtggttctatttttaattttttatagaaacttcatactgtcttctatagggctgtaccaatttacattcccaccagcagtgtacaagggttcacttttctctccaayctcaccaacacttgttatcacttgtcttttcaataatagcaatcttaacaggtatgaggtgatatcttattgtgatttgcatttttctgatgattagtgatattgagcaccttttcatatctacttgttggccatttgtatatcttctttataaagatgtctattaggttcctttgcccatttcttaatcaggttatttattttcttgctactgagtatatgagttctttatatagatgggatattaaccctttattggctaggtggttttaaaatattttctcccgttcagtagattggcttctcactttgttgattgttttctttgctgtgcagatttttagtttgatgtagtcccgctttttaatttttgcttttgttgcctgtgcttttggtgtcatatccaagaaatcatcgcccagaccaatgtcaaagagcttttcccctattttttctcctaggagttttacggtttcagattttacattcaagtctttaatccatttgatttttgtatatgctgtaagagaagtgttcagatttattcttttgcatgtaaatattgttttctgaacatcattattcattgaatagactgtcctttacctattgtgtgttcttgacatccttgtcaaagattagttgcccttaaatgggtggatttaattctgaactagcccactgtttttcaaccttagctgcacattgcactcacctggggaacttttaacattcttgaaatgctcaggccatactccagagcaattaaattagacattgatgcaggcatgcattggtgattccaacgtgcagcccaagttgagaaacaccagcctagccccttacttactcaaggaaaccatctctgatccttgtatcaggcagctgatttactaaagcttacatttccatagaaatttatcttggaaatttatttatagaataaatcattctcctaggcatgattgctaggagatttggaaagcatataatgggcattgtgaaaatgcaagatacatgagaaattcacaaacttccacatggttcccagcagggagctagtgggagctgggaaaataaaccagggggtgtccatttgagaggtcaaggcaggtgggcacaaacaattctttgaatacctaatcagcataggaaatggaagaattttgaaaatcaatcaggccatgggcctaaaggcaagcaaggaaggtaaataataataacatcagggttgaggtttcacacttaatctataaaactacttttaayaggcccctaggtgattataaattcgtggtggctttctctttattgggattatatgggtctattccatatttccaaaggaagcccttcctattatgcaggtgtgtctccttatttatttatttatttgcatttaagatattgaaacttttttaaaaaaaactcatttctgtgagcattaagtatataccatgcaaggaagcaattgtctctatcttatgaaatattaaatcaaaatgcttcctgttccctcatgtcccagagataaatacagcagtactttgaagcccctcttggagctgttttgcctgcaaatttattgttttgtctccattttcagaaagccctgttttctatgaagtatagcactctaggtagtttttaaggcgcaaactcctctggagttgcctgtgtcggcaacaactcttatgtagatggcacacgagggatggcgcgttgatcggctcctttaagatgacaaatgggcagagagtgttattgtctttgattgcatgccttacatcatctgtatgtaggaataagagggccatactttatctttagccattttataaatatttaagtccttatagttgcctaaagatattaaagcatattttacagtagtcggaatataaatattatatatagcacaagataccaaagtagtttaatgaattcataattttctgctcacatttattggaatgtgttttatgttccaaaagttccatttaaagaataagataccattctactccctgacaacacaccaagcattggccagtgttgggggcggggtctgagttccaatgtggggaagattytattaggaagcatggaggcaggaagtctcttccctggaatatatttcttctctctttaggtctaaatatgtgtgtgtatgtgtgtgtgtgtgtgtgtgtgtgcgcgcgcgtgttcktgtgtgtgtgtgtgtgtgtgtatttttctgaataaataattctggtgcttatttaagtcccgtagcatttcaaaaagaaaattttatatctcctttcttctgtttcaaggagattaattcaaataacataagtaagagcaataaagataaagtttgcaattttcccgtcctcccatctccaactcccttttgtaaacagggatgcagattctatttgccagtatacaatggtgatccagggtcttaatgtgggtagtgacttcccaatgcattttgaatatttctcctgaaattaaagagttccaagttgcattttccttttcctaaatgcaaaaagatgacagggagaatattactgcacctcttttcaattttccagtgaaatataaaggctttcttctttaatatttcacaaagttcctccagttcccagtgggagtctatgctgggtaatgtttgctaattaccaacaacaaaactagacatacaacgttggtaaattacctgaccctttcctttttaatgagacaacaaggatttcgcgaagtggtgttgtttcactggttaatggtgtcagcaatgttgtaattgtgggttgagacacattagctgaacaaccacatgtagaaagggctttctctcgacaagctgtttggagactagaaccatattatcattaagcctatgtcatttgcatgctgctaatcgcttactttattatcctgcatatccattgtctttctttaattactctttaaattaaaattaaaaatagttttaaagcccacaatgcccgagatagcatcttgattatgaagataacttcaagaaaatggaacaactggttatatattgcctggattatgagagtcccatcgttatgtactgtgcctgcaggcctcaggggcctaattgcggtggtttctcttcctttagcccatagtgtttgtttaataaatggttatttatggccttctcagccattagagcaactttggagaaagtacttccttctccttggtttgagaagtgaagttttatcctctgggcaaaggtataaaactgaatcaaaaaaatctggatgtacactagagcttgtgaaggagtctgtaaggagatcctctggattccctttgctagcttattttgttggagatcacgtttaaaatttggggtcatgaaagagacataaatctcaaagctgagagggccttagagtcattcctattttacagatgaagacaccaagggccacagccattgccacgactgtgatcgcatagcagcaaatgaatgatttgactgttagcaaatggaaaggatgcagggctcctggagggaggatcatgccttaggggctactcctgagagaggatatgatgtgtacctggagttgtgatgtgcaagctacatggttgttgtggtttaatgtatttggtgcgcatctcttgtatgaaatgttgatatgtttgttgataccgacaatgtgataggattctggaagagagggctcctgtgttccacttccttaaaagaacaaccccatgaatgactccacagacattcctgaatattgagtagctgaacacagaattatcgtggtttcaatattatgtatgatgcacggtaatctaaagggatttgggacattgctacaacctcattttatggatgggagaactgagtttggataagacattgaatccttctacattctcacagagaggtaggagttgacctgggactaaaacccatgtgttttgttttctctgtcagcttacaaccctgttgttgataaataatagtaagttagtactgatgaagtacatgctctgtgccaggtgctgttgtaagcagtttccctgtattattattattaactcattcaatcttcatgacatcttcctcttccaatttgcagatgaggaaactgagacacaaaatttaaataaattgccccagatcacaaattagaaacagaaagaggcaggacccaaactcattcagtctagccacagtgttcaagttctagaccacaaatggtatggcttatttcaggtagtggtcaaaagttattgaccacgctgtacagagagatgctcagagtcaaaccagcatcaaaccctcatctagtgaagattcgtgtgtgtatgtatgtgggaatgcctgaccccaagatccaagatcccagtttcctattcatctgccagcataaacgtatgtacaggaaacacttcaacacttaagaaaaaaagattctttcttttaaagaaccatcaactgtttggaaccttggtgctatcttgggccaggcgtcttgtctctagaaccattcagagatagctggctgaaagttgttgatgygattctgctttcctgaatttcatggcaaggccttggatcacttggcaaacccatcttttacagctacttaattttctgtgtgcttaagatatggatgttatactttgctcgtgattttggagttctggtttctgctgtgctggccatcaattcatactaaaccaaacaactggggcccatttggcatttggtgttttaaatgtaaaaggacatttgaactacatgacaaatgctgaaaaacaaagcccatagcaccaagaacataaagaaactgtttataatgaaaaagtggttacattttcagtcaatctatcactttaatgagctcttcacgtttctttgattaatgcttgcaaaaggggagaaaaaaattgatgtaatggaaacaaaatggtatatagtcttggcagcatgaggggrgatgtctgtgtgttttattartatccccttgatatcattgtcttgtaatgtatatatctgccttttccctggcatagtaagcctctagtttactggaaatgtgatccatcatgaaagaggagatcccatgttagtggcaaaacagcctttgtcctcttgtggtggcagcaaagagggagggtcccagaacaggaattaagaataaataaaaacaataaagaaaggttagcataagctgtgccatattgaaattgggaagtccagtgggtatatgaagataaaacagaagaattaaagatgcttaacaacatttaaacattaatatgtagtaatttgtatatatttagtaataattcatacattttaaaataacgaataaaggggatggaaaaaaaggcagaggaaaacatcttcataaagtaactaaatgtgagaagttattcaaggcagacgtcctggaagaggtaaagaaacgacaggagctgggttgggagggaagagggggaacagcgtttctgaagtgggtarggctggtgggagcagggatgggcatcagcaggtgccactttccctctgtgttggaaaccagctctgactgctcctcccttcccctatgtgcatggggcattgtgggtttcttgggctcttcactgcccatgtgtgctttatgtaaatgkcctctgctctgagattgagtagctcttacaagatggtgggaggctgaaataacagagaactaggaagcctgaaaactctctctgggccctgttcttttaaagcccctttgctttgtaaccttggcctgatcacttccatctcagaacttcagtctccttaactgccaaatcaagtggatgttcaaagacctgtcagacccttacagatgaaccagctgtgtccatccatcatgttcatcagctgctctcaacccatagagatcacatgaggtttcgagatttcagggtctttaacatcaatttataatttaaaaaatttttttcattacataaataaaatgtgtttattttagaaaatttagcaattatagaaaccaaaaagaaaatgcacattccctgtaattttactgctcagacataaraaagttgacatatttgtcttatttccatagatataaatacttttaccctcaaaaaaatggatcatacatgtcagtatgttacctgtggtttttcacaaacattttatcatgaccatttttctgtcgtgaaatgtttttctgcattatttttagtggatgcatacttaaccaatttccctaaaattggacattcatgttgttttcagtggaatgttgttacttaatacctatgaatgaagaccctggcagccaaatttttaatgtaaggaaattatggctgtacacatatttttagaagtacaattgcttaggccaaagtggaggtaaaattataagtaatttgatccacactggccaagcaagtatgtctcattatattttattttttgagacagggtctcaccttttcacccaggctggagtacaatggcacaatcttggctcactgcaacctctgcctccctggctcaagcaatcctcccacgtcagcctcccaagtagctgggaatacaggcacaccctaccatgcccagctaatttttttgtgtttgtttgtttgtttgtttgtttttagtagagacgaggtttcaccatgttgctcaggcttgtcttgaactcctgagctcaagcaatccactcacattggcctccaaagtactgggattacaggcatgagccactgcatctggccttatttttaaattgtaagatgaattaagataaggtaaaactgagaagttgagatgttgtggagaaagcaatgataccatgagctcttgggtaaacggagacattagaccgggtgaatattaggtttctctccaaatctgtagttttaggtgtgtttgagttgttactagctttgtctttttcttccttcctccccttaaccaacccttctgagaaacatcttacacagtaagctctttaagcgaattctttttttcttttttttttyttttttgagacggagtctcgctttgttgcccaggctggagtgcagtggtgcaatctcagctcactgcaagctctgcctcccgggttcaggccattttcctgcctcagcctcccraatagctgggactacatctttaagttaattctaaggaaagagactgtctgcttggagagacaagtcctgtaaatatatttgtttcatgtgtgtgagacttgtctaagagctgaatatattttacgaatcttaatgggcaaataactatagagaagttttgtttgtttggttggtttaatttgctttggtttgggttggacccaaaatgtaaactctaaaaaggatggggcactttattcagtgggtggagtcaacttgcaaaggtgctaatcaaagacagtctctaaaaaaatgtaccgctaaaaatgtcactgttagttactgtaaatagaaagaaacaaggagagtattaagccaggtcttgtccctggtcactggagacaagcaggaaaccttaaatgaagatgcagtcatttgtttcagtagaaaatcaggccagcatgaatcatttcaccgcgaagagaatggagatttttctcagttgttgtactagttgggacattttggcacaagtgaaatccaatgcaaaaaggcttaagtaaaaacagagacatataactggaatgtctctggttttaggcacatttgtgtgcaggaacttgaacaatgacagagctctatctcattctctccacctcttggttcatttgccctgttttcattcaccccatggtgggctaactgcttgccagtagccccacacctgcagactcctgactttgcaaccacagaacctttaccatcttttacataatgtcctggggagaatacggacaggccctagattgaggaggacagactcatctctaaactgatgatgtggccaggattatgcaggaccatcagcggccctgtgaagtcaggatgcctggcttcatgttgccacttctgtttccagggtgggggcggagtttcttccctgcacccccaacaaacactgtggaatgggtttcttatgcatagaaggagttaaaaaggaacagaaaacagcagatatcaactatcctggttctgctgctaactggttctgtgaccttggatataataacttctccattctaagcctcagtttcttcatttgaagaatggaggaattgattagaggattttgaaaactctcgtgtttctagcatagaatgattgctgaagaggcaaaagacaccttatggtttggctcaggagtcacagaattatctgtttatacagtttccaagcactgtcattaggctttgtgcgggggagtcacaaattggcaggggcatttccccgcttccctccttgacactgacctccagcaccttgttgggggctacctctaccctgttggggtggcctttggggagtttcaggagaagctgctgccttggtaaataatcttttttttattgagtaaacatggtcagctgcctggccttcctgactctggattctagcttcataggaagccactgaaaactactgtgaaaaaatattacaaggttaaactgaggtttttcctttggctggatttttcttgcagtcatttccaaaaacctgtttcccaaatcaacctggtgtgtgtggattttcttcccctacaagttagaaagcaattgtgcttctatacatggaattttctttacttcagctgctgaagcattcgttggaatacatactgcaaaaatgactgctgtggctattaccgtagttgctcaggggagctattcagatgcctcatttattggagcttaatagattaaaagtccaaattgagtctcatgatataagcctaatcaagttctaatctgcataattttcccataagcagcaatgggaaatttggataatttatgtttcagcagttgccaatcatgtgttaaatagcattgttgcatttacttatcaaaatatttttattgatctgcacttcatctgacatttgcctttgaggtttttttccctggcattaacaggaaatttaattcatctcatagatgatgtaatatgagatgtttctcttgattttaacatgtctttatagatcatttttaaaggtgatctttcccttttacaacttcatattgaatacctgtctcagcaaacctagatgactcggcctaatttatttccctagtttaacgtagcatatggatttctaaccatcatttatatgcacacaataaaagataatttggcccaccatttgaaccaattcctttatgttaagtctatsggggtgggagaagcacttaccttcatttctccatctattctaggggagatgattgataagaatttccatctccctctctccctggaaaggctcagggatttaactagggaagatttagaaagtactttgtgtttcccccatggaaaagtactgtaataaagcatttattatatgtactgagttgtgcatgctgccataccaaagcaagttaagcataactacaatgggtcccagttgttatctgctattgtttaaaagtgaaaacaataaaaagtaagactggctcaggcctcagacttgcctgccagggacagtacctagaaggagaaggccagcacccaagtcagggatgcggcacagcctgcaggtgtcaggagtctgaggtcagactgcctggctgcggctcccagggacacttaccaattgggtatgcttgagccagttatgccactgctctgaatcttattttcctcttctacaaaatgcaaatatcaacagtccctaaacacacagggactgttatgaggaataaacaaggtggcccatgaaaaaacccttagcccagcctggcacataagaagcaatatggcgtggtggcttagaggagacactgggacttgtttatctgggttccactctgagatctgctaattcctagatgtatgtcctggggcaagttgcttaccttctctgtgcttcagtttcctcctctgaaaaatagtagtatatacataggatggttctgagaaccraagttattacgtgagcaaaattcagtacatagtaagcactcagtaagtgttggctattttttttctttgggttctagttcagccttccccctctcttcttcattctcaattattaaccagtttaggtctagagtattcttgcctttgctttgagtctcataaaaacaatgccattgagcctttctcattttctaatgcacttgggtttacagtgtcctggaacccttttccagccattacttgtgtatatcttgtctgagccatagtccttctttccttatgatcacataaggaatattgtgtatatwtatatatatatatatatatatatatatatatatatatatacacacacacacacacacacacacacacacacaatgctcattgccttctcattagtattctaggattttctgtgtgtgaaaaatcttttttaagaatctactaaatacttcttcagttctttatccatagggaaggggaagtgatccacgaatacttattgtatacctaataaaatattaatattggtagccagcattttttagcacttgcctcataccagatattgtactaaatgttttaaatacattattttattttatccttacaattgtcctatgtgggaggtatttgtggtttatcgatgaagaagcagactaggagagagtctgcacaatgcttatagtgccatggcttataggtggaggtgccagaatttgaatccaggacacctgactttacagcccatgctgttaacaatttcattctatttcttttctatgtgctgggcattttgtagataatctgggaagttcaaagaaatgaaaatccagtctctgacctaaagttcttatacagtatatagaatgagaatatctgtcataggataaagttggtcaagcacttatgtctcatgctgaatgaataaaataggtaacaaaaacctgccacaccagccactgaagattggagtggggagaaaacttacagtgtaaggagttcaggtggtctttggaagttatttattttatttttattgtttccagaagttattggggtattggggtacaggtggtgtttggttgcatgagtaagttctttagtggtgatctgtgagattttggtgcatccttcacccaagcagtatacactgccccatatttgtagtcttttatccctcgtctccctcccactcttaacccctaagtccctgaagtctgttgtatcattcttatgcctttgcatctccatagcatagctcccacataccagtgagaacatatgatgtttggttttccattcctgagttacatcacttagaataatagtctccagtctcatccaggtcactgcaaatgctgttaattaattcctttgtatggctgtgtagtattcactcacatatatrkgtgtgtgtgtgtgtgtgtgtgtgtgtgtgtgtgatgtgatatatatatgtgtgtgtgtrtatatatatatatctcacagtttctttatcctctcattgattaatgggcatttgggttagttccatggttttgcaattgtgaattgtgctgctataaacattcgtgtgcaagtatctttttcgaataatgacttcttttcctctgggtagataaccagtggtgggattgctggataaaatggtagatctacttttagttctttgaggaatctccacactgttttccatagtggctgtagtagtttacattgccgccagcagtgtagaggtgttctctgttcaccgcatccatgccaacatctactgtttcttgatattttgattatggccrttcttgcaggaataaggtggtatcacattgtgttttgatttgcattttcctgatacttagtgatgttatatacaaatggccaacaaacatatggaagtcatttttagcacaaaacttgcctcccatggccatgatcaacaaagtgctatgggkacatggctaaagaatcaggagcccatctggtgatagctttggctgtggatgatttaaacttcagtcttttcctgattgaggacttctcattccatgtctctaatggtgatattcttagtcatcttttctggcaaaataagtggttgtttctaaaattaacttcccaagtgttagtttaactaatgaagggagtgtttcccagtttcactgttctctagctgtagatctctggagtatattccatgtgccagtgtgttcacatgcagaactagggcgttgtttaatgtagagagacttcaggtgctacccatgatatagtcatggctgcaagcaataatgggaaggagagcaagatggtcagagattgggccacaatttagacctgcccctttatcaaatgcagctatgaggaatgcggtggacaccatcctatggcatcaaaggccggattgcctcattcctttatggaaggtgcttgaatttctcttctctccaaagccatttaaggaatctggggcaatcctgccgtttctgaccataattttcccatatcagtacccctaagaaagaaacaatgctaataaattatgttcacctttaacataactctacaccagggaaaaagaagaagccaactttgctgttattgttgccttttgcttttaaaaatgtgtgactagaaaagtagggaaacaaaaagaggcatgaagttttcttagcaataaaagcacacttttttggggagtcatgcataggggagagttgggccttcaacagagagatgtctttggacacctaccatagtttgtcagttgcagatgctaatggaaccaggcctggtgactgaaggggaaaatggaatatgaaagcaaaatgaaagaagcctatgaagcaagcatgtcatttccaaatgaaggtttcatgcaaaggaattgagtcttttcacagctgaaaatggaatctttaaataagataaaataaaaggatgccgtggcttgttgcgagttctgtaatgaaatacagttttcctaataccgtgtgacctgcatttctccctgctttatgggtgctattccttgacgtacaaacccgtattttctcaagtcagcatttgatgatggatgtcaaaatacaggccatgtattatgcatatagcattaccgatttaaggtgtttacttgtcaagttgaagaaattcaaaaacgtcacatccactgaatctgcacagctgtcacttccagtttttcatgtttttgaatgaaacttctaatgaaaacagtttagttttccccttcaccatcctagaagaagaaaacagctagcatttaaaaatgcgtgtttttggttatgtggttggctgaaaaacatatattcgaaagtttgaaaagatggacactacaatgtcaatcaaaatgacttacccttttcatagtgtattaatgtaaagaatcaatttaagtgcagtcagggaatggatattaagtaaaactttgtctttctttttgaaagtatggcactcagtgataagaaatgtatacacgggagagcagaaagtaagaaaacccttttatatttctctggcattttatgcattatgcacctccaaaacaacaggcaattattgagctcccgtatttcattcctgactcacacctagccaaaatgccagactcaacacaatcttgtcacattgctggaaagtgagtcagatatctggtcacataataatctatttggagttttatccttggaaatttagcaagtgactttgttcctaaaagtccctaattcattggtaagcccatgtagcattccgctgaaggaaaaaaggagaaaccgaagtgagtgtgaatgcttgcctatcatctaaatgtaattgcactgggtcttgccacttgcgtggagctgccgtatgcttcgttagaaaaattaatttttaccagatgaatgtaggaagtaaataggtttctaatattgatatgtgtccatgcaaaaccttaacgaggcagacattctgcctagccgggatatttctcactctcactaaactgaaagttacagttgttccaacctcatccaggtatgtacttggcttggacctgggacccaaagaagcccaaactgcaaaatcagagaccaagcaggctgctttccaattttcctgtgtccacatataccttatgtggtctgtgtttggcacactgggaagttcaagggatcagccataagcaggtggcatatacattagtcaggaggatttagatgcaagtaaactccttctccatttagcttaaacagaaagaaaaaaatgtgaacatcttattatattgtgtgtatgtatatgtataaatacatttgtgtatgtgtgtgtgtgtgtgtgtgtgtgtgtgtttatgtgtataaaatctcacatagggagaaatcctgaggtgggatggctccaggctgcttgccccagraactccaggacagctcttcctgtcattcacttgagccaatatcactaagttagttatgccctcagctggtgcctcagttcctggcactacaggcacataaaaccgtgctcagtaaattaaaagagaatctcttcctatgtgtttctttttaagagcaaggaaacacttcctgaaagccccaggaagatttcctgacacctcccattggccagaactctgtgaaaactgaggcctaagtcactcaccagcaagaggataagcaattgattggtttacggtaacagtcaggccaggttaggttatgttgtggtaacaacaacaacaaacaaacaaacaaacaaatctcagcggcttaaagcaacacagctttattcttgactcactcagtatgctttgtgggtctgggtaactgtccagggctgttgtctagccttcatctccatagtaacctgtattctcacagttgccatggcctgggaagagagagatggctgtccaatacctgaaccagcagtgatatgcactgctctgctcacttttcatgggccagagcatttcatgtgtcacatggccatacctaacttcaagggggcacaggggataattctcctgtgtccctggaaagagatgggagccaagatctatgagcagaataaataattggtatgaagtctggattttttagggaactatgaagtgagttacgattatttataatggtttcctaccctgtccttctaaagaattaatcatcagagtttatcccgggaatactaattgttgacctgtgaatwatgcataagctacatttttggggttgtatgtatatagtgtactctgattatttccaaattttctacttctctgatttttcttcctcctctgtttccttcccactagggttcacacctccaggaatggatagatcctctccagataacagcccagtgcacgggatgttacgtcaaccatccatcacaactggggtcaacatccccatcatcactgaactaggtaggggtcaatgtcagctttggggggagtttttgttctgtctttcaaaccatacaggatatgaggaggttgrtttatttcttagccctttcaactttgtagctgctatggggtttgttttgagggggctgggaggaaggtatggggagaaatatggcagattaccggaagggaaaactgatctatctttcttctgagatgaatagacagtttccttcatgctggtcactgttttcaaaggagcatgagatgatggatttgcgattggggcattcaattgggaatggagaggaaaggaggaaaggcttagttcacggattctttctggtgatttttactgtaagaacctcttttgagcattctgtctggacagctcctacaatctgagtcctccactgatatacaaagcctcggatctaagccaaacccattttgggaacaaggtagaagccctgggctaatgtgtaataacttgacatttaacgtatcgtagttgaatatctcagccaaaagccattttcagcaaatgccattctggcccccaaaatgatggrgttttgagggccatgttggttggacaatagaatctaacttctaacctggccatggcactccctgttaccattagtgagtgtgcaaaactgtagagtggcctcttcccccaagacaaatgcaaactacctgtggtccggggtccctttacttgagaatgtttcctctgttattccctcactctcttctttttctgtactttcctccactccctttccccaacccttaaatgctgtatccaattagctaaaccgggcaagttgcctttggtatcagtcaatcaggaaaaaaacagtgggacgcacattctaatgataactgaactgggtaagaagcactgttttccttcacatcagtatctccttttgttctgttgttggtgtttccaactatcatcagcttgtttttatttcaccggctgtaacagaaaggctaccccatggcactgctttgaatgtgttttatttgtggctctggttggaatcgactgtcttgttctggmctttcttaatgattttttccccacacagcatcagtaaacctttgatcacacccatctgacctggcagttgtttccaaagcatmtttgctctaattcattttctctggcctgagccttttttccccacttttttttgtcaccccgctctcccgccttctcccttctactcctcttccaacatactgtcagtttgaatgacatgtcttcacagctcttagaggaagtcaaaggagaatatcaaaattttaagataagaaacctaagatggcactttccctccagctgtttatttttctttattctgactttatttgccttttttttttttyccccctactagggcatttctcagaagctctggttctgaagccataaaaacacctggtccctaggagaactttttttactaaaggcagatttcaagaagggtgcggaggataaggttagcagccacccacgtgcagccctgcactctggcccccaatcccagcccagaatcctctctgggagattcacaatggactcaggtggacgataaaggcctccagtcgtgactgcatttgttaggttcttccccacttccccgtgacttggttaataactccatgaagggcacccatcagcagcaagtctcagaactggggattgatcttctaaatagagacagcaaaagtgctgctcagcagaggggtggatagagaggtgggagcacctgccttcacatgactcacaaatgaaatgaacacyccattttcttggcccaaaaatatatttcaaaataagggagcaggctttcaacacagtaatcttgcttgcgasatgtctagaaaccaaggaataaattgtccaccactcagcagtgcattattgtaggtatagctatttatcaggacaaattcactcaggtcagggagtatcacactattttctgtttccaaccataggaggggtatctttttcatgtttagtgtagttgtttaaaagccctaggtttctggattgctctcctcagaactggagggcaataagagacccagggctcatgtggtccacgcctctggttggaaaattaatccaaacatctccatctcacaaacctacagcagcatttcagaatcctcactgccgggaatttcattttctatttggaattcacgtgccgctgactaactaggatatcttaatttgtcattagtagacgagaaaaggaaaagcttggtgccccaaacctaaggcaacaattctggtatttgattagcatcattgactctcctgaagcctttgtcccacascagatttcttccttgtgttcagagaatctttcaggtgctcacaccacccttgtcttctgccttgaaacctatttctctagccrctrtaccaccctcctcagaccayttcacctcccacatcccccacaaatacttcttatttatctacatgttctgagatgtgttctgcattatgccaggccagtataatgaattttaagagacacagagggcaccaaggccacacaagctttcaaagctgtgtagcacattccacttttcatctacttggagactctcaattgatgttagcatggcaaaggctcctcagagtctcacaagaaaggactgtgttacagctgtttcacctgactattccaattgtatttgaccacatatgctttggggtgattacgtgggtacctcttagcacccacataattactgttctgtgaaataggccttgagtagcattgcttgctctccttctgagactgggtatttcagaacggtatacaaggtattcactggaccctggctggtctcttggagcgcttttcctatgaccccagatgtctagctcactggcaatygggagtcccctccccctacttggagtcacttcacctccatatctggtaccaacccttccccatcttcctgataagaggtaacagatgctgtgcttttcggagcattgccacacacaccattggtggctattacaagtaactaaaaccacattcttccatatgtcgtctccagtttacattttctgattcacaaaacagaaagactaaacagtggcctacaacatccctttggacaagtgaagggaggtgaggaaaagctacctcttgaaagacccctgagcaagaccttcagtgtttccaagagaggcagagggaagctgggtattttcatgctataatgggtggacaggtatttaatgtcagaagggagatcatgacagcagctggtatttatcaagtcatggcatgatccagatgctgggccaggcttactgggcaccatcccattcgtatgagcctcctgacagcctcatgagagagctgctgtaactcccccattttacagaaacaaactaaggtatagaatgatgaaatgctttgcccaaggaagttggcagcacaggctggactgaagcccagttgtcagagcctggattttggactttcaccactagcctgcaattcaattgctgcttaaacaatggggacccaaatgtgaccaattttggaagaacagagcaaagattttccccattagaatttttctctggggaaacaagatgatgtcattttaaaatactaattccatgcctagcctttcatgctagtatcatttattctgcttcatacagtaaacaaaagtttttttttttwaaaaaagaagagttatcaagaaagttgcttaaaaattaaaacaatcactstagaaaaaagaattagstgttgatacatttagaaaggaatcagggaaaggaaacctcatctgttctcttcctaaaatcacaataattatttcagaaattttgagtgcccccttctcccatccccccaccgacttttcccctattacttgctctgcaaaactgataatttccaaagccaagatgggaatggaaattaatttgtcatttaatttttaataagttaaagacatctgagtgacacaactaatcagyctgcacgtacatgcgggaggagtccttgaggaatcctcagatggaaatgaaatacagcatccaatgctgcatctgcttgaatgcaagcatataaaagattgagctgtttaggatgggaaagggagaacgtgggcgtccccatgcaactcaaaattcagagcaagtccttgtcagcaagcagcaggagacagccaggcatccatcccacctggggtttcctgtgtattaaacagggcctattgggtgtggacctagatttagggcctgggaccccgggaactacccaggccaatcccagtgggtaggctgcgggttatgcctgtggctgaattccttgctatctgcctttgctgtgctccccttccagcgctctttactcccaataagctgctttcttttcattgtggctaaaatgactatcccagcatggctgctcatcattgaaatatgtccatctctcaaaggacttggttaccaaaaaacactggaaagtgtttttaggtcatgatcctaaagctatgccaaaggactggccagcacagtctattggtcctccagtggcctgcygtggagcaagcctgcttgaacttattgctctccaggtctcagacacttaaacagtgacacaggaacagtccattgagtcccactgccccccttacccaaagatccatctacagcttattccatgcttttgtttccttctcaatkacttcagtatttctaaaccagtagcctggtctccctctggcttcaatgcctgtgtgtggtcttcagagctaattcttattttatgctttttctagtgaacgatactaatgttcagtttttggaccaagacgatgatgatgaccctgatacagaactgtacctcacgcagccctttgcctgtgggacagcatttgccgtcagtgtcctggactcactcatgagcgcggtgagttatcctgttccctcctcctcactcaagggtggaggatgtgccaatagagcacctccaacctttgaggccctgggctgcactggggccacagtggagagcaagactcctagaagctcacaccttagaaggggagacccacattataaaaccatcacacaagtaaatgtttgattataaattcctcaagtgcaaggaaggcaaggcaggctagaaggaaatataggtgagggcttgacctggttttggggatcccagaaaaattccccaagggagttgtacattttatgctaaaatttgagccataaagaggggagatcttgggggaagagcattctctgaagaagaaagaaagcaaatgcaaaacctggtgttgggggggacctgaggctctcaaagaaggcaaagaaaccctgtgaggctggaccatggggagacaagggtgcaggaggatggccaaggttagacctgcagaaccttgaaacacattttcatggttttggactttttcttaagaataatgaagaggcactgaaggattttagttggagagtgacataatcaggttcatgctttaaggggattgccttggctgttgtagggaggatgattcagaggtacaagatggcggcaggaggtctgagtaagaggctgtcatggcttggactaggatagagctggtgttgggatcgagggaggtggatggagctcagtggtattgggcagtacaattaataggacttgggaaaagattgagcatgagcagaaggtggagaggacagtgggtcaaagatgactgccaggcctgtcactgagactgaagtccttgggagagaaccaggcatggaggcaaggcctggctggaaggagggaggagttagtggcagagagaggacagtgggctggcccagggatcaaacacagctttggtttcttttataacttgatgtgcatctagcaatcaggcatttgttttttcacttttgcaaccgaaaaacaaataacgattaaaaaatgggtcccaacattatggagccatctttcactgcaaaaggcaaaagtaggcatttagaatgagtcataacctgggtattatgaagtcttcccactgagcatctttatttattatgtagaaaatcttcttcattttggagttctcaaattctcaatttgtgaaaatgcagacataggctgaacaaaaacttgacctttggagaatccatgataaagagcttttytgaacacattaaaaccataaacagaactcagagtttttacacacgtatatttcttaaagtgctgaaagttattctcctgaatgtgctaaacaactgatatgctaattatgtactggtctcatctattcattaaataatgctaatcccagaaggacctctatttgaggaaagaaaaaacataaagctttttaagactaatttgggttattctgtatgcctgaacattgtccaactgcaagcatatcttakttaaaaatcagaattttggatttaaaaatgactgtgaaatgacattcgtctgaattaaggttaactgggcttcatgccatgccatggctttccaagccaacaaggagataaaatggtccttggaaaagggctcccttggtttcctggggctcatgatctttcttatggcctgatgataccaaggctaacctttctacctgctagtgatgttgggctcagtttgggcaaactccttgagcaagccagaaggaatgatagaagcctcaagatgtgttcctaagaagaccatattctcagtcataggcctcatattctgcaaatccagtttcaaatggattttggtaattcatctcattagaaatttttattttagttctgatcctaattacagagatctcagaagactgttctaagagctggttaaactatttacagtagaatttttttttcagaactacaaaatactctgataacatttttaaaattccaaatttataaaattgtttatgtttctacatatcagatatttagtatgtttctagcaggactggctacataatttgcaaggtcacttttcatgaattattaagaatttcaaaatggtgacagcagagtattaaaacaaaagagacttggggctgggtgcggtggctaccgcttgtaacccagcactttagaaggccgaggtgggcagatcacttgagcccaggagtttgagaccagcctgggcaacatggcaaaaccctgtctctactaaaaatataaaaaaattagctgggtgtggtggtgtgcacctgtaatcccagctacttgggaggctgaggcctgagaatcgcttgagcctgggaggtggaggttgctgtgagatgatatagcgccactgcactccagcctgggtgacagaatgagaccctgtctcaaaaaataaaataaaataaaataaaacaacagagatgtgtctgagtacagccctgtgcaaccacataggctgaacacccatgaaaccagccctggttccaaggaataaaatcggtttgagcacyggagaacttcttttcaacacagccaaaggggcatatggtagccacagggtggaggtgggggcccatctggrtttgagttgcacaagcatctatatcatcagtaggtagtcagttcttggaaattcaaatgagaattcaaagtgaattgatttgaaatttttaaacaagccatctctcatctcctttgaaatgcacacaaaaatgtttgggatagtgtgactaaggcatgtttggatgcaatagtatgggagcagcatgtcttctgcattctagcctaggataaaagggtatcaggaatctggtaactgtcattgtatttatcatcaggagcatcatttactaagggcccagaactgtgcgaggcactttagctacactatcgaatcttttggacaataatgtgaatactcttggtttaagtgttgaagcaagacatatttaagtaagtcattgatggtaacttttcaaatcattaatcaaaatgcctatcaaattattccaggtcttgttttcattgtctaggatgaacaagcttcataatgaggtcttgagtagggtctgagtccacaaatctagttggatccagacgttttggtaaaatgttacctgtgatttctttgcattctaccccaaccttaatgtatgaaaaaacagattagtcaagtgccaaggcagtaactagaaggaacaaaaagggctgtcatgaatataaattgagaaagtgagactcctccaaacagcaggagacagaggtaaactttcattgcaggcattcactcataagcaacatcacaacatccacacacaaatctcttcagctgttgacagtctccttattctagcgctcctccccaaattgtcatttaatcatgtgtctaaacattctctgaatattgtccttcataacccaactcctgctgcttactgcttcatttgttaaaagaataatattttgattcatcacaggcattcctggaacagatcaggatgttacagacatggccctgtggctttatctcacaaatcaacagcagaaacacaggatgagagggaataattaggtttttggatatatgtctctaagaagatcacaacttagaaatgtatttttcagaatgataccatcttgatgcacacagtcgcaccaggtgaaaggaatcctctctgtttttagggatgagactcacatatgagtattcagatttctttttcatccagctatcactttctcccaaccccagccccaacttaagctccacttggaccctgaaaagtgaatactggacatggactcaagcgccagatggcttagatctggattccagaactgctgtttactggctgggtaaccttaacctccctgtgcctcagttttctcatctttaaaatgaagatagtaatagtacctatgtcacagggttgcagagatgagtaaatgggtaaaggttgtaaagcgattagagcggtgcttagcacttgacaagctctgtatgtatttattgttgctagtgtttttaatcaatacatttattgggcacttactggacaccaggcatgattccccatgctgcggattcagttgtaaaaaagaaggatgaagaccttgccttcatgttatttaaactttcattctagtgggttaagagtaaataggtaagtgaataaatgaatagtgtcacataaggataattgatttgaagaacatgaaatagcttgaatgggtgtggagacctgttttaccctcagtggtcagagtaaaattatcctaggaggtaacattgaagctgacactgaaaaaaacagagggagagaacactataaaggccaaagctgcacagtggtgacaagctgggtttggtttgttggaggaagcagttggaggccattatggttggaatgtggtagacaggaaggcaatcaagaaggcaaggccgctggccacactgagtattccgagtacaatagaccacatctggccaagttctaagtctggaatgagacacttcagacttggcgagaggatcctccttcttctgaaagccaccagcttcctcctaatgccactgtttctggatacgctggctaggacagtgagctcatcactgagttgattcctgaagcgcaacccttgattatttttttgtccaacaccccatcctcatgcactcattttagaagaagaaatagcacaatatattggcatagtacttggcttgatatcttgtttctaataaaagatctgtaatagaagtctcgaaatgtcacattgcagtctacatctaccccacagacaacttctgcatttatcaagtttttatttttaaattgaatttgttgccaatattttaaaataagattttatataaaatcggggttcctgccttctttaaattagagtcagaaggcagagtcccagattcccgtaaagcagctattggcttgagctgagcagctgctccctttagccacagtccacactactctctattgtatcccaccaggcctgcttcattcatgtcccttccctgcttggttcatcccactgtcctggccttaccagcytcctgcgttttgcttctaatcttatgtgtctgcattgcaatgtctgtggtcagacagcatccttggccttccggtcacttgcttgtcctctgagttaggaggttgtgcacatgatgtccattttccttgagccttggacctttcctaaacagataccaatcacactgaaccatcgttattgaaggagcagtgaggagccacctccttctgaggagaaaaaggggaaccctactacaagagctaatgagttccaatgcacacaagttgggagtgttgtcgttttttttttagaaaacaagatttaatgaagctttaggtttgcagggcctacctaatctggaaaaataaagaaaaagcatattataacagtgttaararaaagagcagagaaaagcagaggccccttttgctagtgtacgatacatctgagaagcgtgaatgccagcctatggagagacccatgcgcaggatcccccaggagctagagagaaatttcaatgtgagccagttaaggcaggtgtgtctttgctctgcccactgcaccacaatgcccagggcaggagtttgcatgtccagtgcattcatattttcagaacaaaggcagtgacttggaggagggaaactgggccatgaattaggacttgtagcttctggtcctggctcaccggcagcccttgcacattttttctactgttaaatgggaatgatgttactccttatgactttctgctaatyggagaatggcaaaggcatataaaaatctttcacagagcagatacgtatttcttaagatcacatgtaattacaaagaagcagatttttttggtatayatgcatgtacatatatgtatatatatttatgtgtttgtgtgcacttatcctctctctttctctctttcatgaacacacatcttarataatatttgggagcttagtgggtagatgagttggggtacccagaagatatgattccatgttctcatctttaatatcagagagctggcctgtttgccagaaacgaagttatatcagtaagactggagggtgtgaccgtctggaatgtgggttcacatgatttactgtctttcctgtactttcattaagggccaaacccttgaacctggtgttatggagaggcctgagttctctatcagtccaagctaacctaatgccatgtgattttagttacataaacaatttattgctccataaccctatttcttacactycactcaagagcctccatttcaactgctcacacggagacagagggcacatggccgtcccgaggcagaggagctagcagtggtgtcagtcgggtacatggaggtatgtcctgctagactcaggacagaccactgctgtcacatcaggccaggcaggcctggggtagggaaaaaaaaatccaatcattttcatccctcacgaaagaaaaatactaaaaataaaaatctacaccatgaaaactagcaaatataaaaaatggcagctatgacatggaaaatgacaattttagagcaattataaacgaaaggcagagagccattaaagttaaggcaatgttattaaaagatgtgttaattttcagttaaattttctataaaagaccaattagtttaaaaggcttgacagcattaactgtgaaacataagctccggtaattatactttaaaaaaataaaaagaggaggatgcttgggcgggttacacttgcaggcacagcrgggcgtgggccaagcgggctagatggcgctgtgggctcaggtttycctgttacagtgccttggtccctcccctggcatttcatggtttcctcagtgtccttttacaggacctgagaatcatcaaactttagaggccaagcgggccacccttgtgttctgagccagctctcagagattagaatcagaacgccgagacacccggagagggaattgtctaaattggttgcattgctagttgatggttctttttataaactcccattttttgagtatgctttgtctatcagaagtttcacaaatcctctcatttaactctaatctayaaatttttgttttgttttgttttttcatctctgttatatggatgaggaattcaaggcagagaaaagttaggcaactttttcattgttgtgcctattggatagcaaagcaggtattaaaagccacactaattggatttggaaatctgtactcataaccagggggccacgttgccttaatcagaagaagggcttcgctagtcaggtttgcaaacttgtccttggcagtgggaagagggactcctgtattccttagactatgcgggttccctgatcccaggctctgaacaggaccctaactcagctgtcttatactcaatgcccatgtgacgcaaggatagatattgagaaggtctctgcctgaagcatccctgaagactaaccctgccagagttggaggttctatacaagagcttcccagaagacttctagcacaggtatcatggtaaggcacagaaaagactggcaggacaaaagcttaggaggcaaaggatctcacctacatgatcctgcctttagaatgtttcatttcttcaattttagcatttatgttaacccagaaaaaaatgtgtgccttctgggtcaggtgagttgtagagaggtttcctccgcaggaagcgcctttggtaattggcatttgaagttctagcacctggtttgccccatgatgcagaaacagccatcacctatgcagaaagccttggagtgatgcttaattgcagactgctgaatgctccgtgaagtgccctaccccaaccctcactcccatcacataaggaaatttgcatcctccaatatgactgacctgacacccttttccagaaaaggcattgtctttccaccaaattattcagatcctgaagagataggtgtgcagagcacacccgtcagcaatgctcagagtccttttctgcatccgaatattggggtatcaaaacaggagcaaaagcatctgctggcaaaaatacatcatcattctctgtcatcacagattctgctgccccacagctctgctcctggatgcctgcatggaaaaatcaaggagagccatcatctgggatgcagtgccagctcagagagcagacaattatgctcagagatatgagtggtcccagagttgttcagacacctgtgaaaccctgggactgactatgaaattgtacctgttgatgagcaattctaaaagtcatgcactctttgactttcacacaatttcaggctaaaccaaggcccaacgattagtaggtgctcaataaatgtcagtgactgatcaaaaagatttgggtataactgatttcaacacagaagtgggaacatgttagggtcaaatcccaaagatttgacaaaacaataacctcccagcctgaccttctagatttatcattgcaatggataacctatagtgccctttgtttaaaaaaaattgactgtgtttttattagaacagttattcatacttcttgatgaaaatttggaaagcacagaaacatataaaagaagacatataaagaagaaacatataaaaataaaaagaaaacatataaagaagaaaatataaatggcctatgtttccaacaccaaggataagcatggttaatattttggtgtctttccttctaaatggatggataaatacagaattatctcattttataggttggttattttttcccttttcagttaatattttatccagagtattttattatttccttaggtgtcatgatttgcagagcctccataggactttatgagactccagtctgtggatgttccagaatcgatttatcactaaatttttggctatttagctttaaaaaatttttgttatagcaatgattaatcctgtaataaaaattattgtacataaatctttgaacaagtagcaacttattatattgaggcaaatgtactgggtttttttttttttaacaaatagggacattttaaaatttcttgatacatattgtcatgatatctccaagaaacaattttaccaatccacactctcgtcatactgagccatctcatacattatggcaaatgccgattgtcatttttcctaggaggccctttaattgtgtttatgatagttttgaagcatatcagtttttaatctgtatataatgatgtaaatacatattttatatagtgaattcagtttttatgcataaaaagtgcatgctgaacatgagaactatcaagcatcttgagattaaacagtttgctatatttttgtgaagttgtttgtggctacattttttgcctttaactatttagtaacatttactttcttttttacagaaatttaaaataaatgtattttcacagcagaaaatatataaaataaaattataggaaaaaaaccccaaattctaaaaccaagaattaactactaagtagaaattttgtgtactacttacagttactttcacataaatacgtctatcagttcaggtatgcattatttttccctctggaagtccccaaatcagagcattatgtactttttgtaatactttatggtagaaataaatgagtgaccataataataaacaggatatcattttctgataactttccattaaacattgaagatttatatttaaaaaataattcaaaaagtaataagtgcatgatttgttatattatgaaacagtgtacattataaagtttaataataaaaatgatctctacattttataaacatatgataattgaaaacattaaaaggaatcattagtatgaaaaagccaattaaaagtaatattaaaacttaaaacccagtaccataaagattcaatatttaaaagtgggtactcttaaaattaaattttaaatacagaaaaagttaatttccctagccaatagttttgcaggtatgcatttttaacatgaattgtgattcatggtgttttggggatcctacttttaaaaaacattttagtattatataattattaccatgccattaaatattatctgaaagcacaatattcatgtctgtacaatatgagtcatgtcaaagaaccattgtttaatcattaccatattgttgaaaaatttttatcagagagccagtttcccccaaatcattcattgagtaaaatcccttccctgtggtatgcaatgctttccttgttatactaaggaatggatcagcaaactgtcttgtaaagagccagatggtaaatattttcagcctttgagggccacatagtctctgtcacaactacttaactctgagtttgttagcaccaaagcagccccagacaatacataaacaaatggacatggctgggtcccaacaaaaccttattttaaaaaagtaatggatggcagagcaagatttggcccaagagccagatttgccaacttttgtattaaggtcttataactactaagctatggttctcataaatccattctggttgatcttctaatttttcacattgtctacaatatttggttaggaaacctttaaaatttactatactacatgagaggacaattttgtacaactctttccaggggaaatttagcataattttatcaagttttaaaaagtccaattcaaatctgcaattacacatatgtcaaacaacaattttactggaaaaaatgacattaaatggcctatttacatgttaaggaacatggaattttccttttttcctaatactctcctctgtctcttcatagatgattactactttgctttttgcctaaaaacagtagcgattcttattcacgtccagtgattggtattaaagagagtatctggaataatactgttaattctcctatgtatctgacattttattctccttatttctaattttatttgtgttttttcagttatattgtcataagtttattttttcaaggaattatttcttgaatttaacaattcactaaatatcctcttgctaattcattaactgacacttttcatcctgcttttttttaaaaaaagaattcttttaatacttaattttacttattataattctgttgtatttaataatagcattaaaggctctgaatttgtctctatagcattggcctcaagacatgatatttttatatgtcattctcaaatattctttaattttaaaatatttcatattctaagtttgatttccatcttgacctagtagttataggatacttaacaaaatttttttgatgttctggaatatttacttttgcctctattacattgtatttaatttttaaaatgtaggttatacagcttatactttgttatatgtattgagatttgatggttttggccattgatttttttttttgtaatcgttgttacaaagtttagtaaaaatacastaaatcaacctgattatatcctcaattttcttatcttttgatctatttggcctgtaaaagctaaaaacagtgatagtgggaatatttcacgtattacccttagtccagatttattctagtgtaattctaattagttttgctttctatatttcagttataatatttgtccataaaaaattatagctttattgtgtcaactatgaatataaaattaacttatctaacataatagtttaaaatttttctttgaagctatactttttttcttccctttttctcttttaaagatatcagagtttgattttggcatttgaacaagtctgaaaatctttgccattttataggatcatttagctcatttatgtttagttatataacataagatgctatagtcttgcattatgttttttacatgcttctatcataattatatgttttatgatccatcttttggtatgtggactatattttgtatgcttattttctgtagtgtaaactttccattctatttttaactctagttagttgttaccagccattctatagatgtattttctaagtattattgtctagaaaaatttagtagttcttgattcctccttgtataagatcaggcaattttcatgcctttatttccatcatcatctctatctcatctcatttttctaactttaaaacataattttagcaatactatattaatagctagttttgtcatttttttaataattagttttgacatttgcattccattttgtaataatatatacaataatcttttacaattctgttttaaatatattttaacagtaaaccaaatttgctcatattttagttactaagggtttaaaattatctttaaagaagctaatttttgtttctaagtatttaaaaaaattaaatcaataaatgcttatgtacgcaaagagtcaaaaaatatttcagttgccttcacaaattattggcaatttaactatatgtagaatttttggaacaaatgtgtcctgtcaaaattcctttgacattcctcttacattttctagagaagcttcagcctagcctyattttatacttgtatttcttacagcattgttttaggtcatttttattctccatttaatattttgaattcaaatattcaccgagtacaggtctaggagttggccacattaacttgctgaatgcttttgatctgcatcctagattcatttcccagctcaggacaggttatttttatttgtttgtttgcttgttttacaygcttgcattttgtttacaactttgatttgtaaatacttactgtttatcacttgacctttgttgtctttttctcaatatcaaccagcactcttattaaacaaacaaacaaaaatccctatatctttctctatttagcttagaacttcctggttttacttccgtatcactaattgtgtgtgtgtgtgtgtgtgtgtgtgtgtgtgtgtaattttcacctctaatactcatggctccttagattaaaaagttggccagtgcaaatttagttgtcttttaactatttattttaaaaaaatgagacacaacatactatacaactcatccatttaaagtgtacgattcagtggttttttttttagcatattcacagacatgtacagccatcactacagtcaattttagaacatgttcatggcatcaaaaagaaactttgtattttagttatcctaccctcccctacaactccacccatcaacccaccaaccctaagccaccactgatctactcattatttctgtagacatgccttttctggatattttatataaatagactcttgttgcaggaagtcagagaccccaaacggagggactggctgaagccttggcagaagaacataaattatgaagatttcatggacatttatcacttccccaatcagtactcttaataatttcctatgtctgtctttaatctcttaatcccatcatctttgtaagctgaggatgtatgtcgcctcaggaccctgtgatgattcygttaactgcacaaattttttctaaagcatgtgtgtttgaacaatatgaaatctgggcaccttaagaacaggataacagcaattttcagggaacaagggagataaccttaaagtctggctgcctgtgggctgggtggaacagagccatgtttctcttattactgaaaacaggtaagagaaatattgctgwattctttccccagtaaggaatattaataattaacaaccctgggaaaagaatgcattcccaggaggagcctctaaaatggctgctctgggggtgtctgccttatggagttgcagataagggatgaaacactccctggcctcctgcagcgcccccaggcttgctaggattaggaaattccagcccggcaaattctagtcagaccggttctctgctcttgaaccctgttaagatgattatcaatgacaacgcctgcacagcaggacatggaagttccttaataattctagtttygccctgaccttgtgatctcgccctgaccttttgccttgtgaccttttgttgcccttgaagcatgtgatctctgtgacccacaccctattcatacactccctcccctttgaaaattgctaataaaaacttgctggttttgcrgctcagggggcatcatggaacccgccgacatgtgatgtctcccccagacacccagctttaaaatttctcccttttgtactctttccctttatttctcagactggccgacacttaaggaaatagaaacgaatgtacattgaattatcagaggtggtttgtctgatagactctcagtacaatgtgttcaaggttcatccatgttgtagcatgtatcattgcatcactcttttttacggccaaataatactcattgcacggatataatacattttgtgcatgcattcattagctaatggaaatttgggttattttcaccttttgggtattaccaataatgctgctataaacatctgtgtacacgttttcatatggacatatatttttatttatcttgggtatatactgtaagagtggaatktctgggtcatatagcaacacaatgttcaaacatatgaggaactgcctagctgttttccaaagtgactgtgtagcaggacgagctgcagacaaaactcctcagacaccgagttaaagaaggaagaggtttattcggccagcggcattggcaagactcctgtctcaagagccgagtatcccaagtgagcaattcctgtcccttttaagggctcacaactctaagggggtgcgtgtgagagggttgtgatcgattgagcaagcagggggtacgtgactaggggckgcatgcaccggtaattagattggaacaaaaaaggatagggattttcacagtgcttttctatacaatgtctgtaatctatagataacataaccgattaagtscgggtcagtctttaactaccaggcccagggtgtggcaccgggctatctgcttgtgggtttcatttctgccttttaatgtttactttttctttctttggaggcagaaattgggcataacacaatgtgaggggtggtctcctcccttaactgcaccactttacattcccaccagcagtgtgtgagagttccagtttctccttattcttaccaattcttgttattatcatcagtcttttttattacagctattctagtaggtgtaaaatatctcattgtggttttgatttgcatttctctgatgactagagctgttgagcctctttgcataagtttattaaccacttttatatctttttggagaaatgtttaagtcttctgcccgtttaaaaaattgggttgtcttttttggttgagttataaaaggctttttaatactgaatattagacccttatcagacatatgatttgcaaacatgctctctcattttgtaggttgtttttttcactttttggatagtgtccttcaaagaacaaatattttttaaatttttatgaagtccaatttaatctgttcttcttgtagtttatgctttttgtgtcatgtccaagaaactattgccaaatcaaaggtcataaagacttactcctatattttcttctaagcattttgcagttttagcttttacatttagatctttgaccccttttgtgttaatttttgcatatagtgtgaggtataggtcccactttattcttctgcctgtggatacccagttgttgctatgccatttgtttaaaagactatattaacttctccattgaatggtcttggcacactcactgaaaattaatagatcataactgaatgagtttatttctggattttcaattattttccattggtctataggtctatcctatgccattactatcttgattactatagtcttgtagtatgttttgaaactgggaagtatgaaacttccaacttcgtctttcttttataaggctataagattgctttggctattttgggtctgttgcagttttagagtcaatttttccatttttacaaaaaaatggactttgtgattttgataggtattacataaaatctggaaattagggtagtattccatcttaataaatcaagtcttctaatccaggaacatgggatgtctgtccatttatttaggtcttctttaatttctttcagtaatattttgtagtttgcagtataccagtcttgttcctccttcaatatatttatttctaagtattttattcattatttttctgagacagaatctcactctgtcacccaggctggggtgcagtggcatgatctcagattactgcaacatctgccgcccgggttcaagtaattctctggcctcagcctcccgaggatctgggattacaggtgcccgccaccatgcctagctaatttttttatttttagtagagactaggattcaccacgttggccagcctggtcccaactcctgacctcactcctgacctcaaatgatcctcccaccttggcctaccaaagttctgggattacaggtgtgcaccatgcttggctgacctcccattttctaccacatcgagtttaaaatcccttgcttggtttttaaagccctgagttccccacgcctccaagaaaacaaagaagattaaaaattcaaaggaaagttgagaatggagctgactgttcctctacttggcaaaggcctcatgtctctgatatgaggccaaaatgtttatcagtgcttcctgtgcaccaagcatgtttctaagtgcttcatgggtaggtcatagagccccacagccttctattattacattttacagatcatgaaacggaggcacaaaaatgttaaataactttccaaggtcacacagcttctgagaggtgaagtcagcattaaacccctcagcccagctctggatccctggatcccataacctctccagamacatatcctactttaagtatcctttttctgcttctgtgcctaagggcatatcttaactctgagcataaatttcctttagggtctggcaggctatggataacattcctaaattcttttgcagttggaattttgtatcacaatgggtgtttttgtaagtatttcaatgaggattgtgaatccagccccrctagtaactatcatcttaattcagaagtcctcatggaattatgtgaatataaatttggttttaatgaccactgttattttacagacgagaaaaatcaaagtccagaatgactaggcaacctccaagacatagaactagttagcaaacctgggatgggaacttgagctcacccttacttggtttgttccctactatgccttgccagctaaactctctaagaagctgctgaggtgcaattgcatctttccttacctctttccaaagtgcatcctcaaaagccacaggcaaactttgatttgagttttttagcctgcttgatttctacttacataggaaaatggaatgcacacccttacctgagaatttctcaaattaggctggtgacaaataccttttaaagctcctttatttgacatcctattaattttttttaaactcccattcttttgttcctgacagatctgttatgtttcagatgtgacacaaatgtacacttagagggaaacttctttaataagtgatatttgcctcagactactgaggttattttagaaaacaaaagccaaagtacacttaccaggacattcaccttttcataaatttatccggcatatttaattgatcgagatttctgagttagacagttatcaacgcatgtggtaaatcgttaagcgtgtggcattaatgaaaggttttgccgttgtcgtggggaggaagcttcctggcacatggatgacagggcctcagagacaatgctgcttgggttagtagctggggcaggctgcattttattacacgtgtccagaatctcatagtagtcacgtagactttaggagggggaggcaatatttgtatccctactaaaaccaattatggcaaacactaattattcagatttgagccctttactaaaaaatcccctgaactgggttttttaagtcaggctgtcgtagcagagccaagcaagagagaaaataacggaataattggaggctgctgtcttttcactccccacatgaaattatttgaagagacaggccagaactttaaacaggagataccaagaaaagttgtaatttggatgtcggctgtcatgactttagggtgtttgcttaaaggacttttccctcactttctctccttccccagacgtacttcaatgacaatatcctcaccctgatacggaccctggtgacyggaggagccacgccggagctggaggctctgattgctgaggaaaacgcccttagaggtggctacagcaccccgcagacactggccaatagggaccgctgccgcgtggcccagttagctctgctcgatgggccatttgcggacttaggggtgagtccacagcaccgaggtcacctgagcttgctgtttgggaaaagcttgatcctgaagaacgtggtatcagatgtgacaagctaggcatctggcttttctccttcctattgtagataactgtaagaggtgatatttatttatagtttactctggatcagacactttgctctatgcatagtcattcattttaatcttcatagcaaccctttgatataagttctagtatcacaccttctaagtcaactgaggcccagagagaatgagcactagacctattgggaatttgcaccaaggcatcctggcttcagagccagtgggctttctccctccttggtgttctcttcacgtatcctctgcacaaggtgagaagcagcaggtgatgccagcatgcagccaaggttgggaaatatttccacaggctcttagcgtagcttagggatactcaacccaactatacattaatagcacatggaggtggccagcctcagcctgcaggtttcttagtttttatatgtgaataggacccaggcactggtggttttcaaagcaccagggtagtcagtagtcagatgtatccagaaccaccggccaaacaaaccgaatcttatgtggatcctttaatgcctgtaaatcaaaacctagaccttgtaatttctgagagtggacccagtcacgttccctcaygtcctccctgtgacggaagtggccagcgtctcccttctgattccatgtatctgcctagtgtaggcactgtgacagaagtgtgctgtctttgcccttattcccagcccaaccccacagatgcatttaagagatgcagccataagtcacagaaactgataaacctgttacacaaacaatggtgtcgcccagaaagactaaatagtggaaaaggagccaaggaaagggtctgtctctgttttttctgaaacagtgctgcatactttccccatattttagtttgatcatggactgggacctatgttagactaggctttttttgaaagggaattttcatrgctagtggctctttatacctatcatttacttattgatgcacttgattaggataaagactttagataatggtaagatttggtcccatcagtgttctttggtatgagaccaatatgagaattccaatgattggaaggacaaagacagtcattttatacccagtgaagccatcccgcagtgcccagtgcccttcatataatacaggtaacatctacctgaagccacctggccgctgaagccagcatttccaagtggatgcatttgctttcactttctgcatcaggccccagaccccgggaaggtggctgtgaactgatcagaactgcgaatcctagttattcagcctgcagacccctggctcctagggaaacacattctcttgcacccttgccatctctgaggtctgtaaattgtgcttttcacagggtccttacctcctgaaagagtctgtcaccataggacctggtggggtcctcctccttgcggtggttttcattatcactcagacagttttgacaacacgagcctatcacagcggttacagctgagctgggactgaacataatcaccattttgcagagaagggttcatctcctcagctgagcatacatctgagaccatcaagctttacactttgacttaaagtgagggagaagcatartctccttagagctttcaaaccccactgcgacaggtggaaaactggagagacaccagaggaaaaccccattgttacctgatccctaaaaatcacacatattgggtgtagtctgttaaacatgttgacttcttccactgccgtcccttggcacatggaccctccaacttgggagacaccaaaacaagctttgatgaaaagacccrtttccctgctgtcccttgattttcaggcaaataaaaaggatgtttctctctgttcttttgctgtctcccaggatggtggttgttatggtgatctgttctgcaaagctctgaaaacatataatatgctttgttttggaatttaccggctgagagatgctcacctcagcacccccagtcagtgcacaaagaggtgagtattggtttcaactctgccctcccacctaatcacagaaatattaatatcctttcctgtcccctactgtaaaggcaaaggtctgtatacatctcctcaacatgcaaattactctgcccatattaaatccaacactgagtttggaggtgatgggaagcatttttctataattactaatagtagatgtaaagacattttggtaagaattcaagttttgtattaatagaataattccatcacctaattacaaaagtctgaatacacaaacatctctcccaaactctagctactaggataacatctgttggtacctaatatagagatattttacattgctagtgtttaagataagtttttttgtttttttgttttttktttgtttgttttttgagatggagtgttgctctgttgcccaggctggagtgcagtggcacaatcttggctcactgcaacctctgcctcctgggttccagtgattctcttgccttagcctcctgagtagctgggattataggcacacaccaccacacccagccaatttttgtgtttttagtagagagaaggcttgttggccaggctggtctcgaactcctgacctcaagtgatccacccacctcggcctcccaaagtgctgggcttacaggtgtgagccaccacacccggccctaagataagtggttcttctgccatatctcagaatcccatatttttacttcacatattttaaattgactcgctttttaacttttatatatttatttttgagacaattatatattatcaccttaagcagagaaataacagtttagatgtgccaattatatttttctcatatgcattaaaataaattcatagcaggcaaaaattaaaagtacatcctagaattaccaagatcagtgagtttgcataatataccctaggcaacagtgctgcagagacaagcgtttctcatccctgcttgcatagtagaatcacctggggagcttttaaaaaatattctgattactctaacttaactggtctggaaggaagaaaacatcatatatatattttaaawtatgtaaacattttatatataataaccagggattatagtgtatagccagaattgagaacaattgctatagaccagtgggttctcaaaatttagccatcatgagactcacctgcagagcttgttcaaccacagattgctggaccccatcctcagcacttccaawtcagtaggtctgggtgggattgcttaagaacttgcatttcctagttcctaggtgatgctgacctgtgtggcctaaggaccacacttggtgaccactgctctaagtgaaacagcgtgattttcttagtcacatctgctgttgaccaaagaaagctccaactaattgtgaagaacaacaaagtagtgctgataagtaggcaggtttcttagattcttccatgtggtgaattccaaattccaaattctctcaccaaagtagattttaaaaggtaaagagcgagaatagtctaaggagacactctgtcatggtaaacaaagatcttgtgatgtatatctgggattgtccgaaaattatgaaatgaaagttgcatcacacttcatgaaacctcttgcggttgggctacttgaaagtgactttgaccttgtatagaaaggtacatgtagaccacgagaagcgaagtttggttcttccattactggctctaattccacatctctgcctgggctcctggctggcctcctttattgagttaaacagaggaagtttccatttaacaagaaaaagaatgtttaaggcctcagaccagctaggagtgcatcttccagatcctctgaaagtcctgagtaaccaggccattgcttttggttcagagagagttgaattctttactcagttactctcaggaggtgacatctctgctttccctgtccaggtatgtcatcaccaacccgccctatgagtttgagctcgtgccgacggacctgatcttctgcttaatgcagtttgaccacaatgccggccagtcccgggccagcctgtcccattcctcccactcgtcgcagtcctccagcaagaagagctcctctgttcactccatcccatccacagcaaaccgacagaaccggcccaagtccagggagtcccgggacaaacagaagtacgtgcaggaagagcggctttgatatgtgtatccaccgccactgtgtgaaactgtatctgccactcatttccccagttggtgtttccaacaaagtaactttccctgttttcccctgtagtccccccctttttttttacacatatttgcatatgtatgatagtgtgcatgtggttgtcatttttatttcaccaccataaaacccttgagcacaacagcaaataagcagacggrccaaaagttatttatgattctgggggaaaaataacccaaaggcatgctccagacataaatagctcactgcaggaacgagttcacagattagaagggagcacttgtgatcaacgtcagttaggcagagcaagtttatttaatgtaaaagaaaagttgattctgatttatcaggattatcagggtgctttgggttttgattttgttgttgttgttgttttcctttctttctttttttatacacacaataagttagcacatgtttatttgaaacaagcaacmaaacagcaatgaaaacatattgattgtttccagtctctgggccgaagtattgcgaagcatttgaaaagctttcacgatttgtgtagatgattatgaaggacctgcttgttgcaagagaacatcagtgatttttttagttactcaccaaggccttttgtcccagagccagttccctctgggagttcttatgaacatttctcaccttaatatggaggagagaatagtattccaatcatggatgtatcaaattctagtcatttagtttaagtgaaaagaggtttgattgcatattaaattgttattctgtctccttatgttgccatatgaatagctattttttttctttcacttttgacatttgggatgaaaagccatatgtatcataaatatcagatgtaagtcattaaaaactgccttcctgggacttttacatcttttaaaaggtgaattacttaccttatgtacagaataaataatgctcaggaaagagcaagtatttttccatgcattctcaggggatctttttactcccctttgtttgattagttagggccccaatgccaggtaggaggaagggctggggcaatggtagagtgagaggaagacaaacccagctgcagatcatgcttttctaggagccgacatgctaaataaattagaatgtaggaggatcagccacagttgactcaacaaagacaaaagccagccaccaccttcaactgttggcacagctgtgcggtgctggctgtcccaatgcagaaagctggtgggaaggaattcctcatcatcactttctttaatgtagccaatttaggcagggtaatgacggcaatagagagctgctccttgtcattatgagacgtgggataagaagagtgcaacagtgagccaaacacattttggtatagttatttttttcttcttttgttttctttcttttttaacacttagtaagcatgagaggagaggtagaaaaatacccttttttcaacatatagttgtcagatgctttgtgcatgcaaatcatgctttaggcagtgcggtatttcttaaaaactggccaattcaccataaccaatttctcttatggatggactaggctggtatatacatatttgaaaagttttacttcaaagaattccatcgaatagaataggggtaaaagggaggaggaaaacatgtcacagctgtaccatctctaaaaaggtgtttttatggtgaatgttttggatttagattttggatcccccgtcccctcaagcatgatagttttggatatttgcttgctgtgtgaattgacaagcacttttactgacaaatggtgaggctcagtcagaacctccaccctcccccacaccaaagacaggggcagcgtagtattcaaaccagtattgtggtggggaataattgtatacatgtaaattatcaagccctatgagtggaagaattttttcaaattatttttgtcyctctatatattgatttatattatgtataactatctctttatataaactatatataattatatatatataactatataattatatatatataactatatatataactatatatatgtatcccctagtattggatcatgaagagctcttcatgcattctttgcaaaggaggttataaagttacgccctcagaacatttataactataagaatgtgccagttaaagtgctcaacaggaaatatgacagtttaaaagcattgtaaaactcacatagcttacttctctctctaaagtgcaacaaggatgaatagaatgggccaaggtatgacaattaatggttctgcatgacctagccactgctgggggttttcttctataacgttgtccttgtgaaaacttttgtgaaattaaaaaaaaaggagttacaaattttattctgttattggtttgtttatttttatttatattgttctgtttgtggttttatttattttgttttgcttttccccccctcccctttccctctccttttcccttccttcttctcttccttccttcttccactttctaaattgctcagcgcaatgaggctgtgctgctgctatcgctagattccttagagtttgttttggtgttcttgggtgtggggttgggtaatttggggggaacttctctccatctggcttgccttttaatctgcacgtggcctccctgcccaccctggtaccttgctccaagtccgaaagcattttcctatcaagaaacccagcttccttcacttcccccattgccaccccccaatcccagtmcccccatcggtctgttcacatctctgtgttcatcttggcaagacctactcaatcaagtgatgatgccagttgataaacttccctggaaaacatttacagctattccatttggcaaacttgcttctctgtcaatatttcatcctcctttaaaccaggagggttattaatggcaaaagcattggtcttctttatgcttgatcagtatgactcaaattaaaagtgttctgctgtgtatatcaactcartagcccacacccagttatctgggagctgatggttcagtcactgtattacccaaatctttcctgccagctgcctttcagacatttgttaaatcccaaccagagaccgggcagatagagagaagtaaatctgaagtgcgttttatatacagtctgttagcaactccaatgagatgatattgtgatgggaatggaatgggaacagactatgataagagatggaattttgaggttttcctggactttgggcacacagtcatgccccagtggtagataattgagaattcaccatatttgactaatgataaatttgatgatggagaaggatcattactacttcaattttatttgccaaaattactatattatactttccttaatagagtgaagagtcccctccattgttttctatttgactccaaacttccmcttcctctttcagtagaacatctgcttacttaggaagtaggcatacaagtttcttattattatatctcttcctgttcactgcctcccgcaaaaaaaaaaaaaaaaaaacaaggaagtaagggtagaaagtgagagttctttgaaaataaagtatatacatttaaaaagttaggaactctgttatctgcaccattctagaagagaagaaatttgtaagccatttagtccaacttgctttgggctttgaaaggggtgaacaataagtaggctggtaaaccagaaggcacggtgaagccttctcagtctcaacacttgggtgatcgtggcatcatcagtgtccctaaagtctgctacccaggttcttcccaaagccagttcaaatggatggagaaagctggactcttatacacacagttaaacttctgccacaattgggagaggtttcaaattctgttctgaatattaaagattatgacccagaaccttaccatcggtgctcaataaatatttgatataaattgactttacacatttttatacctttaaccattttctatattacccttgtcctcttggtttgatttttttaaaaaaatatgagtgcctctacatgccttatgatgctgctgtgttggtggcactttctcaagctggtcacatggcttctgagaaaggggaatagccctgtaagctcaatgagtagagacactgagtatgcctcttggcagcatcatcaagatcccagatgaccagaaaaagcttttgtctggctcttctgcagcatgggaaaagcctaaaggtgtctgcatcccaatagagacaattaaatcaacctgccaggttcctatagcaacaggctccttgaaggagaaagaggagagtacagaaactccagggcctgtggaagtcaagacagggtaaaaatcaatttctcaatcagcttctttcagcccatccctgctttgtcacaatatgataaagaagtagctgtgggcacctgtcactacactggctgactgtctcccatgcaagattgcatgcccattgcaaccattggaggtgagagggattatccgaaagggattagtgaagaatctgtcctcagggtgttggctggaccaagggccacagaggagggctgggagagcagtttgctcaaagaatggcagcatcagactttcagttaaaagagacagagtcatggtagccaattgcaaagaagtgagaaggtttttcataaacggtaattgcttttgttctggtacaaataatttgtatctctatgaaataagcatactttgctcacagagaggagaggaggtagtatgtgtgggtggggacrgaggaggcatcagggtttgctgggcagaggaagtgtgccaggctgcctatcacaagcgcgggacaggaaaccacacagcattacccttgaaggtcgaagctccttgttagcccttactgttctccacggttgtctctctccaaacagcatcttttctttttgagccttttctctctcaacctcagcttgtggtgtagtgagaagagggccaattattccaaatgcttttgctgtatcattgtctccccttttctgcgatcttctcaagggagtactgtgaaaaggctaaatcccatggcactgacaacccacagagccaacagagaagctcaattatcacagtgcagcctgtttcttcctctgctggtggcagctcagtcagcccagctmtggggcccttccctgcaagagcccattcctccagggtgacctgcagccctgtggctggaggaggttttgacccttattttaaaccctgtgatctcagtgatgaaactagaaatgcaagaaacagatggctctcagatgggataggatgcctggtgagtcaaagccagtatttcagaggcacagagtcaccctgggaggggaaaaaccctaagctccccagaaataacaccaggttacctcttcctctcctttaccttccaaatgaagatgaccaaccaaatccccctctgtcacctctgctgccacaatccatgttcttcaggatacaccccgatatacacacccctgttctctacccccagaatctctgctgaagggcatcatttgtcatcacattcaagaggtacgacccatgcttacatcatcctttagtactgatagtactcaggctagtactaaacttactctaaaagctaacgcttcagcaattgccttgggccaggcattctcatgagcactctttagttacctatacaaactcaatcctcacaacagcttcagatggagatgctgtgtctccatttgaaagacacagaatctgagagacactagagtctgtgaagttagccactgtgatataatgcccgctgatattattccaaatactcataaccttaacaactcacatttacttaccatgtatctggacctgtgtaagtgcttcaagggtactggcttcatttatctaaacaacactattaggaagtttgtatcatcagccctattttacagaaaaggaatgaagctaagataaatttgctaataacttgttcagagccatgcaactagtacgtgagctagatctgcttaactttcacctcctgccctgcgctgtctccttagcccgcatctccttgcttcttcatggtggacagctcatagcatagctggtcttgataggtgacatctgccaatggcagtggcaattgctctaccagcatctctctgcagttgttttccagagtttatcttgtcccactagccccctcccagccacagactgaaatgactcttctttcctaactccacgaactcctgacatgtcacacattgtactcagagcactgacaacaggcatctcatccttaagaagcttattaagaaataaggctatttttctctggcagcgaggaagccctcccaccccgatcaattgcccttctcatcttagagatgaaaataaagcccctggaaatctttctggtatgtgagatgaaacagggagtggagataaagtcagggatttggatttatccttgtcatggcagcattcattagagctgcttccctgagtcctcttcctcgtggtcaattttgtagccacccattggcattgtttcttcttcagaaggcaagattcaatacatcaaattatcattgtcctacttgcagcactctccatggatgctgaatggctggcgatcattgaaatgtgtgttccttggaagcatgttgggagaatctgttcgtaaaatacctttgcaccagacattttagtaaaacgcccagagcattcatacagttccgtttcctgaacatcctacataaccaagtctccaaaaacacacacatttatatcttaggaggcacccaaattaaacagctgtttctcaggcataaggaagacctcaactcctcaccacaatgtgtgttaacacaactcactccttgtgttgaggcagcatggccaaaacatgggctactctgcttagatttttttttttaatggcaagaaatgtaaaaggaaagagagaagtttaaatgaggaaataatgctctctttcttacagacagcagaaggaaattgatattctctctgccgcgaaaggtcaaaatgccaactttgaattgaactgtaaagactaaattccgaacaattattctctkcagcagttgtaaaaatttcagcaaattgcagctgtcttaggtctttcacccaaaagacctactcatttccatcagctgagttcactcttccaacctggcatgtccaacctagcactaaatccctttgcaaagtcagtctgcataacagcatggccaaaascgagggcagctcaggcaacctgagcacaaacaccaggctcaacctctctgaaaatcatctttacacataaaccsctggaaaaagtcgtagtgtgaaattgtttcagcggcctggcaaagcttttaaaacatgataaccatcacactttactcctctctgaaaggttagtttaatcgtagatcacaaaaaattggtttccacaaatgcataatggttcatctatgtcacacttgaactaaatggttttttaaatggagctgaaattattttgatgtgtacacagtcccggatttctatacaaccttttttaaccagcccatcaggaaccttgcctctaaagcctcattaataattcagatgtgctgatgactttaaaagatctatggaattgaagcttagggaaaaaaaaaaaactctgcttgacaaaaagataaatgaatgtagaaagaagctgtaggagtctggcaagctgtagatcatctcagaacagattgtaactttatcattctgtcagggggaataatttaaagcacttaatcagttagcttcactgtgaggatgtagcattatgaattcctatcgtccaatctgttcaaatcaaagtgaacttaattataataggtgagtgagccagagcaggagagggggtggggagaacgaggcaagaggcagcaagtttcctgtggggtaaactgagctgccgcattaaactggggcgaggctttgactcaggcatatcccagctccagtgacagccctcctcgacattgacagctcagggcacttgaaatagcagaagtaggaactgaggagaaacaagcagagtggtcatgaactgatcatagataatttataaatcattagccaaacatgcacataccccacccccaacgccccctatcaaaccaggtgagcagttttcactaatgtgtccattcaggaccactgacaaggcagttacaaattgttctggtaagcagaaaaagcagctacagaggccattgtctctatagcagtggacgtgcttgatagcttttaccctttttctttttcttttctttccctaagccactaaagtgaggcatatgattcccaagttagaatgtcctatttgcccagtcctttcctatctatacacatggccaatttcccagaaaatttcaatcctagaaagaggtggggatgagggttgagtcttgtaaaatagctttgcactgctaagaggatgctagaccattttcattctcaccccagcccccaaacgccctgactcagcattctctctcagccatttctgtatttagggtggaaatgaaatgccaagacttcattgagctcccttgtcgacagcttgggttattatagtcagttaagatattgccacttggaactctattcataactttataccaacacagagttttctttcttgaaataaaagccacctcaaaatcctctttaaaacattggtcgctattctgattttcatagatttttggccagcaaaatctatgggtttagtttagaccccccaaagtggctacaaatgaaacaggagagtggtatagttgagacatggctttaagtgtgtgtattataagcaaagccaagaaaaggctgggaggtggtgattctgtgtaagattctggatcactcgctctgcagcaagggtgatggwgcccttccgttccactcaaatcaatggatgcacacatctctcctcaggcacaatgtctgtacccaatggctgatatatgcaacatcccctccccaccaaaccttttctggccatgaaattaactccaagggacattgccagagtccattctccaatccctccttagcctctgaggtccgcccatggtgcctatgagtcccagtggcacattttgttcatcacttgctacaggaagcagaggtatatttcaggttctggggtcctccctacactgcactgtctctcttagcaattactcactgtcggcttctatcgattacctttttgcgtttttcaatgaactttccaaaggctttaccctaggactaattaaacttctcatttctccttcttgttctctatccattttgccctttagcagaaaagaaatggtttacagatgaaccggataatgcctatcccagaaacattcaaatcaagcccatgagtacccacatggctaaccagatcaaccaatataaatccacaagcagcttgattccaccaatcagagaagttgaagatgaatgttgactcccaggagaccagaactatttttttaaagcctgacaaacttcataaatggtgatgtgacttttcttcttacatgctgaatcactggtggaaacgttaggataagcaagaattgccagaaaataaagtagacagatctttctctttgtctgccttgaatattgcttccatgtattttggaaaagaaaatgatttcatttataaatgaacatactaaaatagtcatgtatagcctctagcattttaaattatttttatttattagaaagaaaatatattttttcttttcattgtcaaatatcttccctatatctaaacaatgcaaaatctaaatgaataagtggtcagactccttaatgtgtttttctcttctttctctctttttctttgaggagaatgatggtcaccaccacaattaattgtaattaagggaaatgaattattaaaacaattttaaaatggccaatgatgtatacatgtattttagtaaatccagaaaagaagactaaggggacaggtgaatacctgctcctcgcctggatgggtgtgtattttgatctgcattgacaccagctcttaataaatggaaacttatttattttcacagttgaaagtcatatttttgtagttctagttttcattctgtagttctcacccctttgttcatatttttaaagggaagaccttctgctgcttttctacaattggcagatcaggtttgtctggccaactaaggacaccaggagggttgtgggcacacctgggatgtggaagctgaggaccagatgcacacaaggcattgctctgtttgctgttctagtggtggagactcctacgtgctgttatgcttctcattttatatttccaaaccacctgagcgagtaatgtcaacttcgggagggtctggtggactttctccccactccccaagtctcagagcttttagcctggaagtttgtaaaactgattagtagttttactttaccataggatgtgagagggcagtcattcttctcactgagtttttgtttaaaaaccaggaaatttctacaatcatggagacagattttaatttgcatgctctcctttatttagttgctggggccaaacacatgaacttgttacaacaatttaaaaataataataacaaaaggaaagcaacgaatgcacttcatatagactgttagaaaaggcctttgaaaattaccagcagtgaaatcaaataaattagccactttaaactgcggtcaaaagatttttctagccatcagatgcaattacgatgtctcagagctctgctatcgcttgcatgctcggtgtacagtctcccggcaactgttttgttccaatcaacttagcaagtctttcaactttaaaattatcaatctttgatatgatcatcaaggtctctggagaagcatggatgtaatagtgatttctattttcttaaaaaatgtaaactgtggacacttaatggaaccaagctaaccaaagtatctccccgaagtttcatgatatctagtccattaactctttgggccatgacctgtggtacctagttatggtagtgcaaatcagatcagagcaaagcaatgagatcatcatgaagacatatgtccactaagtactccaattaccagcgtaggcaaaatgagcttccacctctgtccactccctgcagagccaatatagtcgtgcttccacctcgtaggcattgtcctgcagtgatttgtcggactgtggttactctgtcgtcacattttgtagaattagttctataaaagtattgtgaatacaatgtatgtccaattggattgtttaaaaactacttataattaatcactagcctactcagcagactaaaatgatgtcaacagtctatattcaggcttataaacatttcttggtttccaacagaagtcaaatgtgtttgtggggagaacgttttgctaggattttgacaactttcctgaaagctaggccttttttacataatgattttgcattggggtcaccttagtatattcacgtcaatccacgctcttctttccttcgtgaaccatagtgggctcttcactcctgctcgtaataaccacctccaaatttgttagagtgatttggtctcctctggcaggctgtggtggccacataaaggatcttccattagagggacacaggacacaaagctccattcccatgaccctctcttccctgtgtcacccctaacaaggcaatctggaagcagaaatgcaaactccagccccaccacacatccaccgatgcatttgtggctagaaattttaatctaaactttttttaaaaaaaatcataatagttaggatagtttcctatagcaaagggctccttgattcataagcacctcccccccaaaaaaaccaaattggtaaaaattcattttcttttaaatagagcaataagttcatactgtgttgccgttgtaataatgaattgttctggactagaaaacaaaatgaggcattttgttaagggggtaggaaaatgactgattgttgggccctttggcaaaagctggtgcctggtaagtagaaacgaaatggaaacagaaataacatttgtgaaatcactggagggctcaagcaaatgccagagcttctccctggcttgttcctacttgttgagctctttggccctgagtcccatccatctccactgcaacagtctgtctttctgcctacatccgcctgagaccaaggagggtctttggtacagtccacattatgaggctctgatttcctatcccagtttagggctccagaaaagccattctcccaaactaatgattcttgggtgctgtgggtcaccaacaggctgtttacaaagcagaaaatatcatcaccatcataacctttctccttgagaaaacttttatttttgtctaagcaattttatattttagaatatcatcttgaaccattataaaacaccttaaataaaagtgattgtgactaaggcacgttggagaacattccaatctttcctcccaagggttctggcaccttatgatgtactttgtaaaaaaattgattgaagattttaaataaacaggaaattagaagtgttagggttagataaaggaaaagtgaaaaagcataagaaatttgggactttttcatgttgaaaggagaaaaagcacaagttccctagttaccatttaatatgagggtgcaagagccacatttacaaacaacaaacttgatctttaaaaatgtttttaaaactctctgagtctcagtgacttcatttgtaaatgagagtgattcatctagatgactctaaggtctctttcaggtcccaggggacgtgatctaagttaggagtgggaacatgggagtggctgcttctccttggctaagcccatgcagactattgtgtccaggactggaataaaggtcctttttgctgcatcacccaggcaacactcccagccttactcaggagtggtgaacattttctgctctggacatagaataggtaggttcattcctggtcttttcactttagattctctttaggttcaagatgcagatttctcaatttggacacacctgcatcacgttggtcaaattttgctgcctgtttctagggttttcttctcagtttcatccctgccttcccttttttgttgtttttttttggttcaaggcccagcttcagttaatcccttcatctctatgccatgtctccaattcctagtatgtaactagaggttcaagagaccccaaattcctgccattttccccatttatgtttccccatgtgaatcttcaggaagtaaccagtcttccttctcacttcatttcctgtcctctgtttatttggttattttctttcattaataaactaaccatctcttagctacttacattcacaaatgtaattttaatctattgtgtttcattgtgaaagagaatctcattgaaggaaggaaggaagaaattgaggaataaaggtaggaagggagagaaacaaagactatccaaccaattgactgagatgtgagccggcttgactcctaggagactaagtagatccattcagcttgaacactgagttccagggcagaatctgtccattttctgttttgttcttacttgctgcttttggaatggtggtaaagccaccagtcaccatgagccttgaaaggaccttcactaatgaggacttgactcaccctctttaaaaagcaaaagaaacagaatttacttacaatcttctggtaaattacctttctgatcctctccttattcccaaaaggcaatttttttaatccagcagagatgatttagcatataaatcccaggtcatttgaggaggtgatgacgctatttggatttatttatgagacagtagtaattataaatgattcctaggcagtttgtactagtttggtcatattggttgtttaagtggagtctcttctgattgtttgtttccaataaagtatcagttgttaataatttcaagatttccataaaaataagaaaacttggaaaacatttttaattttatttcttaagagaccacagagcctaattttcaatttttatggtaagcttgcttaaaacatgtataaaaagaagcctacatgctcaaaggcagaggcacctttagccctacaacagttggaagctccatgatatcacagccccacatggatagattggagaaagaattctgacttagaccacctgtagcagaccttcctcttttggcatatttttttaatcacaaaaaggacctgagactccctatctaaagataagccaaacttggggtatacattaagaatctgggaagaaagaaaaaaaagaaaaagatataataagcagtattttaaaataccatgagttatgggcatgcatatggtacaaagagtagttctttgggttgaaagaaagaagagtttgcattgaactgcgtaggctggcaagaatgcagaggtatacaatgtttgatgggctttggaggcatttcaatagtaaatgggtgacaggactggaaagatgtggaatatgagggttttccagggagatgggacttaatgggccatgatgtatttgtaggaatgtgatttcaatagattgactattttgtctactgtgataagtttgtgtaggggaactgaggaaaactgagatgagacttcatggaaggggctacaaagtacagtctaaaggcctagataaagtttgaaacttgatttagaaagtcatgaaaagccactcagagttttaagcaaagagtgatggggcagcaatggctgtgcatttttcaggttgaaagtagtgagatgtcagttcttcctggaagatatcatgagaatgcacacaaaactgaacattttctcagcagcaaggagtgctaaagggtgcacactccaagtcaacaactcaccgtgtgcagcaccttcctcacacattttgctttgctttctgtcacaggaccatcagacgtagaacgtcctgactctcctgaattactagaatgtcagcaacaaactcacaaagtannnnnnnnnnnnnnnnnnnncagcgggtccttcagcccgtggtgaagacagcaacaaactcacaaagtagattagagggtaggaatagatacataaatttttaaaaacctgccaatcatactgttttctagacagtaatataataagaacatgaggcaggacatccacaaatagtagagaataattaatagtccagaactgccaaataggaattccccttatgaaaacacccttgcagctaatcaggtagcccttgtttagaaaccaattagcactcataaaatatttgtacaaggagtgagtgggggagaaatgagcacaatatgggttctgccatcaatcagcttataatacaactaaagaaagaaaacatgctcaaagcaccattagagaaagggtgagccctaatgacatagtttcacattcaatatggtaggagttgaaacaagggagaaatgctgtggtttgaagtggttcaacaaggtaggatttctagagaaaggggggtttaggagttagataagtagaggatcagcattctaggtatgaaggcaggattatctggcatgtggcagggtgaatgatgttaatcagtaactgctaattgatatttactgagcagctgctgtgtcctcacgatggtaagactattagaggaagacagcccacctgcctaactgggaacacaaggcacacatatattggaaagatcatgttgcacaaaacaggtgttcaataaataatttttgaataaatgtgaacactgaatagcaaataaatgttatagatcgtaatagttgtagaagattggttgggattgtagggactggatgtggggcaatggctgtgggtctagagtatattcattgt

SEQ ID NO: 6845 - DNA, 42969 bp, Homo sapiens
aaaataagctacttcctaatgtgcctttttgaagcgccatttccaaaaaaaatttttagtcatttcaaaatactctccaacacaaatagcttttaggtttctatacacttatcagctgcaacgaaaaaatgccagaaataacttaggttttttcatataacttgtcttgcaagctctaagccatatttacaacatactgagcagtaaaagctacagatattacatttgtaaatgttagtttctgtttaggacttgtgctttcttttgcctccaataaactttctttttaaacttgcctttgatacaaagtttttgttgcctgagcaatttttttttcacttaatatgtaagcatttctagacagcatcactgtgaaagttaattttatgtttcaacttgactgggccatggggtgcacagatatttggtcaaacattattctgggtgtgtctgtgagcatgtttctggaggagattgacatttgaataggtagactgagaaaagcagattgccctccctaatgtgggtgggcctcatccaatcagttgaaggcctgaacagaaagctgactatcccctgagaaagggaagattcctttgcctgactgcctttgatctggaacatcagcttttccctgcctttggactcaaattgaaatgtcagctctttcttgagccagcctacctggaactacaccatcagcaattctggttctcgggcctttagactcagaccggaatgacaccatcagctgccctggatctccagcttgctgactgcagatcttaggacttgtcagcctccataatcacttgagctaattccttaaaataaatctctctctcgctgtcactctacacacacacacacaaacacgttgattctttttctctggagaatcctaataccatcatttattctatttgtttttcaaaaatcctgttgaaatttcagtcctcttctttacatttaagtctatcatcatgcatcttttccctataccagtcataattcttcctttgatttctttcataatggctccttaaattgtattttttttaaaaaatcaggcacactttacatcttaaagaggtaggactactctttattttcacaatcaagcatgttcttatgcaaatttttgtaaatacaagcctacatctgtctcattttccaatttttaatagaaacatgagtgtaaaaaaatttcactttcatttacctgcacttcaaaagaaaactaatattgcaagcaggggcagattaccccagcacagaaagtggacaaatttttatgatatcaggtcagtaacaagagtttctgggggaaggtaagaagatgaggaaggaatcactgtgagctgtgagcagctccctggattggtgatgtcctatggagtgccactagagttctaggtttagcaattaacccctctggtctgctttatgagggcttctgggaaaggctgggcagatggttcactgcacaaacttccagatatgtgatgaatagggcaactgtaatatcagcctggagttaaggcatcttcttttagtctccccaagagctcctataagtgtcccaccatgtgggacacagaggatggttctgtttcagttgctggtgtatcacactagtgcaccatgtgcacagttcagtgaatttctggccaggtgattaaataatacatccaacagtgctacaattctgttgatatgggaacaaagtcaaacaagaggccatgagttcatttattcaatcagttacttttggctgagtaccacctactttgtgccagctctggatataccctcaacaccctagatctctgtctcatgtatgttcctcttccacttccatgtgtcaaaatttaattcaagcattactccctcaaggaaactgccattttttcccttcagatctcccaaacttccctctcaatctgggagataaatctctgctttgtgctcccaatacatctggctaaatcattttataatatggttttcttgcctggctccccctcggccttaagctgcaagaggacaggggttgggtggagcatttttcagttcactcaggaggggtgaatggaataaacttaggataaggccaaagactaatcaagcacacacccaagcccacacacagcccagaaaagagagctcttctgggaggatgagaagggctcaatgattgcgttggatgtgaaaaaccatcctctttttctaggcttcccgcagaagaagaaatgactcaagagccatcctatctgagcccaggacttctccttgatataatgggaataacaatatctctctcattggctattgtaaggatcaaatcagataactgatgtaaaatgcttatcataattatacagtactttttttttttttttgagacggagtttcactcttgttgcccaggctggagtgtaatggtgcaatctctgctcactgcaacctctgcctcccaggttcaagaaattctactgcctcagcctcccaagtagctaggatttttaagagacaggtctcattctgtcacccacaccagggtgcagtggtgcaatccatagctcattgtataataacatggaactcctgggctcaagggatcctcccacctcagcctccccagtaattcagactacaggtgtgtgccaccacttctggctaatttattttttgtagagacagggtctcactttgttgcccacgctagtcgtgaattggcttcaagtgattctcctgcctcagcctcccaaagtgctgggattacaggtgtgagccactgctaccagtcttaaacagtactattatcttccagtcagaaatttctatggtcttcttcaaggtgcagatacttgttgccacagccatcccttcaggccaacttctgacccctcttccctgttcatctcccctattctgtcttgtctttttcttctctccacttctctctcccctcttccacttctttcctttccttccttctcccttcctacttctcctttcctctactctccttctctcctctctggtctcccttctcttcttttctcttcttctcctcctccctcccaaacaactctagtctctgcttgctttgctcaggaagcagtacactaggcaagaactgaaacaaattgcctccatccacatgtagttctaccactaataatgccttagttttctcagatataaaaaatggatattgattttaaaaacaaaataacaaaaagtaaaaaacagtacttctgcaagtctagatctgaaaacagtaataaaacaaaaataaaaaacagcatttaacacacagctgctttgaaaataagatacatacataagtacttagcaaattcgctggccctcagtatagtgctaaatactgattgttatctattcctattctttcttacctcttctcttcctcttcacccaggcttagggtgcagagaagaaaagaagtttatatggtacagtccacagcaaaagttctgtgactttcaaagaagcccactttagtctcatactagcatcagataattaaacagtctcctagccacagcaattaggcaagaaaaagaaataaaagacatccaaattggaaaggaggaactcaaatcattactgtttgcagacaacatgatcttatacatggaaaaccctaaaggctcccccaaaaaaactccaccatttaaaactagcaagtaaattcagtgaagttgcaggatacaaaattgacatacaaaaaaacagtagcattctgtatgctaatagggaactatctaaaaagatcaagaaaacaattccatttacaatagctacaaaaaaagatacctaggaataaacttaaccaagaaggtgaaagatctgtacaataaaaaaaattaaggaaataaagatgacacaaataagtgaaaagatatcccatgttcatgaactgaaataatattgttgaagtagacatactatccagaacgatctacagattccatgcaatccctatgaaaataccaatgacattcctcacagaaatattttttaaaatcctgaagtttgtgtggaaccacgaaagtcctcaaacagcaagagcagtcctgagcaaaaagagcaaagctggagatatcacaaagcctgacttaaaaatatgctacaaagctatagtacccaaaacagcatggtactggcagaaaaacagacacatagaccaataatgtaacagaatagagagaccaaaaataaatgcatgcacctatagccaactgattggtattgagggagggattgagggaggaggatggggagaggttggtcaacaggtacaaagttagataggaggaataagttctgatgttgtattgcacacaaggtgactatggttaacagtaaggtattgtttatatatcacgaaacagctagaagagttttttttaatgttatcaccaaaaatgcatgaggtgatgaatatgctaattaccttgatttgttcattatacaacatatacatgtatcagaacatgaaattgtaccctataaatatgtataattacaatgtgtcaactaaaaatgaaaaaataattgaactatcaccttattcaccttcaccacacattggtcatatttctgaccaatctagattgttatggtcataggtgatgatgcctgtgtgaccctgcaaaattaacactagatattctcatgaaaaacaaagcgtttgcttcatatgaccttattctatttgcagaagtaatattctcttctactcccacttaggaaatatcaagtactggaaaaggcaaaatatctcttctttacaaaagttaaccaagaagagaattgcatgctactgcatggaacagatccttcctcccttctgagaccgacaagaaaatcgcataaaggagtactagttaaggtgtggtccatagacgagagactatctgtgaactgtttgtgatcagtaaataagagaaattgatgggtgaagcatgtgggtgggctcctgtaatcacagctaggagagaggattgcttgcgttagagtccatcctggtcaataacgagatactctctctaaaaacaaaacaaaacgaaacgaaaactcagcaggccaccaactaggatactccctaggtcaaatgaccgagcctctaattctgtgattgttgttgctgtgcgcacgttaataaaacaaacaaacaaacaaaaagtgaagatgtttagaaagtttacagtactttggcattgtcctgataatccaagctcctgatcagcagattctattcagccaggtatagggcagttcgagtgttgtcaaatttgtgattcccatgaggccaggctgcttactggtaatgcataaaggaccacatcctggttcgcgaagagtttgggggtagaggaaaaggagggagaaactgatccttcatcacaggtagtttgagagcactgatgtaaactatagtcacacttttgtagtataattgattattatcctcaatagatcatttacactaagtcggaaaaaagtggaaacatcagatatgtgggatatgcgtcaccttgtacatttctcagctggaaaagtgtaaaacatctcaattttgcacctcccttttcaaacatgtctttggctaaatcaatgttggctctaaccgctcgtcctagagcgagtcccgccatcttgtggttgaagatgttgactgccacagagaatagcgggctttgacatcaacagttctgattgggtaaaaagaccctcgtcttggggtagttctcttttgaagtcctagagtccgtcacacacaaacgccttcttcccggtaagtccattgtaaacaacggaatggactttagggaaaggaaaggaaaacgtgttctttaagactctttaaatagcgttttcacccattagcagaattctctgattcatgagcagcactaagtagataccgtgtgcgtgcattttgaatgaattcatttctacactattttayaggagtattgaatagttgggaattggaacccctccagggggaaccaaacattgtcgttcagaagaagacaaagagagattgaaatgaagctgttgatttcaacacacaaattctggtggtagatgaaagcaaagcaagtaagtttctccgaatccctagtcaactggaggtagagacggactgcgcaggttaactacagctcccagcatgcctgaggggcgggctcagcggctgcgcagactggcgcgcgcggacggtcatgggacttcagcatggcggtgtttgcagatttggacctgcgagcgggttctgacctgaaggctctgcgcggacttgtggagacagccgctcaccgtgagttgccccggcttcgcgcctggccaacctcatgccacccagaccatcgggccacactccggagtaactatttcctgatgggtctcggtcaggtctcccagagtctctgggatgtccctggaggctgatgcccgccgaggtgttggtctgattcctagcgcgggaaactcgaaggttctgggggttgttatctggttcagctactttcctgcaatgagggaactgaggcctaacgagggcgagggatttgcataggggcctacagctgataggtgacagaagccggagctggactccaagggtacaatcttctaagcttctaagttactatcagcccttcctgattctcacgacagtgtctaaacaaatactggaatttggggcacggacaggaagcgccgtggaggctcggagaaggaggaggacgtgggagtgttggaacaatactatctagacagagagagggtaggtgggggcagaggacatacacagcggagtggaggtggaggaggaggatagcatggcccaaatcgaagggaagcgaaagccttgagagacgagaacctgttttaactattggagttagtcatgggttctgtattccgtagactgtaaagtgttggaatagagagattaaaaagaatcaagaggttcgtgtagtaacatctgctcctcagagacagttttcagctcattgtgagttctgattactgatactgttcagaggtggtgctagaaatgacaaccacttcttggcaaagtgaatcacaccacttttttattgttctctttatgaagtatccgtggcgaaatgactgtccctktccactgctgccactaaatgaacgttatctctgtggtactttgctcatcagcacgaagacgaaagtagacatgatgatctgggccatttggcgctaatgttctttgatcctgtaaaataagttttcctaggtgtagtttgtcgcaattattacctcctcaatgaggcttttcctgacgccatcccatttttgaataaatcatgagcttcctaagagaattgccatgtcttatccttttatttactgkgcttaacacgttcactctgcaggcaccagtacatggcagttactcagttaatgcttgtggaataaactgaacacattaaaaaaattaatacaaaaaagaaaagttaataatgatttctttagagaatttcccccagtttaaaatacacttggaagaggtgtggtaatatatgtacattgttagtggttatttgtttgtaaattaaatggaattcatggcatataaagttgcctcaacttacaagtcaaagacaaaggactgctctgctatttgatgagtctggaactaaatagtggacatttgcaaagaataggaaagacagagccctggttctcagtttctgatgtgatacaagaaaccaataataagcttcagaaatatactgtgtaaattaaaataccctaaagcctgattggggaagtaagtactcctaagctgccagatgaggagtagtctaggaaaaagttttgtggagaaacagatcctagttgacatttctgtagaacggtagggacattgtttagtagccaaaaggatatcctaaatgggtataacaaggaagtttagagcagatttgggagtgtggtaaagaagaatagggaggaggtgtggctggttgatttgactaactgggtgcaaggtgaagcccaaggtacaggcayacttgtgattttttttttgtttttaagggtaactttcttcagggagccttttgtgacccctacaccaggtttcactgtgctatgtacttccatagaatccttacttataaaaaacatgtatttatatacaatgacttgcttaattgccttatttgccttcgttctccaacagactaggctgtaaatttcttgtggagaaggattatattatttatcctgtatgctcaacaccagtttagggcttgtcaagtaatggatgctcagtaaatatttgagggaggaagggaagaaggaagttggacaaactgttgagagtttggcattgatatgtattttaatgttaatatcctttcatccccattggtatttttaaaaattaaagatgggagtcatgatttagatttttttttggtagcccaaatgtccagaacagtgctaactgatgaggataataaagcaagcccttgacctcaaggagctcccagtctgtcgatggtgtgcagcttaaaatgggaagcgggcagtggtgtgagggagttatcactccatttctccttaggaaaggagtctctgaaggaagtagaaggataaaaagcaaaagaaatgaacgggaataaaagtgacagtgataaagtaggaacttgatgggataaaaatgaatatagggtcatgaaagagaatgacatttgaaaaggagaagcacaaagttaagagtctttagtatcattttaataataattcataatggttaaacaaagacctgtgtgccaggcactgttctcaaacacctcatgtgtattatttcatttaaatttcatgacrgtgtatgaagaaagtgttgttattttcaccatttgacagatgaggaacctgaaacttcatgttaagtaacttgtaagtggtagtgcatagactttaaatcaggcagactgacactagagttcacattcataaccactcctcaaatgtcctcctactcttgacatctagactcaggatggacctgtgttacaggaaggagaggttgttatatttaacaaaagtgttcaatttttctttttcagttggctattcagttgttgctatcaatcatatcgttgactttaaggaaaagaaacaggtaaaataatatttctaaagttaataagttcataaataagtatttgtaattctgtttgtattggtaatttggaagctacagattagaatatttcttaaatgcacccctttgtgcactactacttttctattttatatagaaacagtcgagctgatgcatatttatacaatgatgatttttgtgaggtaatatgacatagtgttcaggattcttaaaggtgatttgaaattaagttacttttcactgttcaaaaagtgcattgttattggctggactgtaatcaaaatatttagtcctttttattctattgtcatgggcttattaactactttctctcttaaacattactaataagtatgtatatttctctttaggccaacaactgtatcctgtagattatttcagtctaaaaattagttttcattcttcctattcactgatgtttacagttgcttctctatttagctttctttttaaaaataatttttaaaagtttttttgaataccagaaatcaccttgctttytttttaaaaaaaatgcatattttttctgagaacacctcgtaatttttccattatgccttgtgctattaatggatacaatctgcagtaactatttatcgtttgttgtaggaaattgaaaaaccagtagctgtttctgaactcttcacaactttgccaattgtacaggtaggtgttttgttgtttacgaagcataatatctatttattcagttaaaaggtacctaattattgtgctattctctagcttgagctgcaccttactctgagtaccagtcttaacgttttcctcaaggctcagctcttcaggaaacattcttttactatcaattcagcattgctttgatgatcttctttcctgaagtcctacaatttttaaattatctcgttatgtagtttaagatatatacatctctttctgtgrctgtattgtaaattcctagagaacaaggactgggttttattgatcttcactatcccttatagccagtaccttttaatgaatactttccactggtaaaaaggaaaatcaattattgtcttttgtgcttttttgacatcatgtcttttttaaatagggaaaatcaagaccaattaaaattttaactagattaacaattattgtctcggatccatctcactgcaatgttttggtaagttaattatttttcttctstccttttggctttgtgagttgtattgattaatgttgaacaatgttgcattttgtcttccccattttacattttccctcgcccccgccaaaccatgacacctgcttgctctccttgtcctcagaattcacacagtgtaatatgtctgttccacttactcatggcacatgtgtagtgataccacaattaaagaatcccttggcaactgttactcattgaactcacgtgcaccagacttaaggtgggtgctggggggtattgccatgaataatagcacaatccttgaacttataaagcttaaagtttaattggcaaggcaagcactgaacaaataataattacaaatgtaaggaatgttccaaggtagggaagtggtaaataaaggatgctctgggagtatgtaacctgagtaagttgatattcaagctgggagacagaagagtcagtaaatgttaaataggtgacaagcagggagctaatgttcccagataggatggattatgcataggtcctgaagctaaggaaaacgtggtattttctgggaagtgaaacaaaacaatagggctaagcctagtgagccggttacatggcataaggttaaagatataaatttgggtgaggattccaagagcagttggaagcccttgaaggttttaactaagggagtgaaatgaggtttgaattacagagaatggattagagggagttaaggagggtacttaagaggcatccaggagggagaattgatgggatttattggttaattgggtgtaggatgattactccctaggtggcctgagcagccaggtaggtaatggtgtaccatttcctgagacggaccatacaaaccagcaggtttgggggcatcctgatgagttactgtgagagtttcaaaagagcccgtcaaaaaagatgtgcacagtggctcatgcctgtaatcccaacattttgggaggcctaggcaggcagatcacttgaggtcaggagttcaagaccagcctggtgaaagtggtgaaaccccatctctactaaaaacccaaaaattagcaggccgtgctggcgggtacctgtaatcccagctactcaagagtctgaggcaggagaatcacttgagccagagaggcagaggttgcagtgagatcacaccagtgtactctagcctgcgcaacagagccagacttcatttcaaaaaaaaaaagatgtggccttcagaagagtgatcccaattaaagatggtgctttggaagtggtcacctgcatgagtaattgaaatcacgggaatggatgagactccctggccaaagtgcattgtgggaagaagaggtttagtacagagtcctaaggaacttcactatttaatggtatgaaagaggatgagctaggattggagactgagaagggactaccctagaagtagaaggacagcaagcaaagggaaaacagaaaaggaggaatgaaaggtcagcagggtcagtatacctgtgtggtcaagcagacaggcaaaaaaaaaaaaagtctgtcagatttattgatgtgacagtccttggctgccttagcaaaaaccatttcaattgatataatagggatgtggaaaaatgcagactgtgctgctgactttgcttaagaaatttgactccataggagaatgggaggcgtagggtggttagtggataagaatctgctgcataaagagattttgtttcttaaatgagagaggtttgggtatgcctactatcaggggagagagaaagtgagattccctgagaaggtgaactgtttcatctttagctgggatggacatctccatcatataatagaagtaattaaggaaagactccctttataacagttactattgctaaagaaattgtgaaaagccaacttttggtgtcttacacacctgcaaggcagcattctggttccttaggcccaggtagacataaatggagctgacttttgataggttgtaaagactttcatttactcttgttaccatgaacatcttggtggttcctttttgtctccttcacaagtgggagtgggcaggtaaaggagagcaaatcccagatcctggctatttctaagacctggaccctgccctgcctcagcacaagtctgcctagcaggccctcttacctgctcaagcacagcacctgctgcttctcttataccctcctaacttttattatactttttctttttacaaaataagagattgcaaaattttagaagatgccaacaagcagagaagaaataccacactttattccataattcagagattgtatgtttgtgtataaatgtatttttttctagtcttttcatatacagactcacacaatttaggtttaagatgatattttctttcttcttcttcattttttttttttgagatgaggtctcactttgttgtccaggcttgagtgcagtggcatgaacgcggctcactgcagcctcaacctatgggactcaagagacccttctgcttcaggcccctcaagtgtctgggacatatgtgtgtaccaccayacccagctaatttttaaatttttttgcagtgatggagtctcacaatgtttcccaggctagtctcaaactcctgggctcaggcagtcctcccacgtcggcctcccaaagtgctgggtttacaggcataagccatcatacctagcctaatttgatttttacatctcagacacaatgtttggtacatggttaaagtataacaaatgtaggaaggaaggagaatgattggtgagatggatatttgtatctaaattctcatgtgcttatgtcttttctgccaacatacaaagcaaagcagaaatgtcagtagtatattagaagtgttccatgattgaaatataagtgtgagtcaatcactagacagaatttcatgtgtatggattttgttattgtatgataacattctttttgtattcctagagagcaacttcttcaagggcccggctctatgatgttgttgcagtttttccaaagacagaaaagctttttcatgtgagtaacagakaagtaaaagaaagtagtgtatatatgttatataagaagtctgatgttctgactttgtagatgacctgttttgactcatctggaaacttttaggatttgttatttatacttggagtttctagaaccccataagggtatatataactggtatttgtggtttttttgttttgttttgtttttttcatgctgctaacctttgataggctcagtttgaaagagcccgttttcttctgtttctttatctctgcttcattcattcaaaacttctcttagctaagtgttgatccatctctttctagctctaaaatcacttcagtttctgcccttcttaccatttgctgctccttgggagggaaaggagcaaggttctattgtagcataaaagtttctacctctgtttcggcttcctcctttgcatgctctgtggtatagcccatatgccagcatgattgtctcagcttttagtctttcagaaattcttcaaaatcagccatttgctagtataatccctcttcttatcttgagagcctttatgaattgaatttcttttgtacttgtaaaattgccatttcattgcctttgcagaagggaaaggagcttaacgtgtatgcttgtttgtcaccttgagacagaacaccctgggcattttaaatgattacagtaaggaaaaaacaactgtaatgcattttactgtgtaaaatgaggtatagctacttttagaaagttcaaaagttacctttatctaggttcactaaagtgtccatccgccaaaagtataaaatgaggtatagctacttttagaaacttctgaaagttgcctttttctaggttcattaaaatgtccatctgccaaaaatataaccaccaaaggtactactctttgattttttttttaaagactagtcaagtgtcctattaagaaaaggggaaagagtagaacaaggaattcaacctgtaactgattgtgaatagtcaattaagataactgactgtgaacagtcaattaagataactgactaccttcagagcagcctggtctttgaggttttaatgttacatcagttttttttttttttaagcaaaattcattctaaaattgcagaaagatgtttttcctagatgtatccagtagatggagctgttgactaaggatgctaacgtgtgcgataaacattaatagttttcaagacatactgtcaattcttaattatttatattaacagaraaacagcacaaattatttatgagtgcctactctttttgttgttgttgttactkcctttaaaaaatgcaattgtaggccgggcacagtggcttatgcctgtaatcctagcactttgggaggccgaggcaggtggatcacttgaggtcaggagttcaagaccagcctggccaatatggtgaaaccccatccctactaaaaatacaaaaattatccaggcatggtggcacgctcgcagctactcgggaggctgaggcacgagaattgcttgaacccaggaggcagaggttacagtgagctgagactgtgccactgcactccagcctgggcaacagagtaagactgtgtctcaaaaaaattttttttaaatgcaattatagatattctcaagaattttgttttagttaaaggggtaagtagaagcaagtgatttttagtcataaaagacacctgtagaactttttaaaatcaggcacattcagccctcaccactggagactttgttccagtagatttggggttgattctgggtatctgttttttcatgttctgtaagaaagtataattcagtgccaaaaccactagtgtttaatataaggaagaccatgggcatttccaagtttgttacaaaaccaacagcaacttagtttgcttattaaataatagcaactcagttgtgatttagaataaaagttgcagatgtaccaagtattttgttgtacatttgatttctggattaattttgaagatcatgcaacttacatttccatatccctttactgatgattagagaaacaaaagaaggtatacatttgtaaaacctttcaaaaacgtttacatatttatttcctttaacttttacgacaatcccgtaggataattgggacagatatttattactatcctcattctataatggagaaaactgagattcaggctgagtgatttgctctaaatctcccagcaagtttgttctaaagataggactttgggttttagactatgttgtaatttcatataatagttttacttgtttatcttactgtttttctcagacttaaagtttgaatttggtgaacacatgcttgatgatagtagatgggcctgtcaaaaatactttggaagatggaagaaagcacaaagtattgactttacacatatactcaaaaagttaaatgagaacgcagttttaaaaatgggaacatcttcctcttctctatccaaatattacccattccttaagattaaattgaaattagagttctccttgttttctataggaaatcaattttaaaagacatctttcttttaaagcttttataggtatatcatggtttggaatcaggtcaaatgcaagcagtttgtgtcttaagttacattctacaagtgattttatttattttgtttgtaagttgattatctagaattctaacaggtatctatctctgtaggtatggtattctaaaactaagttaggtctccaagatgagtcatcaagcatacacacacagacagacacatgtttatgtcaatagtagtataaaatcgaaccatcttaaatagcatcatttccatgggacataatataccattatattttctactcagagtatccggaagatgtctcatagaaactccctctccatagctacttaaggagataaggcagagattaaagattttgagggggtccattggttagggctccttgggatgggggacagctgtggaatatgacacagagagagagttgcatagaagcttctggagcttctggaccaattaattattcccatttaggatttaaagcagctgagcaggttgaggagaattcaggttatttagtccagtggtctctaacctgctttgattgtgcaccctatcagtttaaaaaatttttgagcctgcttccaaatatatatatgtttcttataaattattcgcatctctcattataccagtgtgccttataaaaactacatacacacaaaacagatcttaagatagtgaattaaaaattaaatgggccaggcatggtggctcacgcctgtaatcctagcactttgggaggccgaggcaggcagatcacgagaggccatcctggctaacacggtgaaaccccgactccactaaaaattcaaaaaattagccaggcatggtggcgggcacctgtagtcccagctactcaggaggctgaggcaggagaatggtgtgaacccgggagacggagcttgcagtgagccaagattgcaccacagcactgcaacctggatgacagagcaagactccgtctcaaagaaaaaagtaaatggaggctggatccagtgccttgtgcctgtaattccaggactttgggaggccgaggcaggatgaccacttgaggccaggagttcaagaccagcctgggcaacatagtgagaccctgtctctatttttaaaaaataaaagtaaatggaaataaaagttttattttcttcctgctcctgaaattcatgcctttcctttgcagaggactgttgtagtgtcttgaggaagggagtgtcctggtgttacttgcagtatggtctggctccactggctttagaattacctgggatatttattaaaatgcagatcattaggccatacttaatgaatcaatggaggtagggcctggttgtctccatttttgatacattctttaggggagttttgtacacattaaagttgagtgccactgttgatgggcatctctctttttccttggtaagcctgattgtctcttcacaatttatcaaactgatacctttgaaagggattcagggaggaatatgaacccctacagtcctattccttttgtgccatagaggcaaagatgtgtatatatgtgtgcatttttatgggaatacgttttctttaaattgtcataggagtctctggccaaaaaaaaaaaaaaaaattggtatggacaactgatgtgaattattatgtaacctactagttttcagagaaaaccattataagattcttaaccccaaggctctattgggcataatttaatcttctaaaatgatatagaaagcgtttcattgtagtgtgaacattaacttttattttgtggttatctaaaagtattgattgaacattttggttaatagaaaactaaataacaaaataattcagtttggggcattctaaggttgaagtgtcagagggagccatgtggagctgtcccttgtaactaaaagtttattataatgcatgtatttgcacgtacttaaaccaacatagagccattgtttaattggccactcttatgtaggaaaagggaagaaaggaacaatgtgtaagtaaaaagtaacctaatttagctttattctggggagaatgtttaacaggcttttaaagaattaatcacctttttaaactgaagaaataatttacattcacaatgattaatttaaacagtacaaaggtactgaaaagtatgccttacttccacctaaaattccttccccattttttccagaagcaaccactagtaatagtttttgtgtatctttttagaaatattatttacctcgtctttttttcctttgttctcccctttctcccttcctctttccttcctacctaacaccatgcttcttttaccttacagtttcttagaggttgttccataatatccattagagatgtacatcatttcctttaatgagttggcatattccatcakataaagggatcataattgaagtaaaattgagggatgtttaattgtgtctagtctttcatgattggtattgcaatgactgtcattgtactaatgtcccctgagcctttgtagggtatatagctacgtaatatatttttagagtctctgcacttatagagacttctctataggagactccacttatacctactacatacctataagtagaattgttggtgtgtgcatttaaaattttggtagccattgctaaaatgcttttcaagaccttatactgatttaaagaccttttgagtgcctgttcattcattctcatgtcagcaaggtagtaccaaacttttttatctttgccagtatgatcgataaaaaatggtgaacagagctgaatttgtttcagctatcattcagagcttttcttcatccactcttattaaattttcagtgactcttttatgagttggacagctgtggcagttgggatggggcagattctttatgagccaagtatttctgccaaaacaacattgcttcccargcttactaagttactatgactgtcttaaagctagccagcctctgatctctacttcctaaagccctggggttggagtaggagtgactgaagtggggattctgaagaaaaagggcaagatacggtattcctgtcattgccgaaggttggcaccaatcctataggtcattttctccactcttccttactctgccctttcccctggtacatgccactgatgttgtttgtcagcgtagccatcctggaagtttgaatttgtctgtcaagcctgtayacactagcattgtcagtaagctttgtttttaatgtaatacataacagccaaatatttttatcactataaatcaaataatggcaaaatcagagccaggtatgtttcttccagcagtgtcttctggcttgccctctacactagtaaccttttcccagctttatttttcttccctgattttccatttatcctgattttcttatctgtttattttatcttgtatgtggttttcataaacagtttcaaatctctttgagaagaaaatgcagagtattactcaacaagtcatagcaaaaattaaaacaacagaaagggaaattaaaagttgagaaaatgcattcattatcatttgctttgtagtagctctgctttaactatttatgtagattccttctattagtatttgaacaaatgtcatgaggtgctgtgttcatatttctttagctactcagtagacttgataggagccacagccctgggacaattcttggcacagagttgctcaataaatagtgtgtgggataaatggactatgcatacattccatttggcttattttttccttgggttttagaatagtcagtttcttctttctgggacagtctgaagtaaccttccagaaactgagcctcgctctgcaacccatccttatgtagaagaccatatgagttagagagtctccaggccctatcttttgagaaagtctgtggacatattccrcttttgctggattacagttaaaccatttaaaccaaacctaaaagagtagcaaaacagttgactttgtaaaaggtcagatgtatttcaacacagaaccatcaaaacacctatggagtgaaccatactttatatcgagtttgaccctatctcccattcttacttgtgccaattttccttttggccttacctatttttttcttctttacagattgcttgcacacatttagatgtggatttagtctgcataactgtaacagagaaactaccattttacttcaaaagacctcctattaatgtggtaagtgtactttccattctgtatttgartcttagaaacttacattagcaaattggaaaagaagcagaagaaatcagtgttcttagaaggaaaaacaaaggctagggaataggaggcagttttagaaaagagaattttcgttttgaaagctgaacaaagggagaaagaaagcttaaaattaaaaatatccagttaattattaagatgtttttaaaaggccatagaacccaaaatttataaaggatatttcttaagaggatagctaataatcatgggtacttataacctgaacatcaattattaagggaacagagcagtcaaaaaagaagaggaagggaaaaaataaaaagcagaggatccttgaggcaccaggaagctaaagagagtcaagagggaacagggcatggcatcacatagacgtggtctatgcaaaattaaaatctgtgttgaagcatgcttattcacaaagagcccagagttacttttatatgaacctaataggatggccatgtgttcagaaaacttttttgtttctccctctgctatagaatttttctcattccccttctacatagttttctcttgttttcccatacccttcatcttctatctgtccattccttcttctgtcttaatttcctcccatttccatcataaggtaatattatttcacaccagtaactattttagtagcaaaaggtcagcacagctgttaactatttgctttgccagtcagatcctaggaggagttcagatgctattttagagtagtggcttccaaaaccctagtctcctgttctcaaaaactggtatccaaggagaaaaaaaagagtttagcaaatacagtcaaaattacatatccaatcctgtcagaatcagaagattaattttttttaagtttttcaaaggataattcccttgctcttttgcctctgtagaatcataactttctcaattttaattctctttggtgctaaggaattggcttgagaattagagggagacagtaagaggagaaaatggaaaattagtatgtgaaaattcagtgtggcaaaaattattaktagtagtagtagtagtagtagagacagggtgtcactctattgcccaagctagagtgcagtggcatgatcatagctcactgcagcctcaacttcctgggatcaagtgatcctcctacctcagcctcctgagcaattgggactacaggtgcatgccaccacacctggctaatttttttatgttttgtaaagttgaggtctcaccatgtttcccaggctggtctcaaactcctgggctcaagcaatcctcccacctcagcctcccaaagtgctcagcttacaggcatgagccaccatgcctgacccacccaatggggaaaagtttaagttagcttatgttctacccctaaaaatatgctactcaaactaaaaatatatcatcatatatttcaagggaaaaacataaaagctcttgttgggtaaattttttttttttttttgagacggagtcttgctgtcacccaggctggagtacagtggcacgatctcggctcacttccacctccacctccctggttcaagcaattctcctgccccagcctcctgagtagctgggattacaggtgcacaccaccatgtccggctaatttttgtatttctttttagtagagatggggttttaccatgttggccaggctggtctcaaattcctgaccttgtgatccgcccgcctcagcctcgccaaatgctgggattacaggcgtgagccaccacacccggcctagggtaaatattgacagtactagtgaacataacaatattggctgagctcaaatcattggttccttgtgttattgccagtacttataaataaataagtaaacagtgaaaaaccactgaatcaccacattttcgagttggaaatctatgttgtgcaacagttcatttgtcaaatgtggggaaatgaaaaactacaagaagtcattcagttctgtagtcacacagggttaggaaagttctgattggttgtctgtcaagatctctgatgtgccccaggtacctatgataaaagccacaaattaatacagtactcaaggttatggcagtcttgttggcctcacatattgtttctctccagaggtagcaatctctgtctttagaagtttgcctaacctttttaccagcctcaaactgccaatacagtttctgtggaagtagcacccccagagttgggcactatagctactcagcaaattgctagtgaacttgcaactttttcacctttttcttcatcttaatgaactaggaaggtcattttctagatggctttgcctgaataagcccacatacgatactgtgaccttcgatgggaggagctagcatgtgatgttaaggccaagtccatggaatggacagcaatgcacaacagataattcctcatgtctcacgacagtggtaagattcccagtggctgctttggtgagagcttttaattggggttcttaggaacttgtattattatttaaaccagagtgtgagctcctagagaacaccggctgtcatggtccttttttaagtactccactatcttgcgtataatgagtcctccttacagtttgttgagtcaataagtacatgttgaacttagcatatcagggtacagcataggggacctggccaaattctgctcgttgttagtcaccagctggatgtccacattcatcaggaagtatatgccgtgagggaagtggggcagtggggcaacatgaggaggacagtggcactcaagacagttgacaccaggacaccccaccccctgattccattgggaagttcaggaaagctcctttcgtttgatgggcatttttcgcttaattcctacatttttcaatttaagaattctgaaaagtaaaaaattctgtcaagtgagagggatatgcagtttaacatggtgtctgctttaaaaaaaatctggtgtgaacattttgcatatgttgtttaataaaaactagatgatggagtggaaagaaaggctgcacaagattatttttagtcttcatctagtagaagagtaggctgcactgtgaattggtcaggaagcagaagagtccctgttaatttattcacctattttttattaaagagagaaagttggaaacatacaggtgtctagcttgttgttcagagtaaataatagttgtggcataggtatgtatgtattatttgtaacataatatccagtctggctgtggagctgtttgtctacataaagtatggaaatgtatacattgtgagagcacagtcttggtccttgcatgttcccttggctttgagtgtaaacttgtttttggccttgagaagttcatagattggctttaaaaggatcactttataaggattacttttttttttttttttttttttgagacagagtctcgctctgtccacccacgctggagtgcagtggtgtgatctcggctcactgcagcctccgcctcctcagttcaagcaattctcctgtctcagcctcccaagtagctgggattacagacatccgccaccacagctggctaattttttttttatttttaatagagttggggtttcatcatgttggccaggctggttttgaactcctgacctcaagtgatccacccgcctcggccaggatactttaaattaagcacagatcttaattttgtcacgatktgggcccttttctttggttgtggtgaaaagcagtattaagaaaggtaaatcattcatcttttaccaataggccagatgccatgtgagaatcatcagcttggaaggttgggattgtgaaggagggcccaggagctctatagcataccaaacactccatttgtgtactttgcagctcttttcccttttgtcatcttcactgtatgcttagggcaccataatttcaattatgcaatttcctctaaaatctcccacaaacctcttctggagtctaagtaacttgtcatcgcatttctgtcatgtgatagatgtgtttctaaaaaattggattccactccttttcttgaataatcacatgacttcagattatttagcattttatgacataagcagtttgatacctgctttggcccagcagttttgggatggggtagatgttaattatctccatatgcaggtaatacagtagaatcttaggtagttcatggttcacacagttaaatgactctctcaaggggttgacaagggatttgtactcaagctttgattccaaatctgctgttatttcctactgggaaatgctttttaaagttactttacagcagaactctttgttaagcacagagtaatttcatattttaaaacatgagctttatgaattcaggttgtgagaagaaggatgttcttaaaacagcacgtatctctttactttccctttgatttttttacaatgttatttccatttcaatgttattgtcacttaacaatgacttcaagcttattgagttattttaagggatcttatatgttttacactctctctgatgttttcccctcagtccttcctttaaccctaatccatttctgtcttcgtggtccgattactccccactgagagatgtttagtaagtagtatctaaacagtgaggtagttccatgaatcatgctataaatacttgatttggatgtgagtgttctgtaaactttgttttatcacacatgaatctaatgtgttaagtactgtgtccattcagtgccagcaaattgtgccagtattaaaaatttctgtggaaaaaaaaaatgcaaacaacaccagaaacaaggttaaaagacagatgacaaactgatggaaaattttcactcatgtcatagacaaaatgcttattcccttaacacataaagaccaaagagtgcctagaaattaataagttaaaaaaaaaagatgaacaataccaaaaaatggattaagaatatgaaaaaggcatttcacagtaaaggaaatgcaaacaggccttagacatatgaaaagatgattaaatttatcatagtaagagatttcacattaaaatcacctgtgtgattagagatacactctgttgtaaggctgcaggaaagcagacattctcatattttgctcgtaactgtgtaaatgrgaacagtccctatgcggagagtgggtaatttggcaacaactattcaaattacaaatacgtttactgatttaaacaacagttttaaactgtatgatctcacagttctgaagcctgcaagtctgaaatcaaggtgtcagcatggtcttgttccctctgaaatctataggaccaccttccttgcctctttttagcttttggtgattttctggcaatctttggtaatcctgggcttgcagctacgtaactccagtctctgcctttgtcttcagtgtgttctccctgtttgtctctatgtcttcacatggccatcgtctcataagacaccagtcatattggattaggggcctaccctattccaatctgacttcatcttaactaattacatctacagtgaccctatttccaaatataagattacattctgaggtactgaggtttagggcttcattgtatcttttgtggatgaggacgcaattcaacccattatgcctagcaatcccactttagtgttattctacagatacactgaaaccacccaaaggctctcagtagaggtttggttaaatacatgctatacctctacaatatgatactctacaactgtaaaacagaggaagttatgagctgacttggaagagctttcatgtcaggacaacaatgcagcagactaccttttggatargaaagaaaaatagtatctcttcgtatttgcttatagttgtatgaagaaactctggaagaagacacaagaaattaataaaagtgattattggaggaagggatagggcagataggattggagatgcaagtagtactttttattgttttcttatgttgctttgtgagtcatgtggacaaattacctgtcttaaacactgaaagggtttcattcatttgaattgaataaagaactaatttttatgaaattaacagggaatcagtatattgtcccagtaatcagctccttactttcttctcgtctttctctaaggctttgcttaatacttggaattttagtaccaatgtatcttgattcaactgtcacacacctgtccttagtagcatctttatgaccattatttttcattagtaaagaaatgtgatcatccacccatgccagaacctttggtcagacatgagaacaaaagctaatcaggcaggcactgttaggaagaggctgttaggaacaatcatttgatgagctttaggcaatttgcatcaaaatggtcttacagcaagatcccaggtaatgagtctgtattttatccatctaaaaatttaaaataagatgctatgaaagaaatattcacaaccttcaatagcacattatttttaatttttctttttcaagaattcctatagcagttttaaagtgaacttgattaatgtaccaagatgaaaatcagaactttttccttaaaaaataattatgctgataatatcctttttttctcccctccccccgcaaaagttgtttttattttgatttggtacccacaagggtctagaaatttagattcagtcaattaggaatatttcgagatctaagcatccaactctatatatcattcacctctttcatttatttcccctcttcatcatcctgttgccttgtattatcgttccacaactagaaggataaggaaaagaaatacaggtcagcctcttcagctaattagtagttttggtaaaatatatagccaaggagatggctgataatatggctaaaagggatgtttttacttatctgtggtttttggttagccaggtgcaycgaggttcctttgatgatggatcatctataatgaacaacgttatcacaggacatcttctccataagctgctatttattcactcaaaatataaatatattatacaccttttatgtaaaaggcagtctagctctcaagaagtgtgcaagcttggcagagccaatgagatacacgttcaactaggacagaaatactatcttaacaaatgtcattcccagaaataatcaacacaggtgaaagaattagagatggggaaaagtcaaaaaatgagagagggaaaggttgcagtgtggaaaatagcatttaaattctaaccaaactagaatcagacatataggaaaatctaaaataaaatctgggagccttgaagccggaggaagaattaaggaaatctgtgttcgggagggaaaagcagaaggggccttcaagtacaactgaattaaatcaagatggactgccagttctagaaaaagacaagtttctccattccccgtaaatgctcaggagtaaaccccagtagtcacagctgggccagtcccaacttatactytgggcaatcgaaactcatttgccaagcagagacttggaccatactgcctagaacatgcctaccattctttctttattcttttgaaagagtactgccactcaagtgacttttgcaattgagagtctgattatcatctctatgctgaaaatccttcagatgttttctccattaggaataatcctcatcaccagctctaaaggcctgcacagttggcccttcccatcctctttagcctgtcttcctcattatttttctccagcatttgaccttccctacgtgctgccatgctgcaaccttgaagacttttgcatgctctgacctccctctgaaagtgcaccttcctctactatttaactgcttaatttcttcctcaaccctaaacttctccttgatagcacttaacacagttgaagttttgtatttttgtgtggttattgatcatctcccccactaaaatgtaagcttttagaagggagaaaccatctcagcttttgcacgtagtgggcttaaaacatcttttgtgaatggatgcagacatttaggtgctcattaggaaagctgaacagtatggtggttaatttcaatatcatttccactcatctacttacctgtggatccctctgtagtaagagtacattaaataaagaagtttctgtttctcatgaaaaaagccaagcttgtatggtgagctgggcaaaatcttcaagggcacttccatcttttttgctgtgcggctataagcccagtgaaaaatcaggggctttattactaaagaaaaaggagaggacagatatctgggcaatttgcaggctttgcagtaatgctttataaaggtattgtagtaaggattaaatattatatataagactctcttagcatatagtcagcactcaattaactatggctgttattctctcttcaacatatagagaataaattacttacctgaaagaccttcctgcccttggttctttgggcttttttcagctcttcatttctttgtctctttgtgcattcataggtcagattacttggtttactatgtttgtatacagtttactgtaaatgtagggagtacatttctgttttccttttgatagttcatggagtagtagcccctctctcacsccattgggactttgttcttcttagcctcttcataattcctgtttatgtaaagtcagcttccccacagccaagttaaactctcttaatcaagtagagccayggatttattttcttctccttgtgggtggtgccatttgagtgttgatctgtctttcataaagctgtaccttgacatgtaaggggtcagtagtagggagtgaggagggatgtgaagagagaatcagtgaaaatgaagtaggccagtgcatgcttatctctgacagttctctttatttcctgtgaargcgattgaccgaggcctggcttttgaacttgtctatagccctgctatcaaagactccacaatgagaaggtatacaatttccagtgccctcaatttgatgcaaatctgcaaaggaaaggtatggttctataattttaggatgtttttcgcatctggcagtttattattagtagtacactggaattgtcaaactgactccttttccttaaagcagaatgttctcatagcataggaacaaattctgccatttcagtgagctctgcaaattttaagggaaagaaaaataccaagggaagaataatgtaagggagaaaaagatgtgttggaagccatatcttttgataaaaatttgcaatttacatactgtgaaagaaaagtctagaataacaatggtcctcactgagttgaattaagatatgtgaccttttcatcttgttttttaaacttaattcacctttactaagatctgttaggaaaacatattttgttttttattacagattgcctttagtttgacatgaagtcttttcatttttttcaccttaattatttaccttatctttaaaagaagttggtatttgagccttaaatgttaaaatatgattactggctatttatattatgaaactcctttttttacatttatctaagattaatattagtcactttctattttgtagaatgtaattatatctagtgctgcagaaagggtaagtctagcatgaagtactttgttttcatctttcaggttataaaacttttcagtttctaggggataaattaaaatagtaaatgaatatttgttgcatttttttctattttaactgcatttgctcattgtaattgctaaatagtaaaatttatccccactttctttaggcttcaacttttgtttatataatcagtttttcttttatactgttacaaaatgcctttcaagcttctcttatattttcaaaagctatgaaacccatcaaaattataaggacttaaatttatgtaatttttttatttttggatacttaaatwttctattaatttgctataagtcattgaaatgttataaataattttctcatatmtactctttgttcattttatttcagcctttagaaataagagggccatatgacgtggcaaatctgtatccttttctgagtaaaaagttgttgacattgtctttcaggaaattttgaatttgaagtcgtattatagttgaacatgtatttttctcaaccttttactgtaagtttaccaattaataacttcaaaaataaattatataacattatagagagctttatgcttctgttttttaattaatcatgagatagaaaagagggaatgagggacttcatatgataaaagcttagagttaaatgagtcttttctcagatgcatgttccagttggactaagaactgctgttgaattaattagcctctcaagatgaccaggttagctggcactttctgttatgtttgtgttagtctcgtgtccttgggtgactctgggttgaaatctttaatgctcccccaagaggcttgctgtttgggctctctgaaagtgacgccaaggctgcggtgtccaccaactgccgagcagcgcttctccatggaggtaagcaagttcttccagtacaaactgaatggtcatgttaaaagcaagtcatttttacagccatacctatttttattgccctaccctacagagttcctttgggatcatcttttctcaacctgttctaaacacagtcatcagtgttttctcaccctcacttcaggctttactttctaaagtttgtagaatgaatatagttttcattacagaaataagtattgaatagttcttccagctatacatgtgtgctcctgccgacattttgataggcttctaatctcccttccttcttctccctcaccagaaggccatgctttccctgttgaaaatctctgttttagagaacggatatgttaaaaatatrtgttaaactatttattaggaaaacaaaaccagcaaatacatttttaaaaatccaactaacaaaacatagactgtaacttttacatttattataactcagaatgtttcttttctcatgtttgcttacatggtcaagttgtgtccagactgtaccttttttatttttttttctttttctaaatagagacagagtctcactatgttgcccaggctggtcttgaactcctgggctcaagcaatcctcctacctcagcctcccaaagtgctaggattacagacatgagccaccatgcccggccagactgtacattttttactcacattttgtatatgtaccttttcactgactgagtttcctgctcatcagatgttaaaaattgaaagtatgctgaaactttggaaaatgaaagtgaaattttattaaaacaatttaagcttttgatcactgttttgtcttcgttatctttataattcttaggactagttgtagtggttaagaagcaatttcattgatatcacccaagtgaattttaaacttcaaagtagattgctacatatagactgagttatttgtcatatgaatagctaggttattgagggcttgtgtgttgggctttattgatctgatttccacttgagagaactgcttatgtattggcttgccgtaaattagatgattttgcttttagtttcaacatttttagtttgagatttttgtattatgtagcctagaactcatcacataagctttgggagtggtcaaattaatggagattttgaataatgattttcttgaaattagggaacagttggttcacactttgatagttctgtcattattttgatctattttaaataaacattcatcaggattttgagtaacagttggggttccaaaatggactaaacaagaaacagaaactaaaatataaatacatacataattttatatataggaaaataggaagtcctgcatttgactttaagaactcagctattcagcatataacacataatatgtaaagtatttttttttagaatttctttttgtgggtacatagtatgtgtatatatttatggggtactgagatattttgatataggcatgcaatgcataataattacatcatggaaaatggggtgtccatcccctcaagcatatgtcttgtgttataaacaatccaattatgcttttttagttatttttaaatatacaattaaattgtattgactatggtcaccctcttgtgctatcatatactagaccttgttcattctattttttttgtacccattaaccatcttcacctccctctcagccccccactacccttcccagcctctggtaaccatccttctactttctgtctccaggagttcagttgctttgatttttagatcccacaaacaagtgagaacatgtgatgtttgtctttctgtgtctaaaatcaggcttttatagaagctaaacttaaagaagacttgtgaactttgggtggcattaccattcaccccagtgtacccaggacagttctagtttatgcctgctgtttctgtgaccttattagcacttctattccctgaagagagtcctaaactagatgataaaatatggttaccctggttttcgttgccattgggatcagtatgagacggtagtatgatgtgttcttaagattgctaattcagcctaggtaatattagaagaaataaaggattctgagacaaggaaattcaaagcctcgttattatactctcattgatgaaatctcagccggcatctgtatcattctgagtgccacatttaagaaggacagcagtgcactgaaacactattggaaaatgtctactcagtccttaaagggtctggaagcctcatgatgagaggaatcacgagggtggtgcagacatggatacctggcaagcagaagagttgggacacatggtagttagctttcaacttggaaggcttgccacaggaaatcagaattaggttctttgggggtccagaaatctagaaaccaatgaatagcaattctgaggaggttgtggggaaaggacagaggaaagaggcccaaggtcagggtctttggcctgtgattgataaagttcatgccctcaatcagcccctggaccaaaatgaacctgttggggacacctgccttagccccttgtgaacaaaattattcactcgtagataatcctttagattttccttggcaagatgattaaaggaaatactatatgtgaaaacattttataaactaaagcatacacaaatgtaacgtcttgctgttaccaagaaatgcatttatttttaaaagacactaaagaaattaatgcattttgttaaaaagtgctgattttcataatgtttatatttcagttgatttttagactatgggtacagaatcagtgacataaattaatagctataagtgtgacgtttttcatttggtgaaatggaaatcattgacagtttttattttgaggttcttattatgttggcattttaatgaccttgagagcagttttatcccttttacaaataaaagtgttttaaaataattggcagagtagatttactaagttaatcttgataaatgggaaaataatgcttaacactttatggttgactttacgtttattacttgaaataaggaataattcatagctaaatttctgttcaagttcttttgattctgccacctttgtagctaatgggtatctctctctttctccataatccctttccatttctaaggacagagtttgggtctgttttcatgacactatggcctttcataagttacccttccaaactctattttctcctaatttttttgtattcctacttcacatcagccatattgtcccctaaactattttacctaggttcttcttatctttctctccatgcctttgtaaaggaatatttctctttttcttactccgtttaccctattctgagtagtgtcacctttatataatacctcattgctttaaccaggcagttaattcttgtggatgcctccattcctattatatttgctcttattgtgcttctcgcatgcatgtagtatagggaaaagcactgtctgttaggaatcttaataccctctgtatggacacagtgcctagcctattagtaggtttctaggaaaaattggttaaatttaagttgaactctgctgccagcctaatctaagcatttaataatttctatttattctttgttcattgtcaccagttaaagagatcaataaatttatgagtgattttattcattaactcaactagtatttactgaacacattttgcataaccaggccattgttgagtgttggcaatayaatgcaattgattcttcagaggtaccttgatgttctaataagagagatagggtacatgctgtaaaatgaggcaagcatgtgctccacatgggagccatacacttgattgctgtgtttgctctcttgatttgtctgtctaccatatataaagtgtctgctacatcaatgtctgtgactgggttctggctacataagatgccatggacagaccattagagataacactgtcctgcagttttacccatgaggtaatctttaggaatgaattagatgttaataatatactgatatttgtgtctgttgggaaaaaaagataatgacggtaaatggcactagcagccatagcagttcattatggcttatcatttgctattgctgtaagccaaagtaatatgttaaaccacctcattttaaattatgtcttaacttcaagcacagtggtttccctgtttgttttacagaaactagaaaaactgcttttggaattatctctacagtgaagaaacctcggccatcagaaggagatgaagattgtcttccagcttccaagaaagccaagtgtgagggctgaaaasaatgccccagtctctgtcagcactcccttcttcccttttatagttcatcagccacaacaaaaataaaacctttgtgtgatttactgttttcatttggagctagaaatcaatagtctataaaaacagttttacttgcaatccattaaaacaacaaacgaaacctagtgaagcatctttttaaaaggctgccagcttaatgaatttagatgtactttaagagagaaagactggttatttctcctttgtgtaagtgataaacaacagcaaatatacttgaataaaatgtttcaggtatttttgtttcattttgtttttgagatagggtctttgttgctcaggctggagtacagtggcataatcacagctcactgcaacctcaatcctgggctcaagtgatcctcccgcttcagcctctcaagcagcgggaactacaggtgtgcactaccacacctggctattttttttttttttttttttttcccttgtagagacatggtctcactatgttgctgaggctggtctcaaactcctaggatcaagccatcctcccgctttggcctcctaaagtgctgggattacatgagccaccacatgcagccagatgtttgaatattttaagagcttctttcgaaagtttcttgttcatactcaaatagtagttattttgaagatattcaaacttatattgaagaagtgactttagttcctcttgttttaagcttctttcatgtattcaaatcagcatttttttctaagaaattgctatagaatttgtggaaggagagaggatacacatgtaaaattacatctggtctcttccttcactgcttcatgcctacgtaaggtctttgaaataggattccttacttttagttagaaacccctaaaacgctaatattgattttcctgatagctgtattaaaaatagcaaagcatcggactgaaccaactttggaaataatttatttttataatgggatcatgttaagtagaagtagctttttatgcaaatacatgcatttatgcaatattaatgtaagggctctaaaacaatggagtagagccagaggtataactgaataagaaatttttttaagcaagagaaagacaactgttctgcgggttggagaaaatacaattttttttttttttttttgagacagtctcgctctgtcccccaggctggagtgcagtggctcgatctctgctcactgcaagctccgcctcctgggttcatgccattctcctgcctcagcctcctgagtagctgggactacaggcgctcgccatgtatttagcagagacggggtttcaccgtgttagccaggatggtctcaatctcctgacctcatattccacccgcctcggcctcccaaagtgctgggattacaggcgttagccactgcgcccggcccgagaaaatacagttttaaaaagagaaagctttataacctcaccaatgaatacaaatgtttaaataaaatattgattaaaaaaacattaaaagtgcatcatgaccaggtgaaatttattctttttttcttcttctttttgagacagggtctcactctgtcacccaggctggagtgcagtggcacaatctcggctcactgcaacctttgcctcttgggctcaagccatcctcccacctcagcctccmaagtaagtgggaccagaagcatgcaccaccacatcccagctaatttttgtatttttttgtagagatggggttttgccatgtccaggctagtctcaaactcctggcagattcaagcagtctgtccgcctcagcatcccaaagtgctgggattacaggcacaggcatgagccaccatacccggccttccagttctttttaatgcagtatcctttatcatattcataggtcaaaagagaaaaatcagaatatttttaatagatgccagaaagacatttaataaagttaaatccactcctgatttttaaaatgacaacaataaaaacccatggcaaaattaaagtagaataatattgtatgcatacatatatatgttcatatgtgtctgttttttgtgtatattaaatgtgatggctccaaaagcatttttgactaccgcttggccaatttgatggattaacctactcattccttctgtaaaactgaggctggtgctgctgaggccacacaccaaaagtctgccacttccttgtgtgccagtttgcttttttccttcaccctgcttaagttcaccaaaagtcagctgtgtttattcacaaatctgtttaaggcagctgtgtttagcattgtatgtaaattatttttttaaatatgaaaattgatgagctattgggggcaaatgaaaaattcccgggaaaactaagtcaacactttggaaaggtttggaaaagagtcattacaaagaactgctgtcaaattagatgtgagaaggataacaaatttgggggtgatcagtaaaaactctgcacttggattgcttcactaatgtcaagttccttttctgctttaaaggaactagaattcaacaaagacaacttttgatctctcatcagagagatcatactcccaagaacaggctttgacccttctttaaaaggttggtacccaagtatacatttatctattttaagcttaaaatgcttaacaggatgtatgttcaattttttgcgatgtcccaccttaatttatgaattagtgatgtaccagctacagttgcaccagatacagtaagattttcatgttatagaaaggaggtaaaattatttgcagatacgactgtcttggaaaactcgtgaaataaatgggaaaaaagtagaaatacaggtacctttcagcttacgtccatttactacacatttgtgtagtatgtgtttgcagttgtgcgtgctttctattcatacatgtttatgccattgttcatgatagtagggcatgatggctgatcaccagtgaatagcagaggcaagtttccttctaatatttactttcgttagaatgaaccactaatttaattgctacaagatgccaatacctctgccaaaccaagatgaagtttggcagagtggccaattgtataaatacacaaaaaccagattttgattaataacctgttaaataattttaaaagatgacactattcacaaagacataaattaccaagaaatgtgtagggcctctataaagaaaacttaatgaaagtaataagagaataaagggaaaataaagactagaatacatggaaagagacattctgttttcttgaataagacaaattgtaaatcaaattctcccccaaattacgcatttaacaaaatttaaaatcaaaatgcttataagtattttttgttttcttgtttatgtatttggtctttggacttggtattctgaaagagtaaatatgagaattggaaatttcaggaaaaaacctaatgggagggacttacaatgctgaatattacagagtataacaaaactctagtactgtaattaaaactaattggtgcagaaattcagaacagtgaaaagagcaggaagtccaagatcatactttagatataagaagaaatgatggattgattgttcagtaagtgatactgaaataattggttatctatttgggagaggcagtacagcataccagttaagtgcataggggaaagaaaaactaaatgcatttaaagccctacttgctagtactcattagctatgaccttgggcaaattatgtaacctctctgtgcctcgcttcatctgttctccctacctgtcacattattgcaaggattaagtaggttagtatttgtggaaggcttactttgaacagggcctgtcatataaaatgtaccaactacagccgggtgccatggcttacacttgtaatcccagcccttcaggaggccaaggagggcggataacttgaggtcaggagttcaagaccagcctggccaacatggcaaaaccccgtctctactaaaaatacaaaatcagccaggcatggtggcccatgactgtaatccctgctactcgggaggctgaggcaggaaaattgcttgaacccgggaggtagaggttgcactgagctgagatcgcaccactgcattccagtctgggcgacagaatgagactctgtctaaaaaaaagaaagtaccaactattttattatttattacttcattatattaatttaaatattgaagtgtcagctatcatttaggaaaaaactaagtcaaatctctatctcacacccaatacacacccatagtaaatccaggtagattaaagatttaaattttttaacaaacttgtaaaatactagaggaaaatgtaagttaattaaaaaaataataatcttggattgcaatagacctgccgagcatggtcatcaaagccagaaaacaaagtttgattgatttgtctctacataacaacaagtaggaaagtacatttacaatacatattccaggaaggtttcatatgcttagcttttaagaattttttttttttaaatacccaacatgacatgctgttagcatccatagagatccccattcccagggtggtgtacctatattgccagtgcttcagatgttgggtactaatgacttatcttcacccttttccagaggattgtcctgggctgatgagagtcactttacctgaagatacctgggaagttttgtctcctctgaggttggcccatggccagtgactgatgcaggacattacagcctggcccactggcctcggtggtacaatttatgctcctgagcaccccatgggattacgctgtgtgtggatttctcctgaaaccacatatttgcctcttctgccctgttctgttttttctcattcccttatagaggactctcagtaagtcacttacacaagaatcctaatttgaaatgctgcttccaggagacctgacttagaaaattggacaaataaagttgatttttttaaatgtccagtaacatgaagatgctgaactttcctagtcatttagggggaaatcaccacaaatatatctggctgatcaggttgaaagttaaaagaaaaaaagatttataaagtgggtattttcaagatggtgtggagggagatacaatttgatgcaagtcttatacttttgatgtcaatttattcttcagaaataactggttaattataaagggtggatggataaggatattcactgcaacaatgtcttaaatgtgaaaatggaaacaacctaaatacccaataataacaggattaaataattcattgtacattaaaagaatactgtctataaagatgtctagaataagttgttcagttgaagttgtaaagctaaatacacaatacccataatgtgcacagaaataatcagaatgtcatgaaaccaggattattggtgatgtgttgcttcctttgttactcatttctgtattggcataatgagtattgggtgttcaagaggagggggaaggaagtatgacagatgttatggggaaaaagcaaagtacaacaggaagacaccttgggggaactaatagaatctaaggactcaaggatggcttcctggaggaaatacagctagaacaaaggggaggaatgagaagtgatgtgatggcgtggagtgggctgtagtgggaagaagagtcttccagggagctggcacagtatgtgaaaacagtaaagcaagtgcctggattttttaaggaactgaaaatttagttgagttgaaatttagagtttggctaggaaggttatgagagataagaataaagagttaacagcagccagattttaaggattttataagacatttttaggagtttttatttcatcctgagagaaatgtgaagccatcgaagggttgaaagaggagagtgagttgatcagcattgcattttagaaaaatccctctatctgcaacttgaaaaacattctggaggtaagcaagcctggaggccaggagcctaggagggctatttgatccagatgagaagtaatggtgacctgaactagggcagaggcacctaggattggaaaacatggacagatcacagcactacttatgtagtatacttggtaagacctggttgtttaaaagagaaggatgagggaaagaaggtcaaaaacaacttctaggactctccattggccagtgtggtgtgcccttcactgaagagcaaacacaaaatgaaagattgtgggcaaagagttgagtcagtgagaaggcaaggagagaaccttataaaaaaaatgactatgtgattaaaaacttaaaaatttcccccaacgtgtttatcttttccattagcagaaataactaagagttgtcttaattctaatgggatttattccatattgtctctcatgccctctacctagttattagtgcaaatatttatatgtggcaacataaaactttttaactctttattctcttctctcgtgtaccctcccagctctttaggggaggtggatttgaggcagataccataaagaaaagttggtcacatggtggtaacacgttgaagttatgccacatgagacatcagcactggcaagagaaatgtctgtgttgtagatgtttcacttggaagaaattgaaggaccctgagccttaaaagtctgacaaacttaagccaggacccctgtggggaaggtagaggggccaacaaacaagattgggagtcagagagataacaatgaaatccccaatgcctgtgggaggtggactccctggattagtactagacagaaaaggtacaaaaatatttcaaaccattctcacaactctatatgtgtctatgaccagataactggaagaccttctggttatggactatgcgtatacactctcccagatagttagaggcatatctaagaggttaacatatatgatcttatccaaaatgggtctcttggtgctagtgttttacatcagacttcactggctttcatgtatttccacaagtgccaaacatttctcatatccttgctgtattccatagagcagtgttcctgctacctggaacacttgattcttgaataactcctgtttacctttcagacaaaccctaaaggttaccacctcaaagaagtctttatagaagcctcatcatcttagacactctgtattgtttccttcatcgtatttacaacagacagatactgtgcacttactgcctcacttaacgacagggatacgttctgaaaggtgcatcattaggcggttttgttgtgtgaacatcacagagtgttacttacacaaacctaaatgatacagcctactaaacacctaggctatatgagcaatacagcctattgctcttaggcttcaaacttgtacgacatgtcactgtactgaatactgtaggcaactataacacagtggtaagtatattgtgtatctaaacaaacatagaaaaggtaatgcactgtactatgatgttacaacagctaggatgttgctatcaatagaaatttttcagcttcattttatttttatgggaccacctttgtatatgtggttcattgttggccgaaacaccattctgtggcacatgactatgtatttattcctcattattcctttaatattcgtctcttccaggagggcatgtcatggacaatctctttttcttaccacaggtcttaggacctggcctagcacctggccaagaactactggcatacctccttttattgtgcttcaatttattgtgctttgcaaatactgaattttttacaagttgaagatttgtggcacctctgtaaccagcaagtctattggtgccattttttcaacatcatgtgcctgtttcctgtctcgctcatgtcacattttggtaattttcacaatattaaaaactttttcattattattatatgtgttttgttggttagtgttctttgattttactattataactgttttaggtagccacaaattgcactcatatcggacagtgaacttaatccatgaatgttgtgtgtgttctgact

SEQ ID NO: 6846 - DNA, 33531 bp, Homo sapiens
tgagaagagaaattgaacatgctcagaccaaccttttttcccactctttgtgtgagccaagaaaaaggagaaggagaaggaaagaaaaagagatatgaaagacaggtagagaagcttaagaaggaagaaaaggatggaacaaaagaatgagggaggtaggagagagagcactcacacacatagcatatatagttcaacagacactatcctaaatgccttgcatatattatctaacttaatgcacacaacaattctcatggactattattattctcatctgtaaataagaaaactgacgcacaaaaggatatagtgtttatacagctagtaagtgataaagctgagctggtaaaccagagagtttgaagaattacacctaagttttaataattcctttaattgtcacaattccctaaattttatgagtttattccttagttcctgtcagtttttcattaataaatatatacatactttttttggatatacttgtggtttttaagcttctcacttccgtcacgtgtgttaaaattatcttaaggttgagagcgatggttcatgcctgtaattccagcacttgcagaggctgatatgggaggattgcttgatgccaggagttcacagccaacctgagcaacagagcaagaccccatctctacaaaaaataaattagccaggcatggtcgtgtgtgtttggcctatagtctcagctataggctgagatgctgagacaggaggatactttgagtccaggagattaagcctgcagtcagctttggttgagccactgcagtccatcctgggcaacagagcaagactctgtctcaaattgtatatagatatatttaatttgtgctattatatctgattcttagaagagtctgattgcacacatggttttttgcattatcactgattttattgcacatatatctcctagaaatcaatgctagagaactgtgatgccaatctgattcatattgccttataagcgaactgatatttttctttcatggttattggaaatttcttgttcattttttttctgtatcatcaatatgtaattgggtattggctttgttttcctcccatttgatcctatttgatatgagattgactttttttaaatagaagatttatatcccagctcaaagaaattttattattttgattatattctttcaatcaaattggaaaaaagtatttatccttatatagtcacatggctacatctctcaagtctcccaataccataaattttactcaaatattgcccttgtcaccttttaaatgaaagctatcacaccaccctatttaaaatgcaaactgccttctaccctgtcacatgcaaaccgctttcatctgttctacttcttttctattctctaacattctgtgacgtttactatttagtgtatctattgttaattgtctggctactcgtattacaatataagctttctgagagtaaaggtcattatcttttcggatccattagaatcatgtctggcatctagaagggtcatcaagaatatacaatgaataaatgaaaaaccaatgagatttttgcatcttacgtctatgagccttaaatgtcctctcacattttctttgtgttctgttccataattatctcattatttgggcatttagttcattacattagtaatcaggtgtagctcctctactagcactttgctgctactgtttgtttcactgttaaatattcaaaatacattgttagactcctagcctcttgaatgttaatttttcattgcaaacttgttttattgagttacagatgtggtatgctttcaattctctttgtttgcattaattatattttatgttatatgttcttgttttccatatcacctctttatttctctgttttttttgttgattgtggtggggtttttctttgccatatttaaagttctttagaatttgttaatctgagttatctgttcatactcagtgatgagaaataagtaagcaaggttagcaaccatggaaaatttttgtagccttcctaagcattcacttttcataattaatgaatatgattctgttgacagcacgcaaaggggagaaggcatagtcaggtagagtgtgcacattgctactctctatttgaaagtgccctcatcacagggtggttataagactccttgaatactaagccattctctggtggcaaaattctctttgtttactatctagataaaaagagccaattgctcaaagtttagcaagtatttaatagatgcttaataagtatctcatgaattaattattgatgcactaataccccaagtatgagttgcccagagcagctattcctttatttttttttttctggataaccctgagtaatacagacagaactattgatatgacaccttcatgaccctacagtactatcatggagttctgtgaaactgatggtttgactgattcacaaaatgagcctcttattagttattattatttgagccactatcttcctagggcaaaatcagttcatgtgggtctggcttttcaccatctgaaatttttttttttaatgagcatatagcaaaccataaaagaaaaccaacagatataaaccaaaacacagtttttgtttttttagggatctacttactcatttaataaattatgttaaagaaaatgaaacattgaaatattaaattttcagaagaactgtttattcattaaagttgttaggcaaaatcaatgggaaaatattttaggcaaagaaactttgattccattttggttttgttgttgttgttgtcgtcatggaaaattctaccctgttatcattttaaaattccttacctctctttccttcaatgctataattgctatttcattgactggttacagcctcagaagctgggttgttaccatctgttttagctttctagaactgctgtaacaaagcactacaaactgagtggcttaaacaacagaaatatatagtcttgcagtcatgaagactagatgtccagacttgaggttttgactgtgttggttccttctgagactgtgaggaaacaatctgttccaaggctctcttcttggcttatagagggccatattctccctgtgttcctctgcatcatttttctttctgcatatctgtctctgtgtcaaaatgtttcctttatataaggacaccatccttatgcaaggatgttggattatggctcatcctaatcccctcatcttgacttaagcaattatgtcttcaaagatgttaagagagagagatagagatcaagagtgatctttacttatatagagatctctctgtatatagagagatctatatagatctatatatatgtatatatttttataccacctgtgttgaatctaaaaagctgacaataaacatcaaaacttaaaaggagtgataactatctaaaccttgatataatcaggattcagtgttacacaactggcctgccttttaactgagcccgttgcacatggacacacatggatatttatagccctagggtgttgatggtttatttttagttgtctacctccccctcatcagcacaaagaaacaataacacatttatgacagttcaaatacatggagagggataatggaatctgcacacgtaagtgaaattgttagtacactttaaattgttgttgttaaaattttgtgtgtagtgcagttgagtttttaaatttttttaattaccaaaatttcatgactgtaggacagagaacatagtacaatggaaactcccgtatacctatccctggacaacagttaccaagattttgccatacttactatctctatttttaaaaatcctcctgaaatattttaaaccaaattctagttataaagcattgagaagttttaacacattatggtattaataatatttaaacatatattttaaaaatttaaactggacatttgcagaatatctgaagcaactctgtggagtataatttataaaccactacccaataataatcataaaatattcatgagaaaggtgtgtgagtgctttaaaaaacttccaaatcccagttactcagacaaatgaggtgagaagattgcttgaacccgggagtttgaggctgcagtgagctatgatcacaccactgcactccagcctgagcaaaagtgagagaccccttaaaaaaataaaaacaggccgggcgcgggggttcatgcctgtaatcccagcactttaggaagtggaggtgggtggatcacgaggtcaggggttcaagaccagcctgaccaacatggtgaaaccccatctctactaaaaatacaaaaattagctaggcgtggtgacaggcacttgtaatcccagctactcaggaggctgaggcaggagaattgcttgagcccgggaggcagaggttgcagtgagccaagatcacgccactgcactccagcctgggcgacagagcgagactccatctcaaataaaataaaataaaataaaaacaggctggacacagtggttcatacctgtaatcctagcactttgggaggcagaggcaggcagactgcttaagccagcgagatcagctggggcatcatggcaaaatcacatctctacattaaaaataaaaataaaaaataaaaaatagccaagcatggtggatcatgcctgtggttccagttcttaggagactgaggtggtagtatcactcgagcctgagakgtcaaggctgcagtaagccattatcacgccactgcactctagcctgggtaacagaggcactgtctcaagaaaaaaaaaaaaagcaacaacaacaacaacaacaacaacaacaaacaacaagctattctagtgatatttctggtactggactctgatcctggattaggattatgaaataggatttggagggttatctcttattttcctttaaaataatgagatattatgtacacctatttactgagttttctctaccacccttgtttcaggtatctacgtcaggaaatcactttagtttaacaaaattacctcatttacagcttcctaatatttgcagctcttatcccagtatgaccccagtcaaaaatgatttttatttttcacaagtgatttagagaattcctggcctggcttagagacagtggttctaaagaaaaaataacttcattgttttataatttgtgtcttagtaaaataagggctatttgttttaaaaccatttccgtatctggtttttcaaattagctttcttggttcttttagttttcaggtctacagagagatgattttgagctggtcacagtaggtttcttaatttattttttaatttatttttgaaacagtctatataaattctgttctgtgaatacttgtggttttaacatccaaagattcaaatctgttcactccataaagttctgaccctgaagctgtcaggctgtgcctaggaactgtctcagtgccaatatgcctccctgcactgaagctgttggtttctaaaaattcgttcagaccagttttaacctatagaatgttaacatcacataatatrcattgcagcatatagactcttgctctatcatttttctaaatagctcttttggtgtacttgttattcatatcacttggataatgcgcatacacaatttgggatcaagaattcattttagggtgctgtgccagctgttctcttttaggctgtgctgccgtccttgctgaactttagagatgcttaataaaagcaaagagggaagaacttgctgtttgcttatgtgaactcaggtaggagagaatatttaccaatgccagaaagacaattctttaatggacggttttgtgtttcattttagaatcacaggaagctgatgaggaaagctggtagcagaagtggttgaaaaatgttcatctgagacttgttctaaactgtcagaaaatgaggcaccacagaaggccattgactctttctcagtcaaggatttcaaagaacctgaatatgattttagcaacatttccatcgtgaggccattttcaatagaagcgaaggattccacgggtatcctggcagccgtcagaacaaaaccagctcatggctgtgtaactgcagtctcaggcaaggcctgccttctagccctccagacgccctccaggacaaggcaatgacagaaggtgacatgggagtcaccctagaggcttccacagaagctgatctaaaagttggaaactcctgtctagagcctgtgcccagcagaagaagcaagctgagaaagcccaagyctgtccctctgaggaagaaagcaattgaaggagagttctcagatgccggcactgctgtggaaggcacacctctccccaaggcatcctaccacttcagtcctgaagagstggatgagaacacaagtccttctttgttaggaagtgccgggttccagaagtctcctcctgaycttaaagaaactcccagcactacgaaagcccttccaaggaaacttggcaagaaaccgggtagcaaactgactcacaagatacaaaaagatggtatcagtaagtaagcaggtgtcgaaaagcctacagacacagtggcataagatgggcctctctcccaagtgtcttccaagctagatcctagtcagtgggataagcccagcttcaacccctttgggagccactccattctgcagaactccccaaccctstcttctgagggcttctaccactttgacccaaataactttgataaatccatggatccctttaaaccaactgtgaccttaacaagcagtgacttttgttctcccactggaaatcatgttaaagaaatattagaatcacccaagaaggcaaagtcacattgaataatgagtgacagtgkgtgctgggtgtcacgctctgtgtcttctctgtgagtttgtcagatggctacttttggctttggtgaactgaatttacctttgaggtccaccaaggttgatacaaagcttataacattatcctatagtcttccctatttggcctaacttgtgtagaatcagaaataccatgtgccatgttggtgtgctgcaccctaaaacttagagtattaaaaaaaaaaaaaagaaaagaaataccagacgtttccttttcagattgttgtcttgtttctgaatcctcagcttaatgaggtaagctcctttccctgggcctggagacgtytttatgtttaaaaaaaataaagagtggcataagataggtaggtagagattcgacggttttcagaaatcctggcgaggctgtcaggagtcacattatagacagaattcaaatgtcagtgctggccactgtcttcagattctttatggaaaaaacagaaattccagtcctataaattacctatgtagtatcaataacgtgtagaaaatggctcaaaagggtcttgtagaaagtctttttacataaacagaaaactgtgatcttttgttggaaacaaatctaccactaaaatttggtgagcattcttgtttccatrtgtagtttctaactcatcagcaaggaggtaaatttccaattagaatcaagaatattttaaatgatcagwtaaaactgagtaaattagttggtttaatcagtccccccatctctcatctctcctgggaaatcatctgacttttgcaaggtccttggagttttcagcgtaatcacttaaggtcacattctatatcaagyttcagtttaactttgctacaggattagtttatcacaaaactttagttgagtacattataatacagtcatacatcgcttagccacagggtagttctgagaaatgcatccttaggtgatttttttgtgtgaacatcataaagtcaacttacacaaacttaggtgatgtagactattacacacctaggctaaatggtacaacctattgctcctgggctacaaacctgtacatcacattattgtactgaatactataggtgttaggtgtgatgcctcacacttataataccaacattttgggaggctaaggtgggaggatcccttgaggccaggagtttgagaccagcctggtcaacatagtgagatgccccccgctgccaaaacacacctcctgtctcttaagttttttaaaaaaaatagctgggagtggtggtgcatgcctgtagtcccagctactcaggaggctgaggcaggaggattgcttgagcctaagaggttgagtctgcagtgacccatgattttgccattgtactccagcctggctggcagaacaaaaccctgtctaaaaacaaacaaaacaaaacaaacaaacaaaaaaaaaacaagaaaacaaactactgtgggcaattgtaacacagtcgtaagcatttgtgtatctaaacatatctaagcatagaaaaggtacagtaaaaatatggtataaaagataaaaaataatacacctgtagagggcgcttaccatgaatggaacttgcaggactggaagttgctctgagtgagtcaatgagtgagtggtgagtgaatgtgaaggcctaggacattcctgtacactactgtagcttgtataaacactgtatccttcaggtacactaaatttatttttaaaaactcttccttctatagtaaattaaatttactcttttactttatcaacttttgaacttttaaagaagctttgactcttttgtaatagtaattagcttaaaaaacaaacacatggaacagctatacacaatattttatttctttatatccctagttcataagttttctttgtttaaaattacttatttgtttactttttaaacttttttgttaaaaactaaggcacagacacacaaattgcctaggcttacacagggtcaggattgtcaggacatcactaggcaatagtttttctgctccattataaccctacgggaccaccacatgaccgaaagtttattacrtggcacatgactgtacttccttttgcggccctgtgacattttgctaaaacgtttcagtaaaatgtagatataaagaaggaccaaggagttgcagcatgaagtatggaaaaggagtgcaagaagcactgtgtttgtagttgtcactatagatcagttggggaaatgcttctcagtgttgctatgacttaaagaaaaactccagatgccatggtgagttacagcagaaaggaagacacccagaagtttaaagagcagaaggatggactaaagtaccaagaaaatagagcgatgtaggagtcagttcttcagcagccccagaacgtctaaggggagtgaaatgtcattagtaactctggatctgttctttgattatatatcagcagttaaatggttgttgaaaaatattattgacttggtgccctcttttgtggcttttaaggttatttagttctctctagacagtagttggggtatgtactgggcacrtcactgcctagttacttcctcctctaaatgtgagatgtttcagcctactgaagtcgataaggagtcgtttgtgagcctttcagttgcatgcaagcagtgcattcatgtcaaataagatgaaatctgggccaaagagagggtaattcattctacactttataatcagtagcaagaaataccatctttcgagtcctaccaccctcacctggtaggtagcctttttcccctattctgtttttgtcaaatgaacttcttgatctaatacacttaataggtttttttaaaggtccttatgcaaccaaaaatcttgttttcttgttctttatacaagaaagcagtgctagacctcttggaagtttacttttcatctacaaatttgaatttgcggcatttctgagtgtttctaccagtctctcttatrgttgaggtctgttaatcattcactcactagtgataacattcatgaatatgacattttaaattagtatctcacctcatagaaagaattgtgcagcttttacatctgcaagactggagttgaatattccagtctttacatgatttttttctccctctgtgtctttcctgtctcttaattttgttggtgcatcgggattattaaacaagtgaaatttctctgttttctgttgtaagtactcctgctgtttctgtttgtccctgggaccattggcagttttctctcccatcctccctgagccatctctccatagcatggtttgcttctgagtttgatcttttgatgattttttgtatttcactggccacttcatgagttagctaagctttgtaggtgtccgcacctcagggagtggggcttggcctttacaccttaggtgtgagaacttgcactccctagcctggcaagtgtcacrtggtgctttgacaataccaagagctggcttggcctcaagcagtggtttgagggactgttctgctatttaatattggaaatcattgacttttggtaagataaagctactggcttggawcagttaattttactgagtcagctcaacttgagtttggtggcagagggtggcactcagtaggaaaactagggaaagaagatcatgaagtaatgattatgcacattctggtaacttatgtggttgtctttttattttttcttgcaaaagaaagaagttgcaaattttttttctttttttggtcacggtgtttttactgaaaattctaagtttattaaaacagaacagaatctcaattagtcctgtaatcacaaattttgtgctagtctacaaataacaggtggttcaagctttccccagcttcaggcttggtgtaataygtggcattcatcttccatcttactacttaataggaatggtaaccgtttactcacatatttttatttttacactttttattgaccacagttcttgtctgtgaacacacaagtctaactggaactgttttatgagacttctgtggcttttggtgaaataaagaatttttaaagaaaccagtccagcgtgatgatttttctaatgartgtcaaagccaagcaagggaggctcagaggaactgaatgtctccagctgctaaggctctactgtctgaaaagcttttggtggtgtgtaattaaaaaccatagacatcagagtgctagtgtttgaaaactcacagaagcaagcaagggggtcttttcagagaatgagycccgctctaggtctttgcttacctcttctctccagagaaaactcagaggcataaaaggtgtccctgcctctctcacaggtagatgtatggtgtgtgtggtgctgtacgctttggcttctatctgcacacamtgmtytctgtcccatttcataccttgacagttgtcagtgtggttccaaattagcttttttatgtttcttctcttgccaggagtggctttaaggtgaagaagcatgaaactcagtctcttgcctgggtgcatgttctcaggtgagtctgtgctcatccccagaatgtctcttagaccaggggtcccccagcgggagtggatcataaggactttccaatgagtgcctgagaaaccaatttccagatcctcactgtccctgaagaaaaggcgcctgaagaaaagggaaccctttcacaatgactctctctctctctttstctccatttttttttttttgtaaaactctcactaaaagctacaaagatgcatcaccacagggtgtgaaagtctccagggcaccaaagggaagatctgaaatattggtataggttctaagaagataattgactctaataactgaaagatatttttcttaagtcagatggtttcccaattcattggtttcgacaaaataagaagacctgagttgttagctgatagatctaaaaataatmtttgatgatagaatttttgggcacatgacttggaaaggggttcaaagaattgaaagtccttctgttacagaactaccttctgtttcatctatcgtttatataaataaggtttcttaataattataattataaaaatagaaatcatgaataaaattgacattgacctctgttacattctagcaataaacagtatgcatccatgaccatatgaactaattgcaaaacacacataaaccaaaacccaagcccatctgattgcaacgagatccttttgttctttttaaaactttatgtcagtatgcttatgattttagaaatacattcatattggctaatagaattcaattttaacataacttattctrtacaatttggaccagaaatttggtatatggtgtaagatgtaaaaaaaggggtgcagtggggggaaatttgcaatctgagttatttttcatctgttacaaatgtgtaaaagattctccctcaaattttgctaatgtaggcaacaagaactatgagaaatttatcttttgttttctttaaagaaaaacccaaacccacatatttttgtactgtaaaagtttttaagaattagtgcaataaaacattttgtagatgatataaaaatttacttttgtgtctaatacttatcaaaacttgcaatattttgaaaataagttgtgcattagtaaatgtaacaataactcatcagcagaaaaaaaaatttaacacctcaagacttatagtcaaagaaaaaaatgtaacagaggcattggatagagacctttaaaagactttcagtcatgcagatgtttttcattgggataatttcttgatggaagtggaatgaataacgtaatggaaaatgaataacgtaaatttctgacttattcaggaacttgtttgtgtaaatttaaaatggatcatatggtatcatatcacaaaggtaactagatagcattaagcaaattcaatatttagaataaggcagatattacattytttgcaattatttaaacttatgctgaaaagtktttagatgtcatttgaaaatgaaatggggtacatagatttaaaaaaattaggaggtatctgatcaaaaaaaattgaaaaccactgtcttagaccacttaaactgcttgctgataaacttagcctagagaagctcattttttaaaacctcagactcaaattacagaacctaggttctataaaacagcatgtcacaattgaaagttccagcttcctccttgctttgtacccagatctgtggctaactccctcagatatctttatggagttgtatccacttggttccattcrtgagatgtcacttttccccattgcttgccctcctaaagggtaacatcttctytgttgtgtttctcaggatgaaggggcagtgatctaccagatttcagacatttctaatagggatgtccacgctaccaatgaggagaaactgacatccaygtcatgtggtcagaaatcaggtgcgggcraggtgaaaggtgaccagagggagacctggartactttgaatgttccrgtgctcccatgtctaccataaatcatgcgttttcatcctcagaagcaggtatggaagcatatcttcatctttctaatgtatatawgcatagaaatgcctgaaagcctaatgaagcaggaggcaccttacagagcttaaagaattgggtcactggaaggatagatttaggattattgacctatgcttttgcttctttatcgagaaagtggacactaacaaaagtgcttattgaagtactaggaacatagggatacttgtggcaagttgtataggagacrctgatgtgtgtgagactgcttgaatttctttataattttctgtcaatatggccatatcttgtagtggtgtgttagttcatttgcgttgctgtaaaggaatacctgagactggatgatttataagaaaaagaggtttatttggttcatttttcttcaggctgtagaagaagcatggcaccagtgtctgcttctggtgagggactcaggaagcttccaataatggcagaaggcaaargggarcaagtggtcacatggcgagagggaaggaggaagagagaggggtaggaagatgccaagctgtttttaagagacatatcttgcagaaactaagagaccaagaagtcactcattaccacaaggaaggcaccaagctattcatgcgggatacgcccctatgacccaaacacctcccattaggcctcactcacctccaccattgggattaagtgtcaacatgagattcagaggggataaatattcaaactatatcagatggcctataaatatgtcatacattatgcagccataaaaaaaatgggttcatgtcctttgcagggacatggatgaagctggaagccatcattctcagcaaagtaacagaggaacagaggaccaaacaccacatgttcttactcttaagttagagttgaacaatgagaacacatagacacaggaaggggagaatcacacaccagggtctgtcaggggggtgggggaaaatgggagggggagcataaacacaaatacctaatgcgtgctgggcttaaaaactagatgacaagctgataggtgcagtaaaccaccatggcagatatatacctatgtaacaaacctgcacattctgcacaagtatcccagaacttaaagtaaaacaaaaaataaataaaataaatatgtcatatgtctgactttttatgatttttatgttcattgtttaacttacagwaataataactaatacatatggtgccttatcatgtgcaggcattgttctaagtgccttgcatatacttattcatagcaaggtgttactcttttctccttttttcagagaaacaaagaaggcaaaaagttaagtaacttgactaaagtctcttggcaagtgtaggaaagaaaagtggtatctttcctcactcatcacaaggttcatggctgagacatctctaacagaagacagatcaacaagacaaaagcatacaaatatatttaatataagttttacatgacattagagcctccagaaatgaagacccaaacagggaaaactgtacttttatggagagttgtgcagaagtacaattggaggacagaagggtgtgatctaatggtaataaactaggggaacttagtcaatcctgtttatttcaattcctcttagtgtctgtgtctttcaggataaggactttgtttttctctgggtgtagggaggacccctctsttattaggtcttatgacctattttcatgggaaggtctgagggattcctttatggcctgcttcaggggagagggcaggagaggtgccaagagaccttcctgcttctgctgtgtcctcaggtgcgaaggcaccagattttggtgaagtgtgttctgaaccttgtcagtagtaaatggtagaactacatttgactctaagcagtctggttccatgatcgtttagccacaatgtcaaagtgtgaagagattatcttaatgaccctaggctactgtaaattttcctggtacagtgtgttaggttgaaactgaccagtgcactgtaaaatctttcttaaagtgctaatgaggaagttggactaagcagggctgaagcctcttactgatggacttttcagatcattctagagctaagcccctctcctgggtaccaagttagatggatggcyttaaactttacttatgaaaagtttagaaacatgttcctgactacattaaacattattaaaaacttagatcttcttaaacaacataattttatttgtggcattttatgcacagaattttaaaagtcatgatctgccattaagccagggaagcagatggaaagtcaggacttggagcaatttattccccctggtctccttcccatctcagatcccagtctctcttctataaaatattgggccaagcattgttcctgattttgtccaacactgccttctgccctgacatctttcccaaagaccgtgttcaccattctgccggtttctctgggttaatcctgagtattcttgcacctgccttcatttcgtccatctgaagtgttttcctttgctgcctcctacacagatctgcacatcccttcaggtctctcctgcatgctttatgctcccatgacatttcctattccccttcctgttccacagcacctagtgcagtgtgtcaattacaggaaagtaatattataaacttactgaggttagagactaggagacggtcattttcgagtcacctttgacacagtacatggtaaacatttattgaattatattcttcctcacccgaggaaattccttcaacgaaaatttatacagacagctgggacacttgtttacatctcttccccctactgtttgctaactttgaagatagtactgtatgctatcttcatactgaaagaaacctgagcccaacctgtccctccacgttcaggaacttataaagcatggcggacacgtcttcttccatcctttggcacgtctccttctctatgcctaagacagaaagtcatttttatagttatcccaataagttggttccttattgggaaccagatttaaaaagggggaagagatttaaagaaccgrctacactgtaactgatcagccacatcacaggcaagtggaggctgctgtactggtgtgggggtggctacaggccctgttaggtgaatccagaccatgtcctggggagtgtccacttggakttgggtcctgatggctacttacctagatgttttctgggaaatgagaccctcacacagccatggggaggaagccgccatgttggtaaaatgcccagtttctttctctgagtacatggcaagtgggaaacaaggtcataccatggaatctgggcttgagcctttggtagggagtggggaggttgaaggtttttgaacaagggagtgagggtcacatttgtgttttaaataattaactgacaacaatagtagttagtgattgccatgtggaggattgtagctttaaagttttgtatgcttttctgtatttttatgtttacttcaatgagtgcatcttctggttattttaaatgtcaccctccaccctagtagagtagaggatagacctgagatgaggaagcccatttgaagggtatggaggaagaatgagtttagatttgctggcttaaattttaaagcttattatcttatctgctgcattaattagatcaaggccactcttctgggctggaatttaarttcattcagacttgatgataaaaaaaaaaatcagtgttacagtgtgttcactttctgccgtaatgccatggttagtccagtgcattagccaaaattgtaatggacacaagggtgcaggcttgctgttctttctgcctgaaggttgatgacctgtttgtggctgactaacctgtgctcttcttctgaatgtcatggacttgtaatgctgaactgcacagcgctcagcagaatgccagcgctccttttaaatmaaattttggaatgctgtttatgtgttcactgtcattcttggcctgcactggggtttccaagagcctttcactagggggaaaagcaaccaacttattgggataactataaaaatgactttctgtcttargcatagagaaggagacgtgccaaaaggtggaagaagacgtgtccaccatgcttgtaagttcctgaatgtggagggccaggtggggctcgggtttctttcagtatttgttttgaagcccatgtgaatttgttaaactctggtcagtgttaggtgatgaggataaaatacaaataagacacagtttcttcacttgaggaacatgtagtctctgcagtgttctgtacagtagccctagctgcaggtagctgttgagcacttgaaccatagctagtcagaattgagatatccggtatgtgtaatgtgcaaccattttttgaagactcagtacaaaaagaagcataaaatgtctcaatattttatattaactacatgttgacataatattttggatatattgggttaactaaggtatattattattattattattattagagacagtctcactctgtcacccaggctagagtgccgtggtgcaatctcagctaactgcaacctccacctcctgggctcaagtgatcctcccactgcagcatcccaactagctgggacaacatgagcatggcactatacctgctaatttttgtattttttgtagagatggggtcttgccatgttgcctaggctggtcccaaactcctgagctcaagtgatctgcccaccttggcctcccaaagtgctgggatcacaggcatgagccaccacacctggctggtttactcagttcttgaaacaaactttaaacttcctgattcccaacttattcacccataaaatgagcagcacccatctgcctcttcagagtagttgtgaggataagatgaaatgacagtgtgaaagatttaagctgtaaagtgctagaatacactagtggtgtgctagaatacactggtgtaatgttgataggaaatacgtgggaaagagtgtgaaaaaagacagtgaaaaagaaaagagtgaaaaggaagaatgacaaacactgtctctggagccagctggtgagtaacttatatgctgtgaccttttaagagcaactccctttgaacttcccaacataaattaatttctacatccttaaagcactgaataaacattgtataaagaaatttcagcawgcaaaacatggaatgaagaaatctgtttaatccagcatttactttttaagtttctctgygtcactctgaagtccattcctatgcagtttgtgcccagcagtaggtggtggctgggactaaggccagagtacagtcagtggtggggagtcagtctcaccttgcttttcagctgttgttctgcagcatttttgatgtaggaagttaacttttctttttaagttttaaatttcttaagagctgagttcatttggcttttctgggmgtgtcactgttagagtacagcaggggctggtactgctccattgtgattgaggacaaatgacaggatgagcacagtcagcatatggccacagatcagtgatgcaaattctcctgccrtgaggacatagccacaggaatctgtggcatctgtgctcactatagatttgcaaccgggagtccattgagttctattgtctatacactggtctttgttggtcttcaattgtgaacgttttgagggactgggagaagcatttggcaaacatgaaatgaggcccttttggaaggatatgattgattgawttagcatgttaattaaagacacactggatggcccaggcctgaaagagatcttctggtcaattctgtgtgatggtagcttctataataaggttgtccagcttgcttaattttgttgttgttgttctgttttgttttgttttaggcttttatcagcctgaagccatggtttttagtttctgtctctagtgataagcagaaaagacggatgaggaaggagctttactgtcccaaccagaaayarcaactaagaatccatgactgtattctctccctcggatactcctgtkagctattctgcactttttggtaagcaacttcaaggactaaggaatataaaaagttaaatcctaggagactggaaaagatggctaaagtaggccrtgtcatacattcctgcccttacacctgtgagagctgttgcattttgagtagtgaggcttgtagatgtggccaggccaagagaagagtggccggggagagctgccaagctgaagagtccacttgcctggagacatcaaaaaccatccaargtctgatctcccacctccagctcagtatgctgcctgttctgaccccamatgtgttagcattaagttgttaagcagatagactgaatgcatttgccccctcaagaaatgactgagatgccaaactctgtaatggacattgatgttttcctggctaagaagatttttaggaggcttatttcccaaattctcatgaaccttgtagccatgggaagccctgagagtctgtttcctaaagttgacttaacctggggagtctggcttaaactaagaactcacaagagactgaccaacgaaatgctattaatttagacttggaagtgtaacagcaaggtgaatcaagtgtcaacttgacttcctgtaatacctccctttaggcaagttacagtttcttgataagaaataaggcacaggaggttaatgagatgrtgcatatgtytaggagtgtatcagctatctactgctctgtaacacatgctaaaattctgtttctgagtgtttcctagagaaagggtaaaactataatgactgaaaaatttaaaagccactggtctaagttcaccttagactttctgtttagtatttgttcacacaagatataactgattgattataatcaataattgatcagttatgcccacatttaagattaagattattccaggtcactttggcattttggatttcccaaagtattaaatgactcatttatataaaaagtttacttctgtaggtgggaggaatagccagcaaaaaatccttytgggaaggaaaaatactacaaagtccaagttcttgtgaaaaaacaaacaaacaaamaaacaaaaaacaacacttgccagtgtttggctctggaaccttctggaacctgggtttataatagaagggagccaccacctcagaaggcraagtgctgcccrgaagggagtgaaaaacttagtagcaaggaataaccaacacacaggcatggaccttgacttatatatggccgttttgcatacaaccaacaatggcggacacccagcaagctgggttatggccggaggtcgctatggagcagtggaagttcattatgatcctgaatcatctgggtggaagagtggttcggagttcaaatatatctgctatttctgcctccttagtcctgaaagttagtattttagaaacatttccacctgcagggggtggagccaagatggccaaataggaacagctccagtctacagctcccagcatgagcgatgcagaagatgggtgatttctgcatttccaactgaggtactgggttcatctcamtggggagtgccggacagtgggggcaggacagtgggtgcagtgcaccrtgtgtgagccaaaacagggagaggcatcccctcaccygggaagtgcaaggggtcagggaattccctttcctagtcgaagaaaggggtgacagacggcacctggaaaatcaggtcactcccaccctaatactgcacttttccaatgggctcaaaaaacggcacaccaggagattatatcccgcacatggcttggagggtcctacgcccacggagcctcactcattggtagcacagcagtctgagatcaaactgcaaggtggcagcgaggctgggaaaggggcgcccgccattgcccaagcttgagtaggtaaacaaagcagctgggaagctcaaactgggtggagcccacacagctcaaggaggcctgcctgcctctacaggctccacctctgggggcagggcacaaacaaaagacagcaataacctctgcagacttaaatgtccctatmtgacagctttgaagagagtagtggttctcccagcatgcagctgcagatctgagaacgggcagactgcctcctcaagtgggtccctgagtcccgagtagcctaaccaggaggcaccccccagtaggggtggactgacacctcacatggccgtgtactcctctgggacaaaacttccaggggaacgatcaggcagcagcatttgcagttcaccaatatccgctattccacagccaccrctgctgatacccaggcaaacagggtctggagtggacctccagcaaactccaacagacctgcagctgagggtcctgactgttagaaggaaaactaacacacagaaaggatatccacaccaaaaacccatctgtamatcaacatcatcaaagaccaaaggtagataaaaccacaaaaatggggaaaaaacagagcagaaaaaccggaaactctaaaaatcagagcacctctcctcctccaaaggaacgcagctcctcaccagcaatggaacaaagctggatggagaatgacttcagaatatcaaactactccaagctaaaggagaaagttcgaaccaatggcaaagaagttaaaaactttgaaaaaatattacatgaatggataactagaataaccaatgcagagaagtccttaaaggacctgatggagctgaaaaccatggcacaagaactacgtgacgaatgcacaagcctcagtaactgatgccatcaackggaataaagggtaacagcaatggaagatgaaatgaatgaaatgaagcatgaagagaagtttagagaaaaaagaataaaaagaaacaatcaaagcctcaagaaacatgggactatgtgaaaagaccaaatctacgtctgactggtgtacctgaaagtgatggggagaatgggaccaagttggaaaacactctgcaggatattatccaggagaacttccctatctagcaaggcaggccaacattcaaattcaggaaatacagagaacaccrcaaagatactccttgagaagggcaactccaagacacataattgtcagattcactacagttgaaatgaaggaaaaaatgttaagggcagccagagagaaaggtcaggttacccacaaagggaagcccatcagactaacagctgatctctcagcagaaactctacaagccagaagagagtgggggccaatattcaacatttttaaagaaaagaattttcaacccggaatttcatatccagccaaactaagcttcataagtgaaggagaaataaaatcctttacagacaagcaaatgctgagagatttaattaacaccggacctgccctaaaagagctcctgaaggaagcactaaacatggaaaggaacaaccggtactagccactgcaaaatcatgccaaaatgtaaagaccatcgagactaggaagaaactgcaycaactaacgagcaaaataaccagctaacatcataatgacaggatcaaattcacacataacaatactaaccttaaatgtaaacaggctaaatgctccaattaaaaggcacagactggcaaattggataaagagtcaagacccatcagtgtgctgtattcagaaaacccatctcacgtgcagagacacacatagactcaaaataaagggatggaggaagatctaccaagcaaatggaaaacaaaaaaaagcaggggttgcaatcctagtctcggataaaacagactttaaaccaacaaagatcaaaagagrcaaagaaggccattacataatggtaaagggatcaattcaacaagaagaactaactgtcttaaatatatatgcacccaatacaggagcacccagattcataaagcaagtcctgagtgacctacaaagagacttagactcccacacaataataatgggagactttaacaccccactgtcaacattagacagatcaatgagacagaaagttaacaaagatatccaggaattgaactcagctctgcaccaagctgacctaatagatatctacagaactctccaccccaaatcaacagaatatacattcttttcagcaccacactacacctattgcaaaattgaccacatagttggaagtaaagcactcctcagcaaatgtaaaagaacagaaattataacaaactrtctctcagaccacagtgcaatgaaactagaactcaggattaagaaactcactgaaaaccactcaactacatggaaactgaacaacctgctcctgaatgactactgggtacataacaaaatgaaggcagagataaagatgttctttgaaaccaacgagaacaaagacacaacataccagaatctctgggacacattcaaagcagtgtrtagagggaaatttatagcactaaatgcccacaagagaaagcaggaaagatctaaaattgacaccctaacatcacaattaaaagaactagagaagcaagagcaaacacattcaaaagctagcagaaggcaagaaataactaagattggagcagaactgaaggaaatagagacacaaaaaacccttcaaaaaatcaatgaatccaggagctggttttttgaaaagatcaacaaagttgatagaccgccagcaagactaataaagaagaaaagacagaagaatcaaatagacgcaataaataatgacaaaggggatatcaccactgatcccacagaaatacaaactaccatcagagaatactgtaccaacacctctatgcaaataaactagaaaatctagaagaaatggataaattcctggacacatacactctcccaagactaaaccacgaagaagttgaatctctgaatagaccaataacaggctctgaaattgaggcaataattaataacttagcaaccaaaaaaaagtccaggaccagatggattcacagccaaattctaccagaggtacaaagaggagctggtaccattccttctgaaactattccaatcaatagaaacagagggaatcctccctaacccattttataaggccagtatcatcctgataccaaagcctggcagagatacaacaaaataagagaattttagaccaatatccttgatgaacattaatgcaaaaatcctcagtaaaatactggcaaaccgaatccagcaacacatcaaaaagcttatccaccatgatcaagtgggcttcatccctgtgatgcaaggctggttcaacatacgcaaatcaataaaygtaatccagcatattaacagaaccacccacaaaaaccacatgattatctcaatagatgcagaaaaggcctttgacaaaattcaacaacccttcatgctaaaaactctcaataaattaggtattgatgggacgtatctcaaaataataagagctatctatgacaaacccacagccaatatcatactgaatggataaaaagtggaagcattccctttgaaaactggcacaagacagggatgccctctctcaccactcgtattcaacatagtsttggaagttctggccagggcaatcaggcaggagaaggaaataaagggcattcattaggaaaacaggaagtcaaattgtctctgtttgcagatgacatgattgtatatctagaaaaccccatcgtctcagcccaaaatctccttaagctgataagcaacttcagcaaagtctcaggatacaaaatcaatgtgcaaaaatcacaagcattcttatacaccaataagagacaaacagagagccaaatcatgagtgaactcccattcacaattgcttcaaagagaataaaatacctaggaatccaacttataagggatgtgaaggaccccttcaaggagaactacaaaccactgctcaatgaaataaaagaggatacaaacaaatggaagaacattccatgctcatgggtaggaagaatcaatattgtgaaaatggccatactkcccaaggtaatttacagattcaatgccatccccatcaatctaccaatgactttctccacagagttggaaaaaactactttaaagttcatatggaaccaaaaaagagcccacattgccaagtcaatcctaagccaaaagaacaaacccagaggcatcatgctacctgacttcaaacaatactacaaggctacagtaaccaaaacagcatggtactggtatccaaacagagatatagaccaatggaacagaacagagccctcasaaataatgccgcatatctacaaccatctgatctttgacaaacctgacaaaaacaagcaatggggaaacaattccctatttaataaatgatgctaggaaaactggctagccatatgtagaaagctgaaactggatcccttccttacaccttatacaaaaattaattcaagatggattaaagacttaaatgttagacctaaaaccataaaaaccctagaagaaaacctaggcaataccattcaggacataggaatgggcaaggacttcatgtctaaaacaccaaaagcaatggcaacaaaagccaaaattgacaaatgggatctaattaaactaaagagcttctgcacagcaaaagaaactaccatcagagtgaacaggcagcctacagaatgggagaaaatttttgcaatctactcatctgacaaacggctaatatccagaatctacaaagaactcaaacaaatttacgagataaaaacaaacaaccccatcaacaagtgggcaaaggatatgaacagacacttctcaaaagaakacatttatgcagccaaaaaacacatgaaaaaatgctcatcatcactggccatcagagaaatgcaaatcaaaaccacaatgagataccatctcacaccagttagaatggcaatcattaaaaagtcaggaaacaacaggtgctggagaggatgtggagaaataggaacagttttacactgttggtgggagtgtaaactagttcaaccattgtggaagtcagtgtggcgattcctcagggatctagaactagaaatatcatttgacccagccatcccattactgggtatatacccaaaggattataaatcatgctgctctaaagacacatgcacatgtatgtttattgcgacactattcacaatagcaaagacttggaaccaacccaaatgtccaacaatgatagactggattaagaaaatgtggcacatatacaccatggaacactatgcagccataaaaaaatgaatgatgggttcatgtcctttgtagggacatggatgaagctggaaaccatcattctcagcaaactatcrcaaggacaaaaaaccaaacactgcatgttctcactcacaggtgggaattgaacaatgagaacacatggacacaggaaggggaacatcacacaccggggactgttgtggggtgggggtagtggggagggatagcattaggagagacacctaatgctaaatgatgagttaatgggtacagcacaccaacatggcacatgtatacatatgtaagaaacctgtacrttgtgcacatgtaccctaaaacttaaagtataataataataaaagaaaaaaaagaaacatttccacctgtagtagctaaataaaacacatacaaaggatcaacatgtaacgggagcagctgtcacttgtttttgtttttgcgttttaaaaaaagaaagttccatttacattgagcttatcatcatgagaaacttaatcatgggtgtgtttctcttttacccatgtggttcttggtgagtgaccactattataagtacacttttycccttttagatcasaagaaaacttttccaggttgtttgttcaacagaagataagaccactctatattcattataacagtttctctttagacacttctgtaattagatttgttttttaaaaggcttccccctgctgattttycccccygcattgttttaaagggggtgatyagtttagtaatgaggaagttgttgaaggatatctggggttaagaagctgaagactgatgtattcaatgtaatccttttccccacaggggctgctggagtcctctgcagagaaggcccctgtgttggtgtcctgtggaggtgagagcccccggatgggatctgcctcagcgactcagataagacaaccatgctcacattaatgagagaaggggtaaaactctcctgtttagtctgcttatcactccatttctttgtaaggcccatgtaccagcaggtagattgcatctcttctggctcaagttatcccaggctggaagttcttatttcctgcagcttgtttaggttgtaaaaagggttccctgtggcattggtgctggagtcctgacattctggtgtccagggaaaaatgtttacaatctgaaatattcttgagaattttgtacctttctttatctttcagccctgatattttaaatgtctaaatttgccagctttgttcacatatgtaactaaatcagtgcttttattttacagaggatatatgctcatgcctaaacatttttaaatgtttttgtagtcacacacggttgtttcctactttcatctattctttgactaaacagttcaactctctgattcctgtattgagtttcttgaacagccttcattcaaaataggtcactgctaggccttccttggttatctgaaaaaatatgaaagaccctgttgtgtaccattaatcagttaccaccctctcctgttatatttctgtgctgtatttagtaagtttggtttgtgtgtttcttgacaattacacctgttcttaaaggaaggtgtagcaattttatttttacagtatgctgaaagtggttaagcccctcagctataggtcttttaaagctttataaaatagcatcaagttgttaatgaaagatgtcagctagtcctattttcaaaacttgggagtagtggtaaggaggcataccaaaatctttatttttatttatttatttatttatttttttttttaagagacaagatctcactctgtcacccaggctgaagtgcagtggcacaattatagctcattgcagccttgaactcctaggctcaagagatcctcctacctcagccacccaagtggctgggacaacaggcatgcaccactgtgactggccaaaatcttgtaaataaggaaaatgactttatctttttcctgggagttaaactgcgagatgaccatctaatggatcaaagtaaagagatgcctggttacctgaagcagacagagtaccttctaggttcttgagatcccaataaatataacaaatcttccaattagaagagagaggctcagccagggaagtacagtaagctgagagctgtggctgcccatccaagccccggttgcccatccaagcccctgcccagggcaaatggagcttgaggcaatgaatttagagtgtttccttccagttagcaagagcatcccaaatatgagtctagattctggactgacaagcaagactctacctgtgatgatgaatgctatagctagatgtagccagctcagggcattatgtgagccccctccttctaactccatttttatgaaactgtcaaaaatctctatagaaagagaatatgctgctcatgccaagttccaatgctctgatttgtggcagtttcattatcatcctaaataaaactggtggcctggcatcagctgtgattacacggccttggttagggtgaatacctgccagtcagatggctctgtcacagtcagggtcttggcctgcagagctgagagctagaccctggaccaaggtaaagttcacggaggctgaaaataccacttggaatttctgggagatgttctactcacctttatcttggtgtctacaccccagcatcctgtgtggctgagagtacacttttccaaatgtgtacaaacatgaaatgttgaggtttatattcctaatataaacaaactttgtaagagtaacccttatctttctggttacttgtccacaatttactactctttgtttaagttagtacagaagccttcagccctctgtgtaagctgcttctctatgccttcatttttcttgtgagggctcccatgcacctgtcaatctgcgttcttttctcctgtcactctgtgtgatgtcagtcccagctggagataccagaagtggggaggaaaaaccaaccttccctccagtattgatggaagacaatgactacctgaagctccccatcatgatacttatgggtcaaagcaatgccactttctgctgaccagaagatactatttccaaagggcaagaaccttagagattatctagttcttctctgtgattttatggataaaagacttgaatagcaaagtgaccatctaaagctacacagtaacttggtggcagtgaagtggtaggattgttagttagggattctctctctctttttttttttttttttagaggagtctttctctgtcacccaggctgcagtgaagtggtgcaatctcagctcactgtaaccactgcctcccagattcatgtaattctggtgtctcagcctccaaagtagctgggactacacgtgtgcaccaccactcctggataatttgtatatttttagtagagaagaggtttccccatgttggtcaggctggtctcaaactcctgacctcaagtgatctgcctgccttgggctcccaaagtgctgaaattacaggcatgagccaccgtgcccagctgttacttaaggattctttccacccaggcactttacctttcttgaagcctgtaagaaaaataaaggtggctgaagtgggaggattacatgagtcaaggagttcgaggcctgcctgggcaacatagggagacaccttctctgcaaaaaatacgaaaattaactgggcatggtgaaacatgcctgtaatcccagttacttgggagactgagctggctgggaggatctcttcagcccaggaggtgaaggctgcaatgagctatgatctcaccactgcactccagccagggtgacatagagacggcctgtctctaaaaaaaactaaattaattaataaaaataaaaattatatccctaagttttaaaaaggagagaggctgctcattatcttgataagtatattggagtctatgtaaatggcaccccctagagttgtgccctgacttgcccacgtggctgctcatgagagccctggtgacaggacgtgttttacaatggagagacaaagagtctgtttaaggaaaaccaaaccaaattagacaaagctttcaataacaatgtcagaaaaaaaggcatctttgcagatgcaaatagaagggctatgccttactcttgcaaacctattagaaagaacacttgagctctcagtggcggaagagaacttccttggcctgcttttctgaccatggctgccaggctcctgtcagccatgcagtgagaaagctgctttcatctttgtttggcctggatgctggtcctctgccccactctgcacctgacttgctggtcccaagtcccccttgtcagggctgaccaacctccctgccaatggctcctgggaacaatgatgactccagatgggcttcatccagcctagtcggccttgccttggctatagcccagggaacataactttaagaagtgggaatttcagaatgttgggcaaatcttttttgtgggaggcagggtcttgctctattgcccaggctggaggacagtggcatgatcatagctcactgcagcctccatcccccaggcttaagccatccttccgcctcaacctcctgagtagctgggaccacaggtgcatgccaccacacgtggctaattttttaattttttgtagcaacacgttcttgctttgtggcccaggctggtcttgaacccctaggctcaaggaatccacctgccttggcctcccaaagtgttgggactactggcatgagccaccatgcctgctcagagaaatcctttaacaaacagtagaatcagtttgaatataagttgttaagaaatgggaagttggtgggtgagagggcattgagttgggggtttgtgaagggaacagaagtgtctgactggacacttgaaagaagtttccttaaaatacgaaaataattttgcagaggcatgtttatgcaaaaactgatctaacgaaaaaacagcttacacactggaatcaaaatgtcacttgattcccagagagaatgagctcagaggttaaaaagagagggatcctttccaactatttaatgtgttttgaaaggcccttttgggtttaaattggtttccagaagaacacaggcccttatcccaggggaggatgcagatgcagatagaaaggccgagaagctcacctttcagaataggggtggcaactgggaagagggcagagaggtcaaccagaaatacttcatcagtggttgtttcagctgataaattcaaccagattttaagatcaaccatttggaacttgagaactttccactaggtttgcttttgtttatcctgatttcctggctattgaagtttgcagggagtgatatccctggaagatctttgatagcaggtccagattttctaaggcactatctttggaatggaaaacaattctgcaagttggtttgcaagagtcataaataaactttgagtgggcagttttaataagtgtgctgcctgagctgttaaggtaattgaaaatgcagctgcccaactgcaagcagctagctggtcaccgcaagaaaggggaaccagcatgttcctgattcccagtccagtgcttttattataagcttgatgctatggtctgaaagtcaacttcataaatataaaaatagctccagaattgaagttgatttacatatgaagtgcagaataagatgccttgttttcctaggcatcatgcaaaatctggaactctaagcaacttgtcactgtctaaggccatcaaatcaaaagggaacaagaaaggtgctcctacctagttaggagagaagaggggacttggggacctgaggacctagggactaaggagctggcaggtaggcaactcttaaagatactgtcatttcggaagattctttctttctgcaaaaccttcaactttctccccctcccccaaagccagtgcctcaaattctacctctagagcttcctttgtttgctcctgggcacacctttgtcactgcactttagtatagcagtccccaacctttttggcaccagggaccagttccatggaagacaattttcccacagactgggggatacagggggaatggttttgggatgaaactgttctacctcagatcattgggcattagattctcatacgcagtgcacaacctagatccctttcaggagcagttcataatatagtttatgcttcagtgagaatctgatacagacgctgatttgacaggaggtggagctcaggcagtaatgcttgctcacctgctgcttacctcctgctgtgcagcctggttcctaacaggccagtctgccactcaggggttggagaccactgctttaggacaacaaaagccaagggagttcatttactgcaggtgacttaacgggaacactggtcatcccacccaccccctctccatccctgcctctcatctttacttgcaacacactcctatgcaactttttccctgttgttttgtgtccaaaatctcccaagtgtcagaggtgtttgaacccgagcaactccatcttgaataggggcttggtaaaataaggctgagacctgctgggctgcattcccaggaggtttaggcattcttagtcacaggatgagataggaggtcagcatatgatacaggtcttaaagaccttgctgataaaacaggttgcagtaaagaagctggctaaaacccaccaaaaccaagatgatggcaaaagtaatctctggtcatcctcactactacactcccaccagttccatgacagtttacaaataccatggcaacatcaggaagttagcctatatggtctaaaaaggggaggaatgaataatccatccctagtttagcatataatcaagaaataaccatgaaaatgggcaaccagcagccctgagggctgctctgcgtatggagtagccattctttattcgtttactttcttaataaatttgcattcactt

SEQ ID NO: 6847 - DNA, 28553 bp, Homo sapiens
gaggtggaggttgctgtgagccgagattgcgccacctcactctagcctgggcaacagagtgagactccatctcaaaaaaaaaaaaaaaaaatcttcatcccttttcaggctctaatcaatcgtggggttaacctggatcccctgggcaagtggtcaaagactggactagtggtgtatgattcttctgtgcccattggtaagtctcccccacccaagagcccttctacctctgtccctgtccctaccgcatgtcacagggtggtccttctccacaggtgctacccccgagtacctggctgggcactacatgctgcagggagcctccagcatgttgcccgtcatggccttggcaccccaggaacatgagcggatcctggacatgtgttgtgcccctggaggaaagaccagctacatgggtatgagaggggcaggcaggtgggattcatcgggctgtcttgcttttgaaagtagatggggttgctggggttgctgactcactagtgctcatggaacacaatgtgcaggtagctagcagggtggtgaggaccagtttctggagtcggcctgggttccagtgtgccacttactacccatctgactatggattctcttttgtcatccataaaatgggatggtaattgtgcttgggttggcccttgtattacgcttggattgtgagggttaaaatgatgcgtttagaagtccttggcagtgttcagcacatagtcagcagccataacttttattaagctgctgtcacttaaaagaagtaatttagtatgtaggaccacataggtgtttggtaaaaatgggaaaaccacatcggtagacttgccgatcaccaggggctagtgcagagtggatcagcctatacagtaggcaggcttgttgggagcgaagttgccttgaggtgatgacacttctcatgtggattcctggacaggagggtgggagcaagtgtggagacagtggaactggctgatcagcactgttactgccctctctttagcccagctgatgaagaacacgggtgtgatccttgccaatgacgccaatgctgagcggctcaagagtgttgtgggcaacttgcatcggctgggagtcaccaacaccattatcagccactatgatgggcgccagttccccaaggtgagactcgagctgtgtgtcttctgaggcttcttccggttgaccttctcccttcctgacctcaatgtttagactcgaccctagtaaatattgccctgctggttgcagaagagacatatgattcatctgtatcttttctccaggtggtggggggctttgaccgagtactgctggatgctccctgcagtggcactggggtcatctccaaggatccagccgtgaagactaacaaggtgaggagtcaggtggtgggcccctgagaggccttggctgggtctcgtagagctggaaactgagatggggacaccctctgggctcccctctcctcctgaggctgcctttgggtctctttttgggacaggatgagaaggacatcctgcgctgtgctcacctccagaaggagttgctcctgagtgctattgactctgtcaatgcgacctccaagacaggaggctacctggtttactgcacctgttctatcacagtgagacctctgccatggcagagcaggggaggctgggctggggggctctttgccccttagagctcccttcagctccagctctgctttttcctccgttctttgtcttccccccacatccaggtagaagagaatgagtgggtggtagactatgctctgaaaaagaggaatgtgcgactggtgcccacgggcctagactttggccaggaaggttttacccgctttcgagaaaggcgcttccaccccagtctgcgttctacccgacgcttctaccctcatacccacaatatggatgggttcttcattgccaagttcaagaaattttccaattctatccctcagtcccagacaggtaagtaatctttttcttcccttcgtcaccacctttgctctttccacctttcaggaggctttatggtgtgacaagaggaagggaaaggaaagattcatgcatcccttactccagcctttgcatgcttggctgagagaaccctctcattccagctagaattgcttttgagtgctggaccccatgtgaacaggctaaagtgttcatatggatggaggcctgttcctttattctgccaagtggctgcagttgttcagcactaaatgcattccaaatgcaggttgtggtttcttttccttcttggcacagggtggacttactggtactggacctctgctggtccagcaatctcagcactgggttggaacagagctccacagagctttgtcagcagttctctgagcccttcacactcattgcagattgttttctcagccatcttgaggagtctggcctggatctcaagggaagggtggggttttctgaaacagccttgagagcactgcttactgggatataaccctgggtttagttggaagagggagagaagtgctactttagaaatagtagaatttgtctgggcgtggtggctcatgcctgtaatcccagcactcacctgaggtcaggaattcgacacggtgaaaccctgtctctactaaaaatataagaattagctgggtgtggccaggcacggtggctcacgcctgtaatcccagcactttgggaggccaagacgggtggatcacgaggtcaggagatcgagaccatcctggctaacacagtgaaacccccatctctactaaaaatataaaaaattagctgagcttggtggtgggcgcctgtagtcccagctactcgggaggctgaggcaggagaatggcatgaacccgggaggcggagcttgcagtgagctgagattgtgccactgcactccagcctgggcgacagagtgagactccgtctccaaaaaaaaaaattagctaggtgtggtggtacgtgcctgtagtcccaactactcaggaggctgaggcaggagaatcacttgaacctgggaggtggaggttgcagtaagccgagatcacgctattgcatttcagcctgggcaacgagcaaaactccatctcaaaaaaaaggaatagtaaaatttgctataacttaaaaagtacatattttaattatcccgcacttcatcacaattcacatggaaagaaacttctctgatttaaaaaataaataggccaggtgtggtgatggctcatgcctataaatcccagtactttgggaggctgaggtgggaagattgcttaagaccacgagtttgagacctgtctgggcaacaaagggagacagtagttccagctactctggaggctgaggtaggaggatcccttgagccccaggagtttgaggttgcagtgagctatgatggcaccactgtactccagcctgggcaacacagtgagactctacctcaaaaaaaaaaaaaaaaagataaataaagcctagtgcttcaaattcatttagaagaccctgcgaggccgggcgtggtggctcgcgcctgtaaccccagcactttgggtggctgaggcaggtggatcacctgaggtcaggagttcaagaccagctggtcaacatggtgaaacctcatctctactaaaaatacaaaaattagccggacatggtggcgcacggttgtgattgtccggaggctgaggcaggagaattgcttgaacccaggaggcagaggttgcagtgagccgagatcacaccactgcactccagcctgggtgacagagtgagattccatctcaaaaaaagaaaaaaaaaaccccaaaaccctgagaatcacctcttccttacagcatcttgttacttcctgtcctcaagagggcgcagcttcctgtagaaaccttttggcccaaggataggcagtgatttttttttttttttttttttttttgagacggtgtcttgctttgtcgctcaggctggactgcagtggtgcaatctcagctcattgcaacctccaccttccaggttcaagcgattcttgtgcctcagactcccaagtagctaggattacaggtgtgtaccaccatccctggctaatttttgtatttttagtagagatggtttcaccatgtgggctaggctggtcttgaactcctggcctcaagcaatccacttgccttggcctcccaaagtgctggaattacaggtgtgagccaccacgcctggcctataggcagtgatcttttaatacaaggttcaactaggacttgagtaaaggccaagttatattaagtaatgggaatttaggtaatctgctcttaggcactgacctaattgtgtggagctcctgcccaggaaatggcaattctcatattttaatatgagaatattaaaatatggtgataaggcccattttctgacaccatctgtttaattttaaccccaggaaattctgaaacagccacacctacaaatgtagacttgcctcaggtcatccccaagtctgagaacagcagccagccagccaagaaagccaagggggctgcaaagacaaagcagcagctgcagaaacagcaacatcccaagaaggcctccttccagaagctgaatggcatctccaaaggggcagactcagaattgtccactgtaccttctgtcacaaagacccaagcttcctccagcttccaggatagcagtcagccagctggaaaagccgaagggatcagggagccaaaggtgactgggaagctaaagcaacgatcacctaaattacagtcctccaagaaagttgctttcctcaggcagaatgcccctcccaagggcacagacacacaaacaccggctgtgttatccccatccaagactcaggccaccctgaaacctaaggaccatcatcagccccttggaagggccaagggggttgagaagcagcagttgccagagcagccttttgagaaagctgccttccagaaacagaatgatacccccaaggggcctcagcctcccactgtgtctcccatccgttccagccgccccccaccagcaaagaggaagaaatctcagtccaggggcaacagccagctgctgctatcttagatggttgaaaactagacgggtggctcactgccattgtcaccaggttggaactcttgcctctgtgaggatgccttctctactgtgcatacccatgaaatttaatacacattttaaaacctctggccactgagtatttttgagggaactgggtgctgcctttgccgctttaagggtaaagatgggaggtgggactgggatcttctgaggagagggaatggttgggtgctactgagaaataaggtcagttttaggctcctgcatccttgggttttcccaggaagggaaagccctggagtcagagctaggggtgattgaactccggggagaggagggcaatagaagtgtaggggaaggcggggcacactagctcatgcctgtaatcccagcactttctgggaggccaaggcgggtggatcacctgaggtcaggtgttcgagaccagcctggctaacatggcgaaacctcgtctctactaaaaatacaaaaaatcagccgggtgtggtggcgggtgcctgtaatcccagctactcgggagactgaagcaggagaatcgcttgaacctgggaggctgaggttgcagtgagccaagatcgcgccactgcactccagcccgggcgacagtgagactcggtctcaaaaaaaaaaaaagtcgtgtaggggagatgggcttgccaccagaacccatggggtactggaggtcctgggctttacgccaccccggctggagtccaggcggtggctcccctcatcacagggctcggcctcagacccggaaaggtccagggtccggcctccaattggagcctgtcattggcttcccctcggcccgccccctgacctctgccccgctgccgagccgcctgattggtcggctctgtcccgccggcgccgcattggctcttctggctcgccttccatccctgctcctgcaccggtctgcatctcccagcagaaggcgcagccatgaatccgttattcggccccaacctcttcctcctgcagcaggagcagcagggcctggccgggccactgggggactcactgggaggcgaccacttcgccgggggaggagacttgcccccggcgcctctctcgccggccggccctgctgcctactcgccgcccgggccgggcccggccccgcctgccgccatggccctccgcaatgacctgggctccaacatcaacgtgctcaagaccctgaacctccggttccgctgcttcctggccaaggtgcatgagctggagcgccggaaccggctgttggagaagcaactgcagcaagcgctggaggagggtaagcagggccggcggggcctgggtcgtcgcgaccaggcagtgcagaccggcttcgtcagccccatccggcccctggggctgcagctgggcgcccggccggccgctgtctgcagcccttcggcgcgcgtgctgggctcgcccgcgcgctccccggccggccccctcgcgccctccgcggccagcctctcgtcgtcctccacctccacctccaccacctattcctcgtcggcccgcttcatgcccggcaccatctggtcgttctcgcacgcccgccggctcgggccgggactggagcccactctggtgcaagggcctggcttgtcgtgggtgcacccggatggggtgggcgtccagatcgacaccatcacgcccgagatccgcgctctctacaacgtgctggccaaagtgaagcgggagcgggacgagtacaagcggaggtagggattgggaaagggggacaggtctctctgtgtcataccactcacaacgggccgcgagttggtgtgggttccgaagaatcaggggtgaaaagaatgagagtaaagtttgtgctgtgtaatgaggagcttggaagcaattggatgcagggagactagaatccgcagagaatgcagaagccctgctcgtgacaggaagaaggacgctgggagcggaacacggggggattcctacttttccggcttgtctctgccatccaggcttaactgcgggttttgtgcggtgtgaaagggactggggctctgccctaccggtctcagccctggggcaggttagggatataaacttcaaaagtaggaggcaaggatatagcgtaaatttgggagactaaattgagtgaaactggaaggggctggtgagggaggggctgtaccttgcaacgagtgattctttcacascccaaggtttcccaaagaatattgatggaaaccaggtacctgctgtggtttcataggaaaagctccgggacctcaagccattgcttgagtaggtcaacaaactgggaaaagaaagagtgaagggaattcactagggtgagggtggagagcagggctgacaggggaatcttggcagtataaagcgccagtggggagggagagtggagagccagcaggggactgagcagggagaagctgggatatgggccctccctaggaccgcgaggccgcggggcgggcccggtgcattctgtggatgaagatttggctgtctgagaggagcccggccccaaggggcaagggaaagggatgtgatgccaggagtgctggctgtataccaagtggattcctyagatggctgataaccaagccgataggacaggagtgagagcagaggtagtgtcttgcagactccaacccaagccttgaggagggagcgggtgactgacaggctttggtttggcggcctcccctctcatctcagctattatgaccccttgtgggcgggcctgggaactacctatgcagcccagtgtggcggagattcagcactgggtgaggattggccgaatgttctaggaaatgaccgctgggtctaggggcgaccttcagggatctccaccctgctggagtttaccagatcacagatcagcaggctttctttttttttttttcccataaatgataatattttattatagaaaaagcatcccaaatacaggatttcgtaaacactggtaggtgaacaagtgcaattttagaagtaaatgcaaagtaaagaggcaaaacctacaagcattttgccttcagaagaagatgtagtgttctcctgcactagtgatcccacccagaacacaaatgtggctctgtctcccgtgaaagcatcagatttgctttctgagctcagtatgcccatttcaataattgcaaagtgatggcaagaagtggcgttgaacacatgactacagacccttgacttaaaatattgagacagggacttgctctgtcatccgggctggagtgcagtagcgtcatcacagctcactgcagcctcatcctcctgggctcaagcaatcatcctgcctcagcctcttgagtagctgggactacaggtgtgcactaccatgtccatgcctggctattttttttttttctttttgcgttgtccaggccagtctcaaactcctgacctgatcagcaggctttctgagcttgagtcctgtcctcgtgctggcttccttagttgtggtccatgttatgtgtccttgggagtttcagttgtcctgaaatcatcgttctgccacccagaaccagcctgctctgcccctgcaggagttaactacgcgctcagcagtggcacaggcacagttctggaatacatccataaccacaggaacaactgctgttctcaggagcattttttttttaaactgaaggagcgtttgtccttggtccagctgtccaggacaggaaggagttattccttggggactgattagctcatcgctctgcagcacgctgctgtgtagagagccttagctggattcggatggtgcgtgatactggcagtgactcttcttcctccctagattccctgccctcattctggtctctttatagcaacactgtaactcctgtcttctgcctggaaggcctgggatggcttgagcgctacactgggaggtagctaaaggcctcctgcgttctattttcagctcccctgccttgtgcgtgacctttttttgagcccccattttcccaacataggaatggtccctgctttctctcttcaacccagggatacagttttttggaagagagatatttggtccatgcagaacacatggatatcgctctcaaattctgcccatgttaagggaaccttataagtgagaccagatggaaatggaggtgaaaatgaacctgtctgtgtgaagtctggccaaagaacaaatagaactgtagtgggcttccagatgattcatttgtagattttttttaccctgtaagatttccttaggcttaacctttagctataactgccttacttaagtttcttccaggctctgttgagctcactgtcagatagcccctcctgccctctttcacacatcttgtccagggttagcgtgcccttgacaggcttactgtctccctccagggactcgtgggctcccggcgcatgagggcaccacagttcatgccttcacatcatagatgaagaaaccaagacccagaaaagataagggtcttagctaagaaaacataatctgatgcgactggttcccttagtggcctgactgtatgcatgagaatgccagggaggaggggagaagcacctacgggacacacagggaagggggctgggagccaggaaggctgggagctgggctgtgtggggagccagcagggtggtggctgggctggctgcctcctcctgctctgcccagcagggaggggcagtcgaggtgatgtggaggagttattattaggaatactgcagtgcggctgtgaatgaggagatgggacccagaggctgacacaggaaggaagatggagggaaggggaagaaagggcttcacccaaggcttcagaagctgcccactcagattttaattttcttgctgtcttcttggccccttcctaaccacctttcttgtgttgaagtttctctcttggtgcagttcccctcccttctcgggttgacagaagtgatgagctcacaggaacaggatttgagatgtgctgctacgccagctagactgcagggccctggaatgccgggcgggtcctaagcagcacgttgccctggcttccatctctgtgatggaatagaatatgcactgcctgccatggctgatgagacatgacaaagctggctctgggaagcatgccctacctaggaccctgccctgtggcccagggtgtcgtccggcccacttgcagtcttaatctctgaattctgggccctggaacaggctgtgtctagttctcayttgccgtactcaccgggcccctttacatactctactttctctttccctctgggtttgagtgctagtaaccccaggctcgtgtgtccactgctgtcatgctgctgtgggacttccggcctctgagccagtctggtcacctctctgtgactcccttagaggaggctctgggtgggtagtttctggagctagtggggaaggactttgagtgtctcctaccaggctcttgacccactctgttgatacactatgtgtcctgcagatgcttttacagggttaaatgataccacaagaggcagggcagcgggctcgacgagctctgttctgrtgcgggcaggaggcgggagcccggatctgtgcgactgaaggtgggagactgggccgggtggacctggtggtctggtgtgggcaggaggtgggcaatgaggccagccggacagctggctgagctggggcctgagcagggatgggcatcacggaggaccggagcctcagcacttgcccaaacagagctcctggtgcacagcccggaggttccgggaaggcagctggcgagctcgacgcccatcaggaagcacagagccgcgtgacagctgcagttggtcaccagctggctggccaggcattcctgtgccctgctcctccccatccagggaaccagaactggggtctgaggcctgagccagagaggtggggacagggagccatgggggcagggaaggactctgtacctaagctctctccgcccttcccatgtctgtcaggtgggaagaggagtacacggtgcggatccagctgcaagaccgtgtaaatgagctccaggaggtgagggtggcgccccacttgctgctggtgcttccctgggtacccctgtctgcccatgaccctgctgccgtctccctgtccctccttggcatctttatcttcctcccacctcggcagtgccaccaacatcagggtttctcccaactgcaggaagcccaggaggctgatgcctgccaggaggagctggcactgaaggtggaacagttgaaggctgagctggtggtcttcaaggggctcatgagtaacgtgagtgcagccccaggcttcccgagggtcgaagtgaggcttctgaggccagaagagtaggcccttctagtgttggcctgttggcctcccgtccacggctcctccccttctctttgctttccttccctttttcccctagccacccctaactccagagaaagacaagsaacaaaagtctcggtgttgcgtcacagaggtggcgcagcttctgagggcctggggttgcagagcagttagtgagcagcttctggggtggaggctctgcagctggcgccggggcgctgggccgattcctcagcctctgaggcctcacctttggcgtggggaaataaacgcgtgcgctctgcaggagtattgtgagggtggtcatgtactcgggacagtgcccagcatgcagtgttagctggaagagtgttagctgttgcgattattatagtcctttctccactcttataattcccaggagtctctttctctctgggaatgtaagttctaggaggatgaggaccgctagtcgttccagtgagccccctgcatgtcccaggcactggccatgccctccagggcttccgtttggccagggagcagtggcccgagccgccccatgcccagcatattcacacagtgctgtggggaggccaccgctacccaggaagaggggtgcagtcagctcagggagactccacagaagaggcaccggtgcaatgtggtgggaaggatgaggaccttgccaggcctaattcgtccttgtctggagaactgggcgcctcctcactgttccctgggctccctggacagaacctgtcggagctggacaccaagatccaggagaaagccatgaaggtggatatggacatctgccgccgcatcgacatcaccgccaagctctgcgatgtggctcagcagcgcaactgcgaggacatgatccagatgttccaggtgaggacggagctgccctctgctctcaggggtgggtggggcaggtggatgcttccgtggcrgctggcctggaacgcaggccctgcctcctgcttggggagccttacctggcaactggggccctcacggggctagactggggggtaaggagcagcatcaggaggggcatcgtggaagctgtctctaacgccgtctctcccttccccctctctctcctctgtctgcttcctctcctctcttcctctcatcttctctcttgcttcctccacagaagaagctggttagtttgatctcacgcaagcttattaatgtcccagtcccagtttctaagctgcctaggcctcctggccctcagtttgggcccgctgggctcttgagcacggatttttttctgccctttcccttttccttgctcttccccctttttctctctatctcttgttctcttgactgcatttctttctctcccttctcccccggctttccagatctggatgtgattcaggttctcttttgtacacattgcacactcatcctccttgcgtcctaaagcttttttttttttagttgagtcatttaatcaaaaagactttttttagaaaaaaatttcctcttgagccatcatgcacatctgactgcagccccagcgagcccttccttccttgtctgactgctcttcttctcgatttcttcttgttctgccttctcggtttgcagccctgacccccgctgtgtgtctggcccttggtgactgtccgtgtttctgttcctgtcattgtaactgtgacttttctctctgtctgcccccccttcctactggttcatgcttctcccccattcccaccctctctgcccggcctcccgctcccgccctttctcctcatgcacccggcctcgtctctgtagtctctgcacttgtctcccattaaggtcccatccatgggggggcggaagcgggagcgcaaggctgccgtcgaggaggacacctccctgtcggagagtgaggggccccgccagcccgatggggatgaggaggagagcacagccctcagcatcaacgaggagatgcagcgcatgctcaaccagctgtgagtccgcaggccgtgctcccgcagcaccgacgccacagcagcccaggaggccggagctccccagtcccccgccaggacgaggccccgcccgccctgacacccgggttccctgtctctaggagggagtatgattttgaggacgactgtgacagcctgacttgggaggagactgaggagaccctgctgctttgggaggatttctcaggctatgccatggcagctgcagaggcccagggagaggtaacctctgctcccggcctcagggccctctggctctgcctctccagcctgamgcccactcccccgctcctctccttgctctgtccccccatgtggctgtcatcctctacctgcgtctcccctcttcctttatccttttgcttttctttctccagtttctttaaccagacttcctctctctctctctccctgacttggccctttggaatgcgtcccatcccatccctccttggctggcctcccccgcttccctttctactccagcagcaggaagatagcctggagaaggtgattaaagatacggagtccctgttcaaaacccgggagaaggagtatcaggagaccattgaccagatagaggtaagggcaggagcggaagccaggggcgtggtgtcccagagggttttgagtggggctgcaggcgcagtggcctcatccctgctgcaggaccctagagaccaaggtcttgggaggaggagtgatctctcagctatagtcctcctggtgggctctgaagacctcaggctctggaaacagacagatatcggttcaaatctcagctctgttacttacaaccaccctgaacttgtaataagttacttgttccctctgagcccctcctttcctttcctttcctttcctttctttccttccttccttccttcctttctctctctctctctcttcccctccccctctatccctccctccctctctcccttgtctttctgtcctttcttttttgagacaaggtctcactctgtttcactctgttgcctaggctggagtgatcctcccaccccagccttctgagtagctgggcccacaggtgtgtgccaccatacccagctaatttttatttgtatttttttgtagagatggkgtctccctgtgtttcccaggcaggtcttaaactcttgggcttaagtgatcctcctgcctcggcctcccaaagtactagaattagagacatgagccatgtgtccagccctacacctgtttctttttctttctttctttctttctttctttttttgagacagggtcttgctctgtcactccaggcccactgcagccgtgatcttctggatccaagcaatcctcctacctcagcctcccaagtagctgggaccacaggcgtgtgctaccacgcccggctaattttttgattttttttacagagaacagggtgtcactatgttttccaggctgccctcaaacttctggattcaagcagtcctcctaactcggccccacaaagtgttgggattacaggcatgagccactgtgccgggcctttttatttgtaaaatgaggaatttaataatacctcacctatagggttgtttagaagatcagatgaaataatgcatatatagagcttagggcagtgtctggctcatagcgagtgtagcatagtggggactgttttattattattaacactatcagtgccatggcactcagagatggactgggactttcctgtttcttccactcagcctttgagataacagagaaatctccatgctttttcccaagccttgaagtaccttctagaggtacctagaggcaagtggagctggtgctttagctcaaactctaggctttaggagctgcaagaaggatttgtggaggccgggcgcggtggctcacgcctgtaatcccagcactttgggaggccgaggcgggaagatcacgaggtcaggagatcgagaccatcctggctaacacggtgaaaccccgtctctacgaaaaatacaaaaaaaaaaaattagctggccgtggtggcaggcacctgtagtcccagctactcgggaggctgaggcaggagaatggcgtgaacccgggaggcggagcttgcagtgagccgagatcgcaccactgcactccagcctgggcgacagagcaagactccgtctcaaaaatacaaacaaaggaagaaggatttgtggaaccacagaatggaggttgctgttgctgtgggaggagggatggacgggacccccgtgagctctcctggcctggtgaggtggtcctttcccgacgctctgactttgggagaggcatggagccttctctgcgtctcagcctctcttcaggcccacatgggagattcatacgtagtccccccttatcttcagggcatgtgttccaagacccacagtggatgcctgaaaccaaagatagcactgacctcctgatagcttgggtccagttgctgtcaactggaacgtgtttctgttcatgtctcccacccacacattcaatgccttttctatcttaactaagcacttagcgtgcgctgtggcggtaccttttgcagttcgaggtgtgacagcaaaactggcacaaatttctttttccttctttacaatttcacggatagaagattcattcttactgtagagcttaccaacctcagcatcggattctttttcttattaagttgaaaacttttaccttttcacttaaagggagcatattttggcttctctttcacatatccaaattgccagcatcactactcttgtgctttggggccattatgaagtaaaaataagggttccttgaacacgggcactgccataccacgacagtcaatctcatcactgagatggctcctaagtaactaatgggcaggcagtatagacagtgtggatccttgggacagagggagggttcatgtcctggtctggatagagtgaggtttttttttttttttccgagacggagtctcgctgtgtcacccaggctggagtgcagtggcttgaactcggctcactgcaagctccacctcctgggttcacgccattctcctgcctcagcctcctgagtagctgggactacaggcgcccgccatcacgcccggctaatttcttttgtattttttagtagagatggggtttcaccgtgttagccaggatgatctcgatctcctgacctcatgatccgcccacctcggcctcccaaagtgctgggattataggcgtgagccaccgcgcccggcagagagagtgagattttatcaggccactcagaacagcgtgcaatttaaaacttaggaattgtttatttctggaatatttcatttaatattttcagatcaaggttcaccttgggtacctgaagccgtggaaagtgaaaccagtggataaggagagagtgactttattcttttcatttatttatttatttatttatttttttgagacgtagtctcgctgtgtcgcccaggctggagtgcagtggcgcgatctcagctcactgcaagctccacctcccaggttcacgccattctcctgcctcagcctccagagtagctgggactacaggcgcctgccactacgcccggctaattttttgtattttttagtagagacggggtttcaccatgttagccaggatggtctcgatctcctgacctcgtgatccacccgcctcggccttccaaagtgctgggattacaggcgtgagccaccgcgcccggccttgactttattcttattgctgtcacattggaggtgtttgagaaggaagtcgagaaattattttcctatatactcattctcccaacacacatcaaactgtcctgctcctgcatcaaacctggttttcttggccaggtagatgaggtttcctggatttgtgctgctagctaaagacatggcaagggaaaccagtactccccaccctcccgtctaccgcggctcactgtttcctcctcctgcctgacctgattcttgtctccctcttttggatggtggatttaaggtttgtgttttcactgtgccttcaaccaactaggggcctttgtgcggccatcttcgtgagaagagatctcgggctgccatctctccctagtcttccctggacctcaagtgcccagtgtaaaacatgatctgaaagaacgaaaataatatcttaaatggaatcatgccttttaagctatttttggctgggcgtggtggctctcgcctgtaatcccagcactttgggaggccaacgcgggcagatcacttgaggtcaggagtgtgagaccagcctggccaccaacatgtgaaaccccgtctctactaaaaatacaaaaagtagccaggcattgtggtgggcacctgtaatcccagctacttgggaggctgaggcaggagaattgctggaatctgggaggtggaggctgcagtgagctgagattgtgccactgcaccacagcctgggtgacagagcaagattccatctcaggaaaaaaaaaaaaaaaagtattttcaaatcatctgactcctcctctctcccagtgcaatgactttaggcagcagtccccaacctttttggtaccagggactggtttgtggaagacagtttttccactgacccgggggaaatgattttgagatgattcaaacattacatttattgtgtactttattactatttttaaaaattattattattatttttagagacagagttttgctcttgttgcccaggctggagtgcaatggcgcaatcttggctcactgcagcctccgcctcccgggctcaagcaattctcctgcctcagcctcccaagtagctgggattacgggcatgtgccaccacgcctggctaattttgtatttttagtagagatggggtttctccatgttggtcaagctggtctcgaactcccgacctcaggtgatccaccacctcggcctcccaaagtgctgggattacaggcatgagccaccgcacccggcctgtgcactttatttctattattattacattataatatataatgaaataattwtacatctcaccataatgtagaatcagtgggagccatgaacttgttttccgcaactagacggtcccatctgggggtgatgggagatagtgacagatcatcaggcattagattctcataaggagcacacagcctagatccctcgcatgcacagttcacgtaaggtagggttcaggatcctgtgagaatctaatgccgccgcggatctgacaggaggtggagctcaggctgtaatgccagtgatggggagcagctgtaaatacagatgaagcttcactcacttgcccactgctcacctcctgctatttggcctggttcctaacaggccacagacaggtactggtccgtggcctggggtttggggacttctgcattaggggaaccgttaggaggacttgctgacctcaggagtacccaaggtgcctttatctttgtgacctttgatctctcagggtcactaagatggagcaaggtaaagccaaggcccagagtggtgggcgggaggcagttcttccccaccgctcctcacctctctctgtctcctcccgtcccacccccaagtctgttcacacagygagcctgcagttttcaaggtggcttgtcaaggacatctcctgacatgcacgttcacctcctgaccttgttcctgctgtaaatttgtgaattaagtggggacatagacatatgcagagactactggtggcagtactagccttgtatttcagtagaatatatttggttcatttccttcttcccagtctccctgagtgatggttccagaacccagctccctgcactccggttcttccaaggtggagaaattggggtgtaggcagctgatctgaacaagggctggtggcactgtattttccccctgggttgaacagtcaccgtgtcctgctcctcccactactgtggggccccagctgtggatccaagcctgccagggaagctgtccccactagggcttctcacccagccagccgccatctcaccccaaatgtcactgtcctgaccatctctgctgtctggccctgtaacctgtttccttctttctctaagttcccaccctctctgtccaatccacattatggcagctggtatcctccccgttctcttcwctcaggcagtcacgaacgtcatctccaggaagtttcattttgcttccccttgcggcccctgccctttgtacccaaaacaaagagaggcagtcgactgtccctggcactgagtttgtgctgcctgggccctgcctctccgcctgcctcagagtgtgggctgcagaatgggcccggggagggagacyggatttctttgattctgagccccgtgttttccacgtgtgacatttctgaaatcargacaggtctcagaatcaatggcacctccaatatgggagtcttccytttagtgtctgaaaatggcttttaggtgagaaaataaagtgataaggagagaatggtaagaggattgggcccctttcagcagttagccaggcttgtatgccacgggtcacagagagagttaattcccttcgaggtctgggtctgccaggatgaggaaaacctgtcgctaacccttacgggagctcacagtgcagtgaggggacagcccaggaccagcgcagtacaggggatgaggggtgagccgggccccataggaacctgtgtggccctgggagcctgtggatctgctccatcccgcccacactgactttcctcaccactcttatcagtcttaaaagaacacagcctgcagcagtacctttgcattcctccataggcaaagatttccaggaaaagcagaggaaacaatggtgtattcgctgccttctgccttggtctggtttattttaaaatctgagccttcagtaatggctgcctgggcccccggcccagccactgctcttggcgtgttggcctcctggcgggggcaacagaggcgctgtgaacgccacctgttaaccccgatggccctgcctgccccaccacagctggagttggccacggccaagaacgacatgaaccggcacctgcacgagtacatggagatgtgcagcatgaagcgcggcctggacgtgcagatggagacctgccgccggctcatcacccagtctggagaccggtaggcgcctcccctgggcatggggccttccagggggacacagcggggagaaaggttggaacacagccccagagaccctcaggcaatgactgggtcacatcttgctgtggggctgccctttgggagttacctggtggggctggcccagacccacagctctctcccttggcagttggatgagctatgtccattcatgacgggagggctgaaacctcccaaggccaccagctctggtggttcccctggttagaggcagtttaaaaactggcaaggaacagaagggttgtgggggcagatttttatctaaagtcagggccatgatttgtgcatttgaccctgtgtaagttacacygcaacaagaaagtgaatttttaaaaatcacaaaaatactgcagatagacataaagccaaggccctagagtcagggtgctggaggctcagcagcttctctcctactgtgacttcagctatttctttttttttttttttttggctcactacaacctccgcctcccaggttcaagtgattatcttgcctcagcctccaaggcgcccgccaccacacctggctaatttttgcatttttagtagagatggggtttcaccatgttggccaggcttgccttgaactcctgacgtcgtgatccacccgcctctgcctcccaaagtgctggaattacaggcgtgagccatcatgcctgacctcagcctctgagttcccaagacacaggcggggcccatttccctgtcagggtgggtttggagagagttcagtccctgccgctccctcgccatcccgcggccccgccctcgcttccggtacttctcacgggctgccagagggtgaggcagcaggaggaggagtgccgtccgtcttcaggattcctgcctgccccaaggttgacaactggtgtttttttctagaaagtctcctgctttcactgcggtcccgcttagcgacccgccgccgccgccaagcgaggctgaggactccgatcgcgatgtctcatctgacagctccatgagatagagacctgcctcccccttgcacccgaggccctcgcagcagggagctcagcgaggcagagggtggggctgcacagaggggaacatcagctgcagctctgcaccaggccggyccctggggactggggcgctcctccctcaggctttctccctcagtcttggcttctccagggctctggggtgtctggagctaggcttggccctaccattctggggccatttccaccacagttggggctctcctgccttcacgcgtgggtgtctgctacttccccatctttaaaatgctgccagagcgattgcggcccctcaccttgtccacgtatcaggaatgtgaatgtgggacctttcctccatccctgttgtccggagccagctcactgtcttccacactggtgctaactggcccaggcactggagtggaatagaatgcagctggaggctacgcatggcctctgcagcacacgcagctggagagggcttctgtccctgtcagcggcagagggcgttggggctggccggggcaccttgtccctgctatggtccacrtgctmacgctgtccacctgccaggtggagtgtatgtggctgtggccctccctcgtggaggtgccgtgctttaaagaggccttagtgcccgggatgggcacagtgttttgaagggaggtgggagctcttgctctcctggtcactgcagaatgacagagaaggtgaagctccatgcatgtgtgcgcgggtgtatgtgcgctcagggtctctgtttaagtatcagctaaagatgtgcttcctccgtgtctgtcatacactgagaccaacaggctacagtgtccctgattcttggaaaagcctggagaagctggggagatgcggttcmcaatgcctcggtataggaggctgtgttgagctgacattcaaatggattctttaataataatgaaactggcgagtatttattgtgcactttggtgtcactgtctcaagcacttcctaatattcactagtttgaactctgaggtaggtactttttttttttttgagatggagtctcatactctgttgcctaggctggagtgcagtggtgtggtctcagctcactgcagcctctgcctccggggtgcaagcgattctcctgcttcagcatgcctgtagctgggactataggcatgtgccatgaagcctggctgatttttgtaattttagtagagacggagtttcaccatgttggccaggctggtctcaaactcctgacctcaggtgatacacccaccttggcctcccaaagtgctggggttacaggcgtgcgcgctctaccgaggtatgtacttttgtctccactaggtaagcacacgtgcaaagtgaggcccgggagtaactgcccaaagcaactgagccgttcagtggcagagccaggggtctggacctaggtcccagctacacgccttgcccctacccaagttcccctaaggacgatgatggaaataagtcaccctgacacatctcagttcatcttcctcaaaactatgcgaggtgggcatttttaccgatttttaaacattatatagtccttaccgccttgggcatggttttaggtacttggtttacctagatgaatcctgcttgaagaccttaggggctggccacgatgtcctcagataagacacgagggcacagaaagcaatagagcacgtgctcaagacctcacagctgcggaggccaagctggaattgcccgctgcagctcagctccaggctgagctccactaaccagtcagcgtcagagcccagtgcgagccctgacttcctccacctgtcagcctccctggggctgcccacagaatagcttcttccatgtttggccaacagcagatagcctaggactggagcgaggagaggaaaaggccttgttctctgaagtagtggtgccagcttcctgtagcactcaagacgtctgagcgggaagcaaatggttctcgaagcaagcaaggctgtttggaggccctaccctcagtctgaggagaacataccaggtccctccccagcaagaatgtctcaccttgacacaagcccagcttccctcccctctgccccagaccctagaataagacaggacaagtaactggttgagcacagggtactttattgatggtacatgacaaggtgcggctccctaggcccctcccctcttcaaggggtctacatggcaactgtgaggaggggagattcagtgtggtgggggactgagtgtggcagggactccccagcagtgagggtctctctcttcctcttgtgctcttgctggggctggtggtccaggggtcttactccttggaggccatgtgggccatgaggtccaccaccctgttgctgtagccaaattcgttgtcatacctagaagatgaaaagagttgtcagggccctttttctgagccagccaccagagggcgccagaccctgcactttttaagagccagtctctggccccagccacataccaggaaatgagcttgacaaagtggtcgttgagggcaatgccagccccagcgtcaaaggtggaggagtgggtgtcgctgttgaagtcagaggagaccacctggtgctcagtgtagcccaggatgcccttgagggggccctccgacgcctgcttcaccaccttcttgatgtcatcatatttggcaggtttttctagacggcaggtcaggtccaccactgacacgttggcagtggggacacggaaggccatgccagtgagcttcccgttcagctcagggatgaccttgcccacagccttggcagcgccagtagaggcagggatgatgttctggagagccccgcggccatcacgccacagtttcccggaggggccatccacagtcttctgggtggcagtgatggcatggactgtggtctgcaaaaggagtgaggccctgcagcgtactccccacatcacccctctacctccctccccaccttgaaaggaaattatgggaaagccagtccccagaacccccaaccccagggttgcacgcagccccggcagggaggagccagtcttggatgagaaaggtgggagcctcagtcccattccccagctctcataccatgagtccttccacgataccaaagttgtcatggatgaccttggccaggggtgctaagcagttggtggtgcaggaggcattgctgcaaagaaagagggagcggggcgcaagtcaggggagcgtgtccatagggtgccaggctggccgcttctccacgggccctgccttcctcacctgatgatcttgaggctgttgtcatacttctcatggttcacacccatgacgaacatgggggcatcagcagagggggcagagatgatgacccttttggctcccccctgcaaatgagcctacagcagagaagcagacagttatgaacccgggtcctgcctttgcagggctgagtcagcttcccctcccgcgggccctcctgcactcaccccagccttctccatggtggtgaagacgccagtggactccacgacgtactcagcgccagcatcgccccacttgattttggagggatctcgcctatgggggtgggggggagatggggacaggaccatattgagggacacaaggttaccatatacccaagggagccacaccatcctagttgcctccccaaagcacatttcttccattctgtcttccactcactcctggaagatggtgatgggatttccattgatgacaagcttcccgttctcagccttgacggtgccatggaatttgccatgggtggaatcatattggaacatgtaaacctgggggaatacgtgagggtatgaaggggctgcccatcagccaggtggctcctcccacaccagctttggggctcaccatgtagcactcaccatgtagttgaggtcaatgaaggggtcattgatggcaacaatatccactttaccagagttaaaagcagccctggtgaccaggcgcccaatacgaccaaatctaagagacaagaggcaagaaggcatgaggaggggaggctcctccagaatatgtgagcagccctaggccacctccccattaagagggcgaatgcagcatctccttacccccaggagggcccaagaggttgaattttatctcccttgagcttccctgccaggctggcctggcttaaggcatggctgcaactgaaggctccagggctgcccaacacccccagtcatacgaagcccttccaggagaagcggccatgtggggcactgccacccacagtctgggcacaagctttgtacatggtattcaccaccccactatgccaccccaggaatgcttgctgctgcctagctcagctgcaccctttagggagaaaacgcttgtacactcagcatcatcaaactcaaagggcaggagtaaaggtcagaaattaactggacagggcaagcccaccccttctctaagtccctcctacaaaagggacagagactggggcgggtgggaagaggggaagctgtattttaaccccctagtcccagggctttgatttgccaagttgcctgtccttcctagctcttttccagaaatcaggagtgggagcacaggtaagtgcatgtgtgtggggagaagggatgggagagagccccagcccaggcccccagctacagaaaggtcagcagctatatttaacctcagaccagggtgcggtgggagatctggtttccggaagacggaatggggagaagggcaggttccccgaggcgcccagacacccaatcctcccggtgacatttacagcctggcctttggggtcgggtcaacgctaggctggcaggggaagggcggggccgtgaggtgagccggcgctgcaggaaggggccaccaccagaggggccattttgcggtggaaatgtccttttccaactacccatgactcagcttctcccggcttggcaccatgccacagccaccacacctctgcggggaggggacacaagaggacctccataaacccacttctttgatttaccagagaataatctaggaaaagcatcacccggaggagaaatcgggccagctagcctcgctccacctgacttccccgccacacgcgactccacccatcgaggcaggagcgcagggttagtcaccggcaggctttcctaacggctgcccattcatttccttcccggttgcaacatggcggccgctctaccgcaggcgcagcatccggacagggatgcacccgctgcgcactagcatcccggggcctgcggtgccggaggccgtgggggaggggctcctctgcgacacgtgaccccgcagagcgcgaaaggaaagaaagcgtcccccacctaggggtccgggtcgggatctcgggcgggagtagggacctcctgtttctggggactaggggaaggaggctccgggcagatggcgccgcaagggcggagctgcacagggcgccacagcctgggtgcggggctccgccaggtccgagcgctgaccttgagctctccttgcggggaacagctaccctgcccccatacgactgcaaagacccggagcccgcaaggctcgtagacgcggttcgggggcggtcgcagcccagggccccccagccacccgcgaactcacccgttgactccgaccttcaccttccccatggtgtctgagcgatgtggctcggctgcgcggagggagagaacagtgagcgcctagtggccccggccgacacacacgcctcccctcccctcccccaccaggcctccatgcccagcccgcgccgcatcacgtcctccgcccgcccctgcaatgcggaggccgcccgggcccaccccgcagcggcgcgaacacatccggcctgcgcccgcccctgccgccttcaggccgtccctagcctcccgggtttctctccgcccgtcttcacctggcgacgcaaaagaagatgcggctgactgtcgaacaggaggagcagagagcgaagcgggaggctgcgggctcaatttatagaaaccgggggcgcggcggcaggcggtgactcggaccccgcctcccgccaggctcagccagtcccagcccaaggtcttgaggcctgagctacgtgcgcccgtaaaaccgctagtagccgggccctactttctccccgcttttttttttccgcagccgcctggttcaactgggcacgcaccgagcgtgtgggccccgacgtaggggggaagggactgagattggcccgatgggaggtgatcggtgctggttcccaggactggactgtgggcagcaggacactagggagtcaaggacggggacccttacacgcttggatgaaacaggaggactttgggaacgactgagatggggaattggagccggagcccagcaccgctcgcggctgcacgcggcctgccccctcccctttctttctttcaaaggctgagaggcgggaaagttggggaacttctcctcgaggctctgcggtagtgacaccggactgctcaggcaaaggcctaggaggggcccatgggcctcgggcgggggcccgtggttccttcccagcccccacttccccctccccatctcctggctcctggcatctctgggaccgaggcctgggctgggcactgggcactgggcactgggggcctggagaggaaggaggctcgggaggcggcttgagggggagggggaggtttctgcacggaaggtcacgatgtcctgcagccctgtagcctggacctgataattagggcagacaatcccggccctgtgtgcaccagcggctctctccgggctggggccccaggcggaggacaggatggctggtgggggcccagaggcctcccacaaaggcactcctggaaacctgtgggctgtgctgcctagggagagagacagtgtgcctttcattccatccagcctggggcgaagagcgggacgtgagggcggaagtccctccccgccctgggacg

SEQ ID NO: 6848 - DNA, 29921 bp, Homo sapiens
  misc_feature (1)...(29921): n = A,T,C or G, or insertion/deletion polymorphism (see Tables 1-2)
agtcacactcacctacgtacatcctggagtgaaactccttctcctttctgcttccaccattactctaatcctcaaagggttaaccagctttcacacgattttcccatctcccaggtaacttgggcagctgctccgtgctggaaataactaaagacccagtttctcagttcgtgcacttagcaatgcaccccagtagcccctccaacccccagcagagaagcacagccctttgggtaaaagatgcctgggggtgaggctgcaagttggcaggtgcgggggaggggctcccagagagtagggcggggggttgtgggggcggcagggagagtgccccttccctgggtccctccactgggccccgaggttcgcctcggggccgctgccccagagactggggggaagaggaaagaagtggtgtgcgggcaagcaggccgcacacacctggcgccttgtggaatgagagcttaattaattattaaactgagttcccgcgggagggcgcagggccgtgacaggcagggcgggaatggctaggtgggggctggggtggggcaggggcagggaggaattggggatgaagagtgggcgcggggcgccggcccaacccctgggaccctgacaggaaggaaggcgaccctcggtgggcggggcgggggatgtagccgtgaggggtgggtttgcgggcgcgctcggggacccccggggtgagggcgggagaggaatgccggaggaggcggccggggtgaagggaaggggaccgggctgcgaggtcccctccccgcggggtcttgatcccagaacagtagctgcttgtcttcccaggactgggggaggaagcggccggaggagaggagggggcgcgcggagggaggggtcccattatttggcctcctccgcccctaccccgctgctaggaaggggagtgggcaactcggcccccacttctggggagggggagggggatgcccagacaaaaggagcttgtgcctttaaggcggggagtccgggagccagcggggaggggacttctggatccggggtagagggcggctgcgctggacagctcgggagggggcgagggccgggcggacggcggacggcggacggcgggcgggacggccaggacgcgcgggctcggaggaccgcgggacggccggccggccggccggagcccgcgggggcggcggggcgggggcccagggcaggcgcggagccgggccggcaggtgagcgcgctgagggctaggggaagtggccgctcgggctcccggtgcgccaggattggaacgcacccgagcggctctcgacaagagtttgtgggtgggggcgccgaagccttggacgggtcgtctcggcagtgttgcccgagggagttggggttggcaaagggaagtcatggaggcagtgggatcgaggactcctaggtccggcgctcgccacccccgtcgcccgccgcctgcctccctccacggggcgagttccaggctggcccggaggccaggaggatctggcacgtactgggggaggggctggcctgagttttttgctgcggggctgtggggtgtctccgagtttgggggagattccatttaggggagaggaaccggcctgggcagagggagggatgccctctgtctgcgggagtccctctccttcccctcacccaaaaccttgggaatgaaaggggtggggtcggctccccacatcccccaaggcctgccgcagggtgggcaggggagctgactttattcaaagcagactctggggctcgactgaaaggctagaggtggaatcaggcgtgggagcctctttgcccatatcctctccttaccagattacccctgtgagctggagggacctggtgggggttgcatagtaaagggtgatgtgggagccctctgtaatctttagggagagtgaggactggggatgggagaaggcggcagcgggcactggaccgacagatacaggccctgggtaggctcctctacatctggaaaggcccagaattgaagaattgaggcccatgtccgagtatggtgggtggtgctggcactgctgggccccgcctgggcagtgcctcttaccatgaactttctgaagtcgtttttaatcccctggagcctccttttgccaaggagggcaggggcagatgggccctggggatgggatagacaggaggtggccaggaaggcttggcaaggcagtgggcagagccatccttagggctgggccttggccttggctggttccaaactctggtctcagcctgatcagggtttgggagggacttgaggtctgggaggcactgagcctgggcctgccaggctgaatgggacatggctgtggctgtgggagccggtggtatgaagaacagcagatctgtgagagtgcaaatggaccaacactcaggggaggagaaggtagaggcacaaggcttaggagcctgactctggggaggagggaggtggtctgtgctcccagggctcatagtgatgggttgctggacaaagtgggttgggggaccatatagagaaattttgtggcttggaacagtgctctaccctgtttcctgccataccagtctggcatggggtgccagaaatgttgggaggccggcaagttctgcgggatgggcagtgcctggagtggagcccagggtgggatggttgcagttggttggacaattacatagctctgaagctatccccttgggggsggtcagagtgttcctgggagggtcatgcattctcctggatagcatttgcccctttctctgtgagtatgagccagatgctaggatgtgtttccagggggcttggaacatggccagaaactagtcctttgggaacaggtccgggccagtgctggtgggggtggtgtgtkgggggagataagaacagggaaggggactggtgaatggaggaggctgaagcaaaatgttgtgggtggtggatggtggtgggaaacctgctcactstgggctctgtctccagcagctctggggactgacagccaaggacacagggactgatagaaccaggcatctgactggctagaaagacgtgtgttcttgctcatgatttyctcatctttccatctcttgacgatgacagaggtttgggtttaaartgttgtagagtgaggagaagaactaatatttttcaagtgtgtacttcttgacaggcattattagattctttcctgaggaccattatcatttccattttgcagatgaaggtactgacacagagaggttaaataacttgcccaaggcagtgtggctagcaaataatcacgctaaggtttggaaccctggtctcatgccaaagatcatgcttctaatgaagtattttgaagagcaaggctttctttggtgaccttttccaaatgccagcctgaccaaaagtcttgtattcctgatctgtccttccagatggtgctgttggtgatgttaagaggttgaaggggccaggcatggtggctcatgcctatactcccagcactttgggaggccgagacaggcagatcacctgaggttaggagttcgagaccagcctggccaacatggttaaaccctgtctgtactaaaaatacaaaatttagccgggtgtggtggtaggtgcttgtaatctcagctatggggaagccgaggcagaattgcttgaacccaggaggcagaggttgcagtgagctgagattgtgccactgcactccagcctaggtggggcagagtgagactccgtcttaaaccaaaaaacaaaaggaggttgaaggacgtgctgctctgtgggatataggagaaggggtgccgacagatcttggctgagggtgactcagggatgggaggtttggggtatgcagagaattccccagcctgccttctgcgtgtgggtccctgggtgtctgcttcaagcgctgcccatctggcttgagctctcattctatggccacctggggcaagtgctgagtattcctccatcctgtccccgagtgagtacaaatgtcagtgctgstagctcagcaggtttaattacaagggacccctcagggtactctgtgagcatagaggagtgtggccctggtggggacacaggcatgcatggatgacagtgctgtcagcctcatcttattctgacctgggctcagccaggagtcacattaaaggtatcatcatggagtcctcccacctcagttcatgacatttcctccaggaaatgtgggatctgggactgatttggttaccatgatctctataacttgggccagccatataaaactgccatggacctcagtttttgtttatatatatttttcctttcaaatttgtcttgtgccccagggggcaacaggaccagtttctcagggttttggtgaagatcagatggaattagggatgtgaaaagatcttgaacagtttaaagcatagagaaagtgcatggagtatcattcgtccatccatccagtcatccatctactcaatgaacatttattattattattttattttttgagatggagtttcgctcttattgcccaagctggagcgcaatggtgtgatctcagctcactgcaacctctgcctcctggatttaagtgattctctcacctcagcctcccgaatagctgggattacaggcatgcgccaccatgcctggctaattttgtgtttttagtagaaatggggtttcaccatgttggtccggctggtctcgaactcctgacctcaggtgatccactcacctcggcttcccaaagtgctgggattacaagtgtgggccaccatacctggcctcaatgaacacttgtttaggtccttctaagggttgtggatacagcagtgagcacagcaggtcaaaatccttgccttcataaggctgacattccagtcaggagagacagaaaatgaacacataagaaaaatatatagaatggcagttgctgattagagctatggagaaaaagcataaagctgggaaaaagatagagagctccaggaaagggggttgctattttaatagggtggtcagagggagcctcactgataaggggacatttgggatgtgacctggaggagctcttgttccagacagagggaacagcaggcactgaggtcccaggctggcctgtgcggggtgtgttgggaaacagcaaagaggttcttgtgactggggtgcagtgaggaagctgaagagccttaggattatcactgttagctggtggcagatcatgaggtcaggagatcgagaccatcctagctaacacagtgaaactccgtctctactaaaaaatagaaaaaatttccctgggcatggtggcaggcgcctgtagtcccagctatttgggaggctgaatggtgtgaacccgggaggcggagcttgcagtgagccaagatcgtgccactgcactccagcctgggtgacagagtgagactccgtctcaaaaaaaaaaaaaaaaaaaaaaaaactccagattttttcttctgcttctgttgagaaaaatcagatcgggacccactgggacccagtggcaacagtctacagctgctgggtggtgcctgccccatgcacagggtatgaactcttttcctcccagttctgaaccataagctgcttcactcattgacttgggcacttgagtttgtgaccaccaacaaacagtgccttttagggaaattttcaagtatactggctttggggtcagacaaatctggtttagaatcgtggttctctcacttatgtggctgctggatctttgggcaactctttcttcttttcttttctttgtattttattttattttattttattttatttccctcccttccctcccttccttccctctctccctccctccctccttttttccttccttccttttttttttttttttcaggctatggctattgcccaggctagagttcagtggtgcacaatcctggctcactgcagcctccaccaccagggcccaagcaatcctcctgccttagcctcctgaatggcccggtctataggtgcataccaccacaccaggctaatttttttttttttgagacggagtctcactctgtcacccaggctggagtgcaatggygcgatctttgctcactgcaacctctgccacccgggttcaagcaattctcctgcctcagctcctgagtagctgggattacaggcgcccgccaccacgcccggctaatttttgtatttttagtagagacgaggtttcaccatcttggccaggctggtcttgaactcctgaccttgtgatctacctgccagggccttccaaagtgctgggattacggacgtgagccaccacgcctggcccaggctaattttttgaaattttaatagaggcagggtcttgctgtattgcccaggttgctctcacattcctagccttaagccatcctcctatctcggcctcacaaagtgctgggattacaggtgtaagccactgtgcctggttttgggcaagtttcttgtcctgactgtgtcttgggttctcacctgttgattggggatacccttgttgcctacctccaagtaattttatgaggatgaaactcatagcttgtcagtgggaagtgcttaggtaatgagctactagtggtggcagtggctgtgatggtggtattaataccactcctactggatggtctctaatactatctccttccttccctaccagcaacatgtcatggtttagtggcctcctggtccctaaagtggatgaacggaaaacagcctggggtgaacgcaatgggcagaagcgttcgcggcgccgtggcactcgggcmggtggcttctgcacgccccgctatatgagctgcctccgggatgcagagccacccagccccacccctgcgggcccccctcggtgcccctggcaggatgacgccttcatccggaggggcggcccaggcaagggcaaggagctggggctgcgggcagtggccctgggcttcgaggataccgaggtgacaacgacagcgggcgggacggctgaggtggcgcccgacgcggtgcccaggagtgggmgatcctgctggcgccgtctggtgcaggtgttccagtcgaagcagttccgttcggccaagctggagcgcctgtaccagcggtacttcttccagatgaaccagagcagcctgacgctgctgatggcggtgctggtgctgctcacagcggtgctgctggctttccacgccgcacccgcccgccctcagcctgcctatgtggcactgttggcctgtgccgccgccctgttcgtggggctcatggtggtgtgtaaccggcatagcttccgccaggactccatgtgggtggtgagytacgtggtgctgggcatcctggcggcagtgcaggtcgggggcgctctcgcagcagacccgcgcagcccctctgcgggcctctggtgccctgtgttctttgtctacatcgcctacacgctcctccccatccgcatgcgggctgccgtcctcagcggcctgggcctctccaccttgcatttgatcttggcctggcaacttaaccgtggtgatgccttcctctggaagcaggtaggtggccagggaggtagggatggagggcagcaggtggggaatttctcacctcataagcaggtgggggcttagtgaggaagggcgggtgagtcatgggtggaagctgggtgcagggatgtctggctgtatctgggaggaggagcaggaggtgggaggctagggttgaggggtctgcctccatgtgggatctggggtagaggacactgctgaggggagggagggccccaggacccaagcctgaactctgtcaccatgggccccagtctccggctctttagcccgctgaaatagtgcagtctgtagagacagaatgtggggctggaggcaggggtgtggtatatagccccagggccaccgtggggctgaaaaggcagtgcaggctgtgtccaggccttagcatctcagcaggcaagttgacaccagagactgaggcgctggtgctatccctgaagagcagctctaggtggtgatctggaggtatagagcaggttttggatgttgtcagcaagagaggagtcccctctttcctggaccaaggccacttctgggaggacagggaaggtgaagagctggggtcagttctctctgggctggatgtggtttgaatggggttggactgttgaagagaggagcgttaagtctgatcgtatcccaccttccccatgctgggcaccagggacctgggcgcctttccttgaggttctctgtccatgcctgttgctgcctccaggctccaagtgtgtgtgaggtgggactccacggctccgtgtggagtggctgtaggctgacctgcttatccagtgggctgtattcttttctgtgggatcttagacaactagcctcacctctcccagccttagtttcccagtctgcaaagctggaataaaaatagcatctagctcatgttgctgttggggccccaccctttcctagagtggagtagaacccgactgggcagtgttcacacctgggggcagggaggtttggggagtgctggaaggcatggtacccagtgaaggggtttctgggaagtccctttcagagagatgttagtttgtggatctgccatctcctgttacccccctgcccagggagcagaggccagggtccttcaggcgctgctgtaggcacagccccgccatcagcacagcgcctkggtcctccactggaccctaactagagagtgctgtcttgctcaaggttttgaaggcttgtggcctgttgcccaccctgcctcaggcacagagaggaagttgcctggggatcccagggtgagaagctaggttctctggcatgatgcccttctccacccagcctgtgctgcagaacagaacttacctgttttttttgtggtttttttttttttttgagacggagtcttgctctgtcgttaggctggagtggtgcagtggcgcgatctcagctcactgcaacctctgcctcccaggttcaagcgattctcctgcctcggcctcctgagtagctgggactasaggagcgcgccaccatgcccagctaatttttgtatttttagtagagacaagtttcaccatgttggccaggatggtctcgatctcttgacctcatgatccacccgccttggcctcccaaagtgctgggattacaagcgtgagccaccgcacctggccagaatgccagaatgccagaacgtaccttttwaaaagtaactttatagcccgtttgtttgtggagcacgtgcccttagggcactgtcagacatcttaaagggccaggtccttctgccccaaagcttctcttccagggtggctctcaaccagggctttatggctggactgccctcctggggaaggagcttagaggtggtgtctcctttcccccttcctctctggccaggcatgggctgggtgggcatctgttccctgctctcgactggcatggtgcccagagccaggcccagtgcctgactggggaggtgcagtcccagggaggccaggactgtgcccgtctccccaggagtgtctggctacagcttcatgtagtggatctcgataggcacattcttggggcagtggcgaaattcactgctgcccctgtgccagtccttggggccagrgctgcccatacaacttcctctgggctgagaaacattccctgtgcccatttgggtatgtgggtttctagacaggtggggtttgtggcctccttcctcgtctacttgggcagccccttcccagatccacccctactcacaatcacaggaaggagactttgtcccctaccgacccactcatttagacatactgaacagtgtcacccagtgacccaggcccagcttggagtctcctccggtcccctggcatccattttttctcatagtcagatagggatgtgtgtgtacagagttatttcagtctcgtcccccttccccttccctccaccgtgactcacattttcctcttgggctcctggggccaggaagggaagttgcctggtttgccccccttcccttctcccccactgggggctattcttagaaacccccaagggagatagtgtgcccctctcttcacccctgctgctgggagggggagctcagcctagttgatcctgggcctgtgagctggactgggaagggaagctaggaggcccatcccagaggctggagctggaaatggctaggggtgagccaggcctccccctcagttttacccaagaggaaactgaggtcccaaagtttaagtgacctgcccaattttgcaggactagttctagttcaagttagagcccagaacctctggcttccaggaagtgcttctgctgtttctctcccttctccttaaaccagagccctgccccatccaactctggggtggagccgcaagctccaggttaattcctgagtttccagaaacactgaggccagcttcccttagacttgctctctagccagtgccgctgatgatgattgggggctgaacattcctagggtggggccctaggcctagggcctggcagggctgagtgtcagagggagttacaccttgaggggtggccaggcatggtggaccccatctccaattaggggacatcctttgtatcagtagaactgatgactctcaagccagggctctgaggttgggcttgagagcttgactcagtagagtgagtaggaatcttggaaacctggaatgcactacaaagtatggaatgcagtagatagatagtaggattaggacacaggatttggaatctgattgtcctgggttcaagtctcacactagccactaacagctgtgtgatcttggggaagttacttggcctctctgtgcctcattcccttacctttaaaatgggatattgttacctatttcacagagttttaagaaatgtgttaggggccaggtgcggtggatcatgcctgtaatccatgcccgtaagcactttgggaagccgaggtgggcggatcacttgaggtcaggagttcaagaccagcctgaccaacatggtgaaaccccgtctctactaaaaaaatatacaaaaattagccagtcatggtggcaggtggctgtaatcccagctactctggaggctgaggcaggagaatcgcttgaactgggaggcggaggttgcagtgagccgagatcaggccactgcactccagtctgggtgacagagcaaggctctgtcaaaaaaaaaaaaaaaaaaaaaaaaaaatgtgttattcagtgtatagaagacacctacagaatcctggcatatggtaggcagccaacaaactagctaccataataataatgacaatggtgattattgttactaagttatgtcaagtcagggagaggctttagagatcttctcattcttcctctttgggttatagatgagcaaacccaagagagaggaggtgacttgtcctgggtcactcacaggaggatgtagagctcaggtctcctgggtgctgtccttaaggaggagcacctgcaaaaggagcagcgtttgtcttttgtgtggggtgtttgaggagcaggagatacagggtgctggggctgggccccatgacttatctggccctagttggtcttctgcttccagaagctgtgaaaagatctcatttctagtcatggaggattcaggcagttggctgggatctggggtcctgtgggtaatgggagagatatattgcaggggtggcagtggcttggggacagacagggtgcaggaccctggcttccttcctcagagaacctagcaagttgtgtgaatgtgtgtgtgtgtttaggggggcaggcagaggagatggtcactgtctgcctctgccacctcctgcagctcggtgccaatgtgctgctgttcctctgcaccaacgtcattggcatctgcacacactatccagcagaggtgtctcagcgccaggcctttcaggagacccgcggttacatccaggcccggctccacctgcagcatgagaatcggcagcaggtggggctgctccccgtgaccagggcctgcccccaccttacccccaaataacttgcacattggatctgctgccttgtccagttccgtgcagcacagtgtgatggttcccctgggttgtgcgtcacagaggccctgtgatactggggttttgtcctgtccaagggaaggagggcgtagacaggagcacatctgggggctcaatggagggtggtcagagggggctctgatgggggaaggtcaggccacagtccagaagggaaggtcaggtcttcagagaagtctaggagggctctggcgatgtggagagaccaggagggattgcaatgtgagaccaagagtatagtgatgccctattggaaccactgggctaggagcggctgctgctgtcggtattgccccagcacgttgccatggagatgaaagaagacatcaacacaaaaaaagaagacatgatgttccacaagatctacatacagaagcatgacaatgtcaggtagggtgagggtaggaggatgcccagcagggcggggggtctggaagtctttgagggctatgtgttctgttcatcctctgctgtcatctacagcatcctgtttgcagacattgagggcttcaccagcctggcatcccagtgcactgcgcaggagctggtcatgaccctgaatgagctctttgcccggtttgacaagctggctgcggtgagggtgctgggccttgggattgggcctgggtgttgaccgtggtgagagcatagctttgctggcagcagctggggatttgagggcagatagagtatgcgtggagggtggtgggccatgcaggctgggwgggcaagagagtaaaggttacccttccctccaattccttcccattcaggagaatcactgcctgaggatcaagatcttgggggactgttactactgtgtgtcagggctgccggaggcccgggccgaccatgcccactgctgtgtggagatgggggtagacatgattgaggccatctcgtaagcagtgccccattcctaggcttcctggaattgcgggtgccccagactgctcctactttttgatgagacctcaggagatttcctcagttttggctttctctgtctttgaggtctstctgtcactgggaaggggaatctttctccaacctgtgcaaagacccatgyggacccctagactcccagccagccgagatggggccgggagagcctatgcagtaggggagttgggctagagggaatgccatctgtgcaggccagaggggataacagtgattcctcttctcctagctcagttccataagatgctgctgggcccctgctgttgaacacagccttaacatttgtccttgagccccatgcagscttctgctcatgtccaaccaaggctgtgctcccgtcccctgcatctgggtctgtccttgcccgctgggccctgagaggagtgaagggcctgggttrtgggctgggggaggggaagactgccaggagctgatctggggctgcatcctcccaggctggtacgtgaggtgacaggtgtgaatgtgaayatgcgcgtgggcatccacagcgggcgcgtgcactgcggcgtccttggcttgcggaaatggcagttcgatgtgtggtccaatgatgtgaccctggccaaccacatggaggcaggaggccgggctgggtgagtaggggggtccaggtgggggggatgggggcaaggtgggagagccagggtctcaccctcttggccacatacagccgcatccacatcactcgggcaacactgcagtacctgaacggggactacgaggtggagccaggccgtggtggcgagcgcaacgcgtacctcaaggagcagcacattgagactttcctcatcctgggcgcmagccagaaacgggtcagggccagggcagggctgggggcaggggagcaagaagagggacaaatggggaggagcaggccaaggyctcctctgggcccctcttctgagcctgtacccatgctgcccgcacagaaagaggagaaggccatgctggccaagctgcagcggactcgggccaactccatggaagggctgatgccgcgctgggttcctgatcgtgccttctcccggaccaaggactccaaggccttccgccagatggtgaggggccctcagcaccagacctagggcctcattttcttagctccctcaataccctgtccctgaccctgtcctttcttgtgactgccatttccatgtatgctttctggtattggggcagtgagaagatttcatctcgggtcccagtgcccccagaggatatgacggggacaccctcagcacagtgttggggtgggggaaggagctgcagagatgaaggttgttggccyttcacctcactccacactctgtccctttctccagggcattgatgattccagcaaagacaagtaagtcaggttactgaggagggagaaggcacttgcaccctgggatggggctggggggagccgagatcctccttttccctgaccttaggagtgttgtgtgggagcaggagccacccccctggctctccctccctccctcaggtgctgtccatacctttcctttcattgtttctcacatggccatgcccatgcawctggtgaaaccatgtctcctgccctcrgccggggcacccaagatgccctgaaccctgaggatgaggtggatgagttcctgagccgtgccatcgatgcccgcagcattgatcagctgcggaaggaccatgtgcgccggtttctgctcaccttccagagagaggatcttgagaagaaggtttgagggatacagggcagaaggacaagggctgggggaggggcaggtcgcagcagggaaggctgagcacaggtgagggcacaggtgtttctgggggatggagaagggaccacagagcagggtgaggatttcatcagttgagccaactgcatctcctccctgttgagacccctggtagtgccctgtccttgctgtccctgccttccttagggagggcccagcactcagctcagcctcstctccctcagtactcccggaaggtggatccccgcttcggrgcctacgttkcctgtgccmtgttggtcttctgcttcatctgcttcatccagcttctcatcttcccacagtragrgccctgcctttcctctcttagcttctctcttcaccacttcccagaagcttcctaaatacccacacaagcccacaatccctggagcctgcatccctgcttgttycagagggtgggacaagaatgcccagatcttccrgaattaaatgatttttctggccctgttctgccccagctccaccctgatgcttgggatctatgccagcatcttcctgctgctgctaatcaccgtgctgatctgtgctgtgtactcctgtggttctgtacgtaaggggatttctgaggctgttggggagggcaggctggactccagacagggaggaggtcacatggggagagggagaaggccatgcctcttccactgggccccatmcctggttgccattcctccttggctgatacaaccttcaactcttggtctcttgatgcctctagctgttccctaaggccctgcaacgtctgtcccgcagcattgtccgctcacgggcacatagcaccgcagttggcatcttttccgtcctgcttgtgtttacttctgccattgccaacatggtaagggtccagtgggaattctcccacctctgctctgtgccaagcactgtcctggasactgggagtacagcggagaaaaggacatattttctgccctcagggagccccctcccagaataggggaaggttaactccggttctccttccttgttctcccaacctcttgtcatccctgagtgagtactaaggcccatggggtataaggtacctgggcatagcccaggttagggtacatggcttcaccaggtaccttgcaaccctttccctccttggttaccctgatatacccctccacttttgcagttcacctgtaaccacacccccatacggagctgtgcagcccggatgctgaatttaacacctgctgacatcactgcctgccacctgcagcagctcaattactctctgggcctggatgctcccctgtgtgagggcaccatgcccacctgcagctttcctgaggtgttcgagcagtgctcaggcggtgggggggctgtcctgkcacagacattggcccttctgtgccaggcctggtgatgggcgctggggacccaggaactcaccagagtctcccacactaggagcaaccaggggccctggtgtgttgtaggggctgggcatggaaggtggaggatatgggggtttgaggggtgtggtgggaaggttaggtcaggcaggagagtgsagggctctccctgcccaagggtgctgtggcctctgccttcacccaacgctgcctctgccacccccgcagtacttcatcgggaacatgctgctgagtctcttggccagctctgtcttcctgcacatcagcagcatcgggaagttggccatgatctttgtcttggggctcatctatttggtgctgcttctgctgggtcccccagccaccatctttgacaactatgacctactgcttggcgtccatggcttgtgagtttattctcaggtyctttaataccccaggagcttccctcaccttkctaggtcactgtgagcctctctggtgcccatgccccttgtgccttggaatgccacaacwcccctgtgggggaaagggaggagatggaggagctcccagcatgtgaccccaaatagttacccccaaggaaaccctagtcctgggaaatccttgtgtctttaggctagacattaaaaaaaaaaattccctcttacatttgcatggtgctttcacatccaccatcttaaccacctataggacatacagctgcttggtggcagggctctggttaggaaccaaagcttctgattcctgcttgggggctttgcctgggacaccacactggcttttcctctgcaaaaccccattcctttgatatgtggccatagcttgttgtagtagaaaaagcctctggtctctgctgggtttgaatccctgctctgctgctcattagctrtgtgactttagacaggtgagttagcttctcygagcctcaatttcttcatctgtaaaatggcaatgtcacctaaatcacagggtagttgtaaagattatagtaactaacatttatggaaggctgactatatggcaggcactgtgctaagccttttacatacattatttagatctgatccctgttgtactgatgaggaaggaggcttagagagttaagcgacttgtctcaggtcacatagctggtaagtagaggagtctctaagagcagaggttttcttaacctctactcttaatgagttaattaatgtaagtaaaagccctggcccaatgcctgacttacagtatgtgctcagtaaatgcagtctcttgtctccccttccatgtgcccacccagcaatccaggaagcactgatgactttgtctcttctatcttcttaccagggcttcttccaatgagacctttgatgggctggactggtaagtgagggctccgaggcagcaaagggtagagccattagatgcctccttcagacaccaagcatgtctctgcttatccttagtccagctgcagggagggtggccctcaaatatatgacccctgtgattctgctggtgtttgcgctggcgctgtatctgcatgctcagcaggtggagtcgactgcccgcctagacttcctctggaaactacaggtgactgtgtgggcctttsggggaagaggaggaacctaggggcggagcctgggccaggccagaaatgtatcttgtgctwgctggctaaggctcaggccacacctaggcccaccctggttccattccttctctgtgcccatcccttactccctgccccatcctctacctgccccctttacccctttgcctgttctttaggcctcatctgtctgggcctttctttctctatgtgattccctcttatccgcacttccaagccttggccaccacacctaccccttgtgaatgtcgggcaatgggtgatgggtgtggtgtccacaggcaacaggggagaaggaggagatggaggagctacaggcatacaaccggaggctgctgcataacattctgcccaaggacgtggcggcccacttcctggcccgggagcgccgcaatgatgaactctactatcagtcgtgtgagtgtgtggctgttatgtttgcctccattgccaacttctctgagttctatgtggagctggaggcaaacaatgagggtgtcgagtgcctgcggctgctcaacgagatcatcgctgactttgatgaggtacttttccagttggctggtggtggcagagagtggggggtacttggagaccagggattggaatgggtgagtggaactgggaagagaragagagatttgatgggacccagagtcatcaggggtaagggtatgcacagtggaggcagaggcaagaacccatgaaggtgtcagaggcagcaagggggtcagccctagtggggcagggtcatcactgttggggagcaggggaggacttgatctgtagggggataggataggtaccaggtggatgtcactgaagaagaaggcaatagtctgtggacagaacctcatgagaccaaccaagcaagatggtcctctgaatagagaaaattgaagcaaaatgtgaggtagtgtcctgaacatccagatcaggaatgggctgttcactgttctggagggaagtcacttgctcactctgggactcagtatcccaaaaggtaaggattggagaaattgcttaatattgcacttgtgggtctgtgttctgtgagtgagctactggagggaccttctgaagctgtatgcccaaktcctgcctggagtcctaggctgcctgttttcccagctcctcagtcttacactgatagcagcagctggaagggggctcttgagacagggaagtggggaaggcagccaaggcgtggcargaaatgagtgttggggcagggctgggtctggggtctttgccttgacagccaggtctccttgtgttgttcagattatcagcgaggagcggttccggcagctggaaaagatcaagacgattggtagcacytacatggctgcctcagggctgaacgccagcacctacgatcaggtgggccgctcccacatcactgccctggctgactacgccatgcggctcatggagcagatgaagcacatcaatgagcactccttcaacaatttccagatgaagattggtaagagggctttgttgcttggygggttttcccaggactttttccaggtgaarctgggattataggctggggatgggatcacagatttcccatcagggctcctgtggggttttcttccctctgacctcctatatcaagtctgatattaagaacagagatcattaggcactgtcctataaatttttgagcatattttaatcctgatactattatcgcctttcattggatagagactgactctcagagagattaaataacttgcccaaggtcaaacaactagtaagtggcagagctgggattaaaaatcaggtttatataaacttgaatacttctgtccttatctgtgaccagtccaataagaggtatttcctctcaaatgaactggtggatgggagtggttaatagcatggctactagagatggactatktggtttgaattctggctgctccatttactggcttatttgagaagtcttctaacttctctaagcttcagttaccttatctataaaatggggataataatacctaccttttagaggtgttgaaaggatgaagccatgccgggcgcggtggatcatgcctgtaatcccagcactttgggaagccgaggtgggcagatcatgaggtcgggagttcaagaccagcctgaccaacatagtgaaaccccttttctactgaaaaaaaaaaaaaaaaaaaaattaggccgggcgcagtggctcacgcctgtaatcccagcactttgggagtccgaggcaggcggatcacgaggtcaagagatcaagaccatcctgactaacacggtgaaattccgtctctactaaaaatacaaaaaattagccgggtgtggtggtgggcgcctatagtcccagctactcgggaggctgaggcaggagaatggtgtgaacccgggaggcggagcttgcagtgagccgagatggtgccactgcactccagcctgggtgacagagcgagactctgtcccccccaaaaaaaaaaaaaaaacaaaaattagttggnnnnnnnnnnnnnnnnnnnnnnnnnnnnnnnnnnnnnnnnnnnnnnnnnnnnnnnnnnnnnnnnnnnnnnnnnnnnnnnnnnnnnnnnnnnnnnnnnnnnnnnnnnnnnnnnnnnnnnnnnnnnnnnnnnnnnnnnnnnnnnnnnnnnnnnnnnnnnnnnnnnnnnnnnnnnnnnnnnnnnnnnnnnnnnnnnnnnnnnnnnnnnnnnnnnnnnnnnnnnnnnnnnnnnnnnnnnnnnnnnnnnnnnnnnnnnnnnnnnnnnnnnnnnnnnnnnnnnnnnnnnnnnnnnnnnnnnnnnnnnnnnnnnnnnnnnnnnnnnnnnnnnnnnnnnnnnnnnnnnnnnnnnnnnnnnnnnnnnnnnnnnnnnnnnnnnnnnnnnnnnnnnnnnnnnnnnnnnnnnnnnnnnnnnnnnnnnnnnnnnnnnnnnnnnnnnnnnnnnnnnnnnnnnnnnnnnnnnnnnnnnctaatttttgtattttttttttgtaaagatagggtttcaccatgttggccaggctcgtcttgaactagattgttctttacaaccaggagacttgtcctttttccatttttttctctgggtccttctaccagtgccaggaggtgggatgactccctgggtttaccctggagcatccactagtctcttgctgttctctccacctcagggctgaacatgggcccagtcgtggcaggtgtcatcggggctcggaagccacagtatgacatctgggggaacacagtgaatgtctctagtcgtatggacagcacgggggtccccgaccgaatccaggtgagggggatatgagcaggggctgggaggaacatgggcccggagggcttccacaggtgtctctgcagtctgctaggacaggggtagggtggctagtgttctgtgtatggtggggcagggaytgggggaagggagctagcctgactagagaacccctgggcccctgcaaatgcagcaggaaggattccaggctaagcgggctcccctcccactcccccaggtgaccacggacctgtaccaggttctagctgccaagggctaccagctggagtgtcgaggggtggtcaaggtgaagggcaagggggagatgaccacctacttcctcaatgggggccccagcagttaacagggcccagccacaaattcagctgaagggaccaaggtgggcattgagtggactctgtgctcactgggtggrgctgtggcagggggcactgagcctccagaccctgctaaccacaaaaggsaacatcccagcaggctgtgcttggatcatgctcgtctgccctcaagctggaaaacaaggggctacctaccgagaggattatgcaagtgactttctttcttacttggggtagggctgttccctctccaatcttccagcctttgggagcaggggaggggtcagtagcagaagcagagggaggcctcttgcctgagggattaaaatggcagcttgccatgcctacccttccctgtctgtctgggcagcaggttcagggctgagcccttcttttccctcttttttcctgggaatattttgtacaatattttgtacaaagacaggcatgaggagtgcctattccatgcttgcctttgcaatacctgcatccccagcactggtcctgggcacttccccaccccagccaggtgtccctcctatgcacagagcagaggagggagaagctctggggagccagctttggccatatttcaggagaatgtttccatgtgccaaatcttagtcccatgatctgtccccaaaggggaacaaagggacctctgacagcttagatttagccccagttcctgcacgctccagggaacggggtgtctggcctcactggtactgtgaaaaatgctcagagagcaagcctgtgtgtggggatgtcaggtcaggagctggaagttcacctgcaggtgccaaagagcaggccggccagggctggggcagtgccagactctgatctgaggaccccgtcggggtccagatcaggtcactctgccccagtgctctcttgctgtctgctgacaagggggcatggagcatctcttcctcttctgttgccaaatagaaaagggtcagggcatggagaaaggtgaccctgatcccaaacctgccctcccaagtctctggtgttggggagggcccgtgtgtttgtgtaactgtgtgtgcatgttggtctttgtgtgcatatctgttttccaggtctatgtgagtccttgtgctcctgctcctcagctctccaccccaggttgcctctctcctgtgggcctctgtcttctgggaataaagcagggtttcctacttcaggggatgtagagagatgcccaggttgcacaggagtgggatggggtgtggtagcaaaaggagggagaggagtcctttttgtgccaaatccctaagtgccgttcgggggccatgtgtgcagcatgactctccctgtctgtggcagggacccaagcgcttgcttaagccccagtgctccatgccagcacttgaactgtctggggtttgatggacagaggctgaggaatttcctggcttccccagatagtgtcctgggacatggtatgctttggggctggggtagcatggaatccctytgaggacctggatactggtactacggggtggggaagaggaaccttaaacttggctttccccagccttcagcctgagtctagcatgtttctagctccccagtcccttgtgaagccttgagggctggcagaagggttaggaggttgaactctagattcccttcctgtctttgccttccttttacccctttccctgcaacctccttgactctggcctgaatttgttggtgcctcagtttctctgtctgtacctatttaagccaaaggcactagcctgaattttgcttgaagatcactttgtcttggaaatgactagagaggcagaggagaagggtttccagagttgctaggtttgggagtggaaggggcaggcagtgcacttgcccctcctcatgccccttctgacaccagctccctgtggaggcctggtttctgggtaatgcctcccttgggcatcttcatgcatcaaccaaatgggccatcaggtacttcattagtcatggcagaaggaggggaaaagacttgttttccagacagaaaatctactcccctgtccccagccatatccctggataggaagggataggaagagactacttggtgccatggggtaggggtgagggtataagtagatcagagtgggaagacctcagccttgggtggcttgtctctgcttcttgccaggtgggagggcctgtccacaccctggatccccgtaccacagtgccagccatgcccttcccctgggctaccattgtccctttcctcacccagttggtagaggagtcaggaggtgggaggccgtgggctttggttttataatgtaaccactgtgggggtgggggaggatggtgaaccatgtatttcagtgaaatatttaatatatttaaatatcaataaaatcaaactctttgtaaaattctctgttctctgtagctgttctgggccctgggtgggtcagaagtgacagagcctggtgtaggaggcgacctcctgccccagggctccgtgggcctcttgtctgtggtcagaggacttcctgtggctttctccctgctaaggagaagctgcagtatcttcagagtgtgactactcaaggcctttcagcatcatgagctccagtgtgtgccttcccagatttgtgtgtgacccctgccatgcatgaagccggcggttctttccagtgccttggcccctcacagacctctcactccaaggtctggcttattcaggaatctcccacacagcagctctcacaacaatctggacactggaatcactcccatcctgaccccacagctccccccgtgcacacaagcaacttttagtccagtctgtttactgtgctttctccatctcctcctcccattagtcagccatcggaactgggaaacctccttctttccccctctgcactcttgccacaattcatcttgtctttctgcagccatatcttcttaatacagactgaaggtcctgtcattgagaatagagtgatccataaacctggaaagaagagattcagagagagattcagccaggccaggctggagagcaggagatccttaaaaatagctcccaagaggctgggcgcggtggctcacgcctgtaatcccagcactttgggaggccctggcgggtggatcacaaggttaggagttcaagaccagcctggccaagatggtgaaacctcgtctctactaaaaatacaaaaattagccggtcacggtggcgggtgcctgtaatcccagctactcgggagctaatgcaggagaattgcttgaacctgggtggcagaggctactgccaatggatggtgatttgaggggtggagaggtagcgacgaaggcagcattgggctgccacaggattactatggacacttgttttgcactagctcagaagtcacacccacaaagaggaacacaaagacacagacaaatctctaactcctttgaatgtcatcacggcccaaattctggggccagttttctctggtaagactcaaatctctcctaattccctaactgaccggagatgaaataatctctaagaattaaagtgaagggaaggagtacttcccttgacctccccacccttacccctcccagcctaacctggtcatcgcgctttttatgagacaatggcgtgggctccggatccatggcatggtttcctctggacgcactcctggatcatgggaccaccagaagctgaagttctgagcatcagtcaaggggattctgaagacctgattgggaactgaatgggtggggggaagggcaggttatctaattccttcaagttctctgctcactgttctgcctcagggcagcaatagcccagcccagcccagcaactgcttggccggaccaggtgctgagaggtcctgggagtgtggtcaccacaccctgcttcacttccggattctagcatctcacacccttcatggtcaaatgaatcagtcttggttcttcctgctgctagtaagcccatctccaagagagctttccccaagtgctaagatggtagaaaaacaagtggtcaacccacttgggaaatgtgtaagatggggtccactgatctattatttttctttcttcttggcttaatcatcctcattctcttccctcctcttggaaaaaatggcttcctttgctcactccaagtaattctctgaaacctaactaataccacctcacatttagatgctattaatagatgtaatttatctagtgcctattatgttctaaatgtggtattaaatattcttaaatttttgtaataatatcagactttgatgctgtttgaaaaagtacttttgggctgggcacggtggctcacgcctgtaattccagcactttgggaggccgaggcaggcagatcacctgaggtcgggagttcgagaccagcctgaccaacatggagaaaccccgtctctactaaaaaaaaaaatacaaaaattagccgggcgtggtggtgcatgcctgtaatcccagctactcaggaggctgaggcaggagaatcacttgaacccaggaggcagaggttgcggtgagccaagattgtgccactgcactccagctggggcaataagagggaaactccatctcaaaaaaaaaaaaaagtacttttggccgagtgaggtggctcatgcctgtaatcccggcacttttagaggccgaggcaggtggattacttgaggtcagaagtttgagaccagcctggccaacatggtgaaacccatctctactaaaaatacaaaaattagcagggcatcgtggggggtgcctgtaatcgcagctactcagtaggatgaggcaggagaattgcttgaacccgagagatggaggttgcagtgagctgagatcgtgccactgcactccagccagggcgacagagcgagactgtctcaaaaaaaaaaaaaaaaagtacttttactatttatttggataagtctaattctaccagtataaaatttgtatatttttaaaacttagaattatagcctaatattctggattgctatatagtgtttataataatttttttaaaatccctaataattcattgagtagatgttacatttttggcttatttttctattaattaataataagctattaaaaagttttgctattagaggctgggtgcagtggctcacacctgtaatcccagcactttaagaggcagatggatcactccagcccaggacttccagaaccagcccaggcaacatgttgaaaccccatttctacaaaaaatacaaaaattagcccagtgtgatggtgcacgcctgtagtaccagctgctcaggaagctgaggtgggaaggatcgtttgagcctgggaggttgttgaggctgcagtgagccatgattgtgccactgcactccagcctgggcaacagagcaagattctgtctcgaatagataaaaatggaaaaatgttaaagttttgctattagaaataacttactacccctctttccacatgtgcctgttttgatttctgaaagtattttaggttttaaactttaattttgttataattataggttcacatacagttgtaatgaataatacggggaaaccaggtgcagtggctcatgcctgtaatcccagcactttgggaggatcacttgagcccaggagttcaagaccagcctgggcaacatagcaagaccctgtctctattaaaaacaaaaacaaaaacagggaaatcatgtgtaccttttactcttccccacaatggttacagcttacaaaactatgggacactaccacaacatgatattaatatattgaatatattgatacagaacagttccatcaccacccatcctggagctggcattttatagccaccctcccccactgccccgctttggaaatcagtgatctgttcttcatttctgtaatcttgtcattttaagaatgttataagagccggatgcagtggctcacgcccgtaattccagcactttgggaggccgaggcaggtggatcacctgaggtcaggagttcaagaccagcctgaccaatatggtgaaacctcgtctctactaaaaatacaaaaattagccaggcatggtggcgggtgcctgtaatcccagctacttaggaggctgagacaggagaatcgcttgaacctgggaggcagaggttgcagtgagccgagatcgcaccattgcactccagcctgggcgacagagcaagattccgtctcaaaaaaaaaaaaaaaaaaaaaaaaaaaaagctgggcggggtggctcacgcctgtaatcccagcactttgggaggccgaggtgggcggatcatgaggtcaggagatcgagaccattctagctaacacggtgaaaccctgtctctactaaaaatacaaaaaattagccgggcatggtggcaggcgcctgtagtcccagctactcgggaggctgaggcaggagaatggcatgaacccgggaggcagagcttgtggtgagccgagatcgcgccactgcactccagcctgggagacagagtgagagagactccgtctcaaaaaaaaaaaaaaaaaaaaaaaaagaatgttataagagtgttatataagaatgtcatataagagtattataaggcctggcatggtggctcacacctgtaattccagcactttgtggggctgaggcaggaggatcgctgtgtgggagatagccagaccttgtctctattaaaaaaaaaaaaaaagagctgggcatagtggcacatgcctgtagtctcagctactcaggaggctgaggtggaaagatcacttgagccaggaatttgagactgtagtgagctataattgcaccattgtactcagcctgggcaacagagtgagaccctatctaaaaaaaaaaaaaaaaaaaaaaaagaatgttatataaatggcatcatacgctatgtgatgtttatttttatttgtattttttatcagcttacatcatgctttgatgtcctacatgctttttttttttttttaaagacagggtcttgctctgttgcccaggctggagtgcagtagcactatcacagctcatggcagccttgacctgccaggcttaagtgattctcccacctgagcctcctgaatagctgggactgcaggcgagcaccaccatgccctgcgattttttttttttttttttggagtctcgctgtgtcccccaggctggagtgcaatggtgccatctcagctcactgcaacctctgcctcctgggttcaagcgattctcctgcctcagcctatcaagtatctgggattacaggcgcctgccactatgcccggctaacatttttttgtatttttagttgagatggggtttcgccatgttggacaggctggtctcgaactcctgacctcaagtgatccgcccgcctcgtcttcctaaagtgctgggattacaggcatgagccactgtgcccaggtgtatgttttatagatgggatttcaccatgttgcccaggctggctacatgctttttaaaatgtacatgttctctcttgacaatagtgctaaaaagtattattcccatttccagatggttcagagaggttgtggttaaaggaacttgcctaaagtcacagaattcgtttgcagtttaaacccagttcaataaaatgccaaagcttgtgcttactattcctcaaagggataatgcatgataatatacaatatacttttttctcccaataattttgaaagattagtaaaacaatagctcaggcattttctctccccaacatcctgcctttaaaccaatgaggggccctaagtggcggctcacgcctgtaatcccagcactttgggaggccgagggagatggatcacctgagatcaggagttcgagaccagcctggccaacatggtgaaaccctgtctctactaaaaatacaaaaattagccaggggtggtggtgcactcctgtagtcccacctactcaggaggctgaggcacaagaatcacttgaacaagggaggcggaggttgcagtgggccaagatcgtagcactgcactacagcctgggcgatagagtgagaatctgcctcaaaacaacaataacaaacaacaacaacagcaaaaccaatgagggagtaggttgataaagggtaaatgggctgggtgtggtggctcacacctgtaatcccagcactgtgggaggccgaggtgggaggatcacttgagcctgggagtttgacaccagcctggacaacatagcatgactccctctctacaaaaatgtttttaaaaaattagccaggcttggtggtgcatgcctgtagtcccagctactcaggagactgaggcaagaagatcacttgagcccaggagttcgaggctgcagtgagctatgattgcagcactgcactccagcctgggtgacagaatgagatcctgt

SEQ ID NO: 6849 - DNA, 30959 bp, Homo sapiens
tcattttacctaatggaatacttaagctaggtaggcttgaaatttggtaatttctctactttctatccaatctgtttctcttgctttgatatttgaattaacccagaaggaaaaagaatagaaaagtacaataggaaactgattatgaaaataaattgccaatgtggttatgatgaaataatttcttaagatagcacactgtgccaatctagacatgaaaaaataaacatatctcacaaacctctgattttgttttaggtagtcagcagtccctacaggtcagtgtcatttaattaaaagctctacagttatatcaagggggaaatacttttagtttttagctaatcattttagtattttccattaaattataccttaaacttgactgaaaataagttcatatgattgagtcttttaaactgtttgcttcttgttttgcttttttttttttttttttttgacagagtctcactctgcaaccttcacttcctgggttcaagtgattctcatgcctcagcctcccgagtagctggggttagaggtgccctctgccacacctggctaatttttttgtatttttagtagagacgggttttcatggtgttggccaggctggtcttgaattcctgaccccaggtgatccgcctgcctctgcctcccaaactgctgggattacaggcatgagtcaccgtgcccggctgcttatttcttaacaatttgactactggagcacataggccttagatccgtgctgcgtccagtgtttcttcctcacttccattcttggacagaaagaaagcagttgttttcctgtatgctgtgatgtgagttgtagcctgccatgaacacaggtgggctccttgttggactgagcttgaggtccctcgacagtctgattatcccaaagccccttatttggtttctcttccatctcttcacatctgttccttccctactatccctctttcccaataagggaaaccaatcaaccttattttactttgattttaaaactataaatcattgaagtgctttgatgtgggaaaggactcagataaaaccatttaaaccatgcatttgatcctacaacaaaaagttttaaaaagtcacttggcagagccatacaggaacagggtgccagatttctacaagtgataatcaccagttccaatgaagtaacaaaaggaagtctttttatttcaaatgtgtaggtgtaaatattttaagtcttttatactttttctgaacccagtaaaactggtttataagtctatattatttggtgttactcatcttttaattaacagtatagccagttattttcacaggaaatcaacacttatgataataactcgcatttaacttaacagggtaaatcttattatcctcattttgtcaataacatttttcaacctgaagggttaaaagtcactgtactctggttacaaatgggaaaacctaaaagaattgacttaccagctacaaaattgcagggagggccaagagttcagttatgtactctgatgttaacatattattcatgcataagaccagtggcccagcatgagttggtcggtagttgggatcttcgtcctagcctaacagactgaatttttgttttattagtgtttattccacgataatacctaattctttttatagctccaatttacttttgtaaagtttatttgacaatttatactgtttgcaaggaggactagtttttccaatacttaagttaaatacaataaaaataaattgactaaaaaaatgtatcatgcctttagttgttgcagcagtgtccacttgtcccagattttccaaatggttacttttgttccagatgagttaaaaaaagaaaagagccatccaactgacattggtccatttttgaatagcaatatagaccatgcatagaggtcgttaccttcacagaagactcttaaactagtgattcagaatcaaagcaccaaaccatacttatttctatcacaaagatcttcagaaaaaaacttggcatttcttttttccctttgatgctttctaactcccttcaacgaggttagtcaaagatacagtaaaactgctagccgttcttagcatccagcttgcacacttgttaggttgtgtaagatcaatttgtttcttgttgcagtctctccatttataaatgtggtgaattagataatcttgatcaaattgataatgattttttggtttttgagacagtcttgctctgttgctcaggctggagtgcagtggcactatcatggctcactgcagcttcaacctcctggattcaagcagtccttccacctcaaactcccaagtagctaggactataggcacggaccaccacacttggctagttttttaatttttgtagacagggtcttgccatgttgcctagggcttaagccatcttccaccttggccttcctaaatgtcgggattataggcatgagccacaacgcgcagccaatgatgacttctttggaaaggacacctatggcactatcaaggggactctagtttggtgttatagagctatgtgtcccgttcttaagtctatttgtttgcaaatatgctttgttgtttatctgtgtaaatataaattgctgcttctattaccactataaataaagcttctcttttatgattcaggaactagcaaagttctaaatcatacttacctggatctctttcaccagaagcaagtggtttaatgtaacagactccattttagcagagacagcaactaagcgctagaagacaatctgaaaagcagtggttttagaaatagtagtgggcattgtggtgggccaggagaaaccatatgggactgctctgtactgtagggagaaagaagataaagggtgatggaaatgagatgcctcaggtgggactgatcagttcctatggtttctgaggtgcattttaatgccagaggctgccagttgtataagtatatcactgacatgtagatttaggtacaggctaccttggaagaacctggggaagatatgactgtacattgctcagattgaggctcagcctgagaaattaatccgtagtgaaaggctctgtaaaagaacactcaagagagtagatttgatggtacaagaaagatggtatagaagaggacattatagcactctagagaaagacttcctcagaagtcctgctctttactaccacagactcaatgggcttacctggggaatggcatcatggaatgacagccactgagtactgtggacacactctaaacttagagtcagaatttttgtgttcaactcctgggccttcaattagtatcttgacagccttaacaacctatcttagctttcttctcccctgatttctcatctgttctctgagctctggaagttacgataggggtgaaatgagataatgtatttaaagtcacaacttatttctctatttacctatagcaccaacattcttccatgttacccctgttccaaaagcagaatgtgaatgataccaactgctgtgagtgaggttttgaaaatggcgatggccggacttcaggatcatctggggttgccatgtgcctgcacccttatgtgactcttctgagcagatagttgtataagagtatttgatctgaaggccaattctatctacatgatgaaggagggacatctgtgtttgacagttttcataggaatggacacccacatgcacgtactcacacatattctttatgtaaaatggtaggatgctaggagtgagccttacaaaggggggcacataactatcagagcttttttaaaaaagtaattcaagtaaatgccaaatacccacttaatcaaactagctgtgatgattcagaccatagggcagtgtttcagagagaattttacatccacaggttgaggagagacttttcccttgcaaaagcagtacagatcccttatgcctctcatcatgcttcccctagtgtaacatcctacataaagcacagtggctgaaaccggaaaattcagatgggtatactactactagctaatctagagactttattcaaatgttgctaattttcccactaatgtcttttttctggtctaggatcacacaattattttttattagtcccctctaatctggaaccattcttcattttttataaatctttcctgaactttacactttgaagagtactatctactgttttgtagaatgcccctcaattttggtttgcctgatgatttctgatgattgagttgaggttgtaaaatttttacaatgtgtttgtccattcccatgtactaataaagacatacccaagactgggtaatttataaaggaaagagttttaatggactcataattccacatggccggggaggccccacaatcatggcagaaggcaaaggaggagcaaagtcacatcttacatggaagcaggcaagagcatgcgcaggggaattcccctttataaaccatcagatctcatgagacttactcactgtcataggaacagtacgggaaagactcacccccatgattcaactaacttccaccggctccctcccatgacatttggggattatgggagctacaattcaagatgagatttgggtggggacacagccaaaccatatcattagaagaatgccacaaaagtgatgtcgtgcccttcttagtgtgtcctaacaagcggaacatgatggcgtgatttctactcacggtggtaacgtcgatcacccttttaaggtagggtctgttaggttttttgcgataatgttatgattttccctttgtaattaataagtatcttgtcattttgtttttaagaagattctttgctttcttaaattcatggtcagggttagggcaagtgtcactcacagagggatacaaagtgtgctgtcccaatgggaagaaatggtgccctagaaagtgatggagtcattatttaagtgwttgaatagatctctctcaatccatgctgaaayggatcgcctgacattacattgcaggattttaaagtcctacctccaggcaaatctcatagttactggcaaaaatgaaagtgtgaaatgctttttaatgtatattwaacaacacatagtctggtgattactgatgtgtattctctgtggactccctttgctatcagaggaggatgctgagagacaactttttacacatttattctgtctaaatccatcacatgtttactttttaaatatctatgactgtcatttataacaagatcataaaaagtcaaatacattaagtctaactcaaactttgaatcataggattacaaccaattttcaggaaaagtacaattaccttttatgagtgatgtttttcttactcttccttatgaaattgcctgctattaaatgatactaaaatatagccactcaaaaaaaaaagatacagtttagtaacaaggtatgaggggtagtgctactttattcatctttttgattcagaaattcacataactcctatttaaaggaattttcatcattgaatccagtgtcatgtctgcttatgttgaagaagtaaatttcacaagaagtacttaattccttcctatagtatcactatttaataaggactaaggtaccatttttttcatttatattggatttcacagcaagagttcacatcttatactaatatatgctaaatagttgcatagtatatagatcattgttgttaaaaaagcagtactgaaggcattttagatcacagagccccagtggtctacattttgtttgctttgacattattaaactcaatctgtttstctaactgtgactctaattactacatttgcatggcagaaaagtttgctttgtgggttgacttttattaacagtgcttgcatgttgttttctgctcttgctcagtgttttatgagcacacagagcaccttcagttgcattgaataattatgcacaatcaataagtttttgtgtttgtctttgttgtttctttgatgtggcctctaggatgctgctggcaaggtgctggaccgctgggccatcatgtctcgagaagaggaaatcatcacccttcagcagtttctgcggtttggagaaaccaaatccattgtggagctgatggcaattcaggagaaagaagggcaggccgtggctgtaccatcttcaaagacagactcagatataaggactttcattgagagcaataatcgcaccaggagtcccagcctccttgctcacttagagaacagcaatccttccagcattcatcacttcgaaaacatcccaaacagccttgcatttctgcttccattccagtacataaaccctgtctcagcaccactgctagggttgcctccaaatgggctactgttagagcaaccagggttgaggctgcgggaacccagcctttcaactcagaatgaatataatgagagcagcgaatccgaagtttctcccacaccttataagaatgatcaaacacccaatagaaatgccctgaccagcattactaatgtggagcccaaaaccgagccagcctgtgtctctcccattcagaattctgccccagtcagtgatctaaccaaaactgaacacccaaaaagctcattccggattcatcggatgagaaggatggggtcagcctctaggaaaggaagagtgttctgtaatgcatgtgggaagacattctatgacaaaggtactctcaaaattcattacaatgctgttcacctgaagatcaaacatcgatgcaccattgaaggttgcaacatggtctttagctccctccgaagtcgtaatcgccacagtgcaaaccccaatcctcgccttcacatgcctatgctaaggaataaccgagataaagatttaattcgggccacctcaggagctgccacccctgtcatagcaagtacaaaatcaaatctggcactcacaagccctggccgacccccaatgggttttaccactccccctctagaccctgtcktgcaaaatcctctccctagccagctagtattttctgggctaaagactgtacaaccagttcctccattttatagaagtttactcactccaggggaaatggtgagtcctccaacctccctcccaaccagtcccatcattccaaccagtggtaccatagagcagcaccccccgccaccctctgagccagtagtgccagcagtgatgatggccacccatgagcccagtgctgacctggcacccaagaaaaagcccaggaagtcaagcatgcctgtgaagattgagaaggaaattattgataccgccgatgagtttgatgatgaagatgatgaccccaatgatggtggagctgtggtcaatgacatgagccatgacaatcattgtcactcccaagaggagatgagcccaggcatgtctgtgaaggacttttctaagcataacaggacccggtgcatttcaaggactgaaataaggagggccgacagcatgacttctgaagaccaagaacctgagcgggactatgagaacgagtctgagtcttcggagcccaaactgggcgaggaatccatggaaggggatgagcacattcacagcgaagtgagtgaaaaagtcctgatgaatagtgagaggcctgatgagaaccacagtgagccctctcaccaggacgtcatcaaggtgaaggaagaatttacagaccccrcttacgacatgttttacatgagccagtatggactgtacaatggtgggggtgccagcatggccgccttgcatgagagctttacatcgtctctgaattatggcagccctcaaaagttctccccagaaggtgacctrtgttctagcccagaccccaaaatctgttatgtgtgcaagaagagtttcaaaagctcctacagtgtgaaacttcactacaggaacgttcacttgaaagagatgcacgtctgcacagtggctggttgcaatgctgcattcccctctcgccgaagccgagacaggtcagtaaatctccattggctgctcctgctgggggtggagggtgccagttttcagtcatgttggacttcacactaaaagaaatccaacttagatgtttttggtgcactgtaaagattgtccacagtgatcatgtgataactaggctgccatgctcatgaaggattgttgcagttggtgcttgtgatgattaagcatgcagaatcatgtgccatcttacccgtaatgcacgccatttttctctgtgctctgtgtatacgtgtgtgtatgtgttttcatgcatctaggtgtgaataagttaactatgtacacggttccctgcttccccgtgaaccttcacttagaagccacagcttctgttatatatatatttatatatttatatttctgctttgccatgtggctttttaattaaatcagtatattatcttcatacacacatatttatccaatatagaaacagaaatttacggatggaaagaaccataggtccaggacatcgagacagcctgcatctccgtaggtataaccagtaatgttatcattccttacatgagtatttagtgtgtccttgaattctttaagagttgtgaaaatatcagaaggaaatgggatagatgtaattgttgatgtgggaaaatggtatggtcgtgtgggtttctttatcttaacttcataatgtctttgagcacatctctaaactatagtctaccatgcggattatgcacagaaggggaggcatgcatatactttgaggatcagcacgaatatattatgtccagccttcagatgacatcacactcttgctatgtagttgcagctctgaaacagttgggcttaagcagaagcagatggtcctaaacctacaaggttctttattaatcctcaagaaaatgcagtataaatggaatgtgtcaaggtggtcagtggcaggatagtgcggttatcctgcatttgttcagataagcttgtgagcagatcacgtacataatacaccaccagcccaactcgggtcacacagcagttagttattcccattatatcagatgcggtttttggttctacattgtcttctaaaaatattttagagaaaattttataacatggtggaaatcaatggaagaaacacattaaaattaactagaaagtttctacagagccaccaatagtaagcagtaattctagtgcttgtcaattgtgtagagttctttggcaaagtaacattaaaagtaccactgaaaagtagtgtcctgtccctggaatattcagttttgtcttcatatttggagatcaatcctttttaaaataaaagtttgaagaatatttttttcctttctactgaaataaaagggggccaatctttgaaaagcaaaatatttaagaaaaataagtaactttcttatacaacccaaaacatggtttgaggagaaaccatttttttaatgattttcccacccccatttactttgttctgtaaacatggtttatagtcacaacgttatttcagttccaagttatcattgacagtcccagaatgcatcagataagatagctatattttgaataataaaatactgtacccaacctcctccaagttgtcagtaatattcattcttttaaatttgagatagtacactactaataacgaggttaatgcattgtatttttttaaacaaaaataaaagactcatgaaaacctgcataaaatatttatggaaatggagtgtttgaagacaagccaaaatttaagcttaattgcatgaattcctgtcacagttttagttggtttgctgaaaatattgcaagtcacagcactggaataaatagctgtgagaccaaaaggctacacacccagtgtttgaagccttcatttatgtaaaattcctagaaaacgcaagcgcttgtatatttatgtcttaacacatagggaggcactgttgaggtactgcttgttggtttatctgaggaaaaacatttattgatagcaggaaaatatttcagtcttcatttttattgtaggtatcaggattttagtgagtgactagccatatatacgtttagacccgcgtctaggatgacgaggatattctaggtgggaagaagagtacagatgtgctcccagggtgttcagtcacatagaagatagcaagcttcagaagacagttgatacatttcatttggctgaaatcacagtatgcccagtctttttcattttggagctttgtcacataagataaatgaaaaagcaaattgcaaacattgtagaataaaaactttttttattctcacttgaaattttgctttttaacaatatgcaactcttttgatcttaggttagaaacacacaagttctgatactttaattttgacattatattttcttaagaaaagtgttcatcttggttgagtctatgacttgaattaatataatgttatgagtttagctacaccaaataaccagtgatgccattggggtgcctgcctcttcctgcagctcagcagagtgaactgtgaaacataattgtattcctgttttagccttttattgttattttgtcaatgaatgtcaacctgtgatttaatctcattattcacaaagcctcttggattacatctctgatctgtctcttagacttaccttctcctgtctcttcacttttactttgttagtcacgagaaccccaggaattttatctccttggtttttcccttttaatttgctgtgaagctaagacaagttttcttacctttttcttgagccaacagaccttctcaaacagaaaccctcctttktctttaatcctgctgtcctcaggcccatttctttcctctccccagagtctcagtttcatccatccttgactccacaatgtcttccttgtgcaaataaagcattagaggggattttgagtgggggctgaagtgtgcagggctatagggtttctaggattcctgtcataaagctaacagaattgccctcttccttctgtttacgaaagcagacttcttcatgattcgaacaccttggaggagttttacacaggtctgcctgggcttctcccaaagtggttatacatgaggtagttgcatttttggtctccagataggcatgttagtaagatggaaagcagaaagatgttaaatagtgtcttttaggtttggcagttaattagcaaagatttccaggtctttgtttatggtccttctagattttataagatcaagttgaagatttttcaaaagcaagaatgctctttgtgtaaagtgacacagaggaaggggagagacacatgcaagatttgttagggctgaagattccaagcaacagtgtcaaagctattcttttctatatagttgtaaatgagtgtgtgtttaacaaattcagaagccaagaggaccattccacactgacaaagagcaagctaatacacacaaagtctgattcatctttgttactaggtagctgttagaataatttttattctgagtgatagaagtgaaatgtaaagaattttctctgtaaagaactctgatgctctaaagcaggggtccccaaccccggggctgcagactagtactggtccatggcctgttaggaaccaggctgcacagcaggaggtgagtggtgggtgggtgagcattactgcctgagctccacctcctgtcagtggtggcattagattctcacaggagtgcaaaccctattgtgaaatgtgcatgtgagggatctaggctgcgtactccttatgagaatctaatgataaatgtaacgtgcctgaatcattgaatcatcccaaaactataccccctactcacatctgtggaaaaattgtcttccatgaaagtggtccctggtgccaaaaaggttggggactgctgctctaaggtgactgctgaagtcttcaagtatatcctgatagcaaggtgtagtgttagattttgaaagtctctaaagaccctttcctccttcttgtttatcccttgatctgtctgctgctgaggtgctgttctgttaaggaacaggaggctgcccctccattatgaagtatacatatgaaatctttcctaggaagaggaaattctaaccggcctggaacctgctgtcttcatacgggagattctcttgaagagagcgtgatagtcagaattagctggtgggtgtaatttacctttcatcatttctcatactctgacttgatttttgatccccaggagctgagtggcataggtcacccattttgaagggaagcctatttataagttgcatttggtttttattcaggaagaaaaataacaaataccctctgttctgtttcctaatattccttatcattggctcatatgttaaaatctatttatatttgtcttaatgattggcagttctaaaattccatctaaaatgaagactttgtactcagaaactagatgatctgtatagtaagaagtcattgtctctttttcatcctacatgagttttactatctttgttcctttcttcttctcagagtagtggccagtagttgtcaaggtttgtcttaaatttcatctgaaaggtaagcatatatgcttgatcttcaagttgtagaaagatgatttagccatatgaataaatttaaagaccaaattatatttgctgagggtgatttataaataaatatgaggtaaccattggtgtcaagtgtgaaccttccattcgattgctagtttgatcagtccacatctaaatgtggaaagttctgtattcctatggcrgaagacatgtgtatttgatktattaaaacctgctgatgtctccagaactaaatttgttcctttgtaggcctctgggttagcggtagctaaaaagcagaaatgtatagtattagcttgtctgattacctgacttccagccctgtacaggtgtgcaggaataaattaacatgagctacctctgatgagccactgcatacattaacaacagaggtgaagatgcgaaaacatgttacctgcctcctgttaccaccttctcagcatagcaacaaccattttttccatcattctctatgtttggaaacttatacagaactttttctagggagggcttttcagtaaatacacatgatttcaccaggcaatacctctaagaaatgagccacttagcaccaattcaagataactattagtatatttgccctaatataattagctgtcaaatacgatgtggtaatcccctccaagtaaaagaggagaacattttaaagcattagctgtttcatttcattgccaatcaaactacaagtctccatttctaaaattctcttacaacatgaagttgtgcaggtcctctgacttctaaatgttaaggaagagttttttttttttccctgctactctatttggtttcacaatagagcaagatcaatagaccttttgtacttatcttccattactttccatcagaagcaaacacacaaaatacatccccctcctgagtaattgctagttgtgccctcctcaagcaaaactttggtagtaagataaacttcagtgtcattcctgtccctggggttctttttagatactgggagaagagcaatgagcaaaacggtctccttgtatcatggggagagactctgtcaagcctaaagtgagcctcggatcttcctaatgacctcctgctggcccagctggatgcaagacaagctcgtttaagcctctgctgacctttcactcctccactacaagaactgcaccactcatttccaccgtcttcagaactgtgcaccaaatagaccacaaagcttcatggctgacgaatgatttccttttcatgatgcaaagagatttttacaaatttctattgatgagagttaacattaagtctcttgtggcattataacctctgttgcacaaatacaatgcttctatataactcttatttttaccttccttataaaggaacaatctactgttcttgccagcattatcttgaaaattcaggccaaaatatctgagcagaatgcacatactgagtgcaccggtggtatttttcatgaagagaccactttgaaagggtcttcctgatttccacctccctcagaatctatctgaccttctcacagactttattggtgtgaatctttcttatatttaaccatttatttgagatgctcatttttgtagcccatcttttctttttaaaaaacatgggctggtttctacccagaagagggtggtaagactgtacatgtacgttaacattcacttgtataactcaggtaagttccgttttgtcttagatgaaaggctgctatcaactcttttgctgtaagtgatcattcgtggttgtactaagaggaagggataccttctttgcctaaatgccatagtgaaggtttagccatgaagcattttttttctttttttaaagscttctcagaaataatgtgcttgccataagactcccacaagcttcaaataaatgaatgtggcagaattggaaagaagcttgtccttgccaaaaaattgcaatgtcataaaagagggatttggtaactttgattcttgagtgccaagatatgtgtatgagggagaggcaggcaagctaagaccgaggaagaaagaatactttttaggaaaggacaatttttcttcagttatttcacataaaactacacttttaaaatatacctagattttatgtcctaatgcaagctgcttgaattaaaacaggagttgtaaattcctggtaaaaagctgttacgcctaaagtgttagtgatcctaactctagtactttatagagtttattacttcttttattaactagggggaaaaatgttacccacttctagtttaattctttttgttgcttgctctaattttgactttaccttaggaaagaaaaaaaaagacaagtgtttctaacagaatatatgtaagcgatgcctcagtattgctattgcatatatcaatctgaattattaccagccactcaaaaattgtgctaatgttctaatctaaattcatccacgtaatgtatatgtgtgtttacacataaacatccacataaataagaatatcaaaagacagatcattcttaattgccagaatagacatctacatctcggaaagtgatgtatgaagtaactttatcacattgatgggaaataagatttcgtaagtaaaacaagacccatttgggcaccaagaaccacagacctgcagctggaagccctgtaggtctgatgggcagtggaggggagccgctctaactctgctgcctttttagtctgctctgtcactgagggggcactggtgggtcagttcgctcactcgtaattgtgttttacagacttctaaagcaattggctcagtcagtcccaattcaataaaagtggagagcaagagagagagcacttttgttctattttttacttgaaattatttcattcagcagtctgtcttttttattaccaggacttgacattagcactccaagctatattagcatccatttcagcagttcagtaatggtattaaaaaaacacttaacttcaatggtgaatggttgtatgacagtaccataaaaaatccacattaaaaaaaacttatgtatttgtcccagcaaattatttttcacttgtttaaccacttcaaaactatattctcatgacgggtgttcacgaggactttcttgttctcagcaacagctgacagtggtgctcggttgattagggaactgaggaaagaggaaagggaaatccagtgaagagagggtaggtaaagatgctgtttaccctgtagttagattaccttccattcatcagcagagatggaattggcaacctcagagcacccaaggtgaaattcttggatcctcatgcgtgactgggatttgattttgaacccaacactctccaaacttgggagcaaagcctaactactttggcactgcaatgtgctcataaatgactacattagtttctaaattttgattaaacattcagtaattaatcaatggtagacacgaagcagttggcaaggtccagagctgcaaaatgtttaagacataaaacattacgaagtaattagaatatgctccttcaagagaaggattgccttcaataaagaggtaaatgatagtatcctgtttattgtggacgtaggcagccaaagcaatatgataaactgctggaracacacatatcagtaatcatccacattattagtgccattaatcataattccaaaaatatgacagcagcagccaactttttgaccaattttgcttctgcctgttggccattataacttcactaatagactgcagagctcctatgcgtggcagtttgcattgagaatggaaggttaattatatttgagctgctgatttcttctctccttggaaaaggcttagcactttgacaatcccaagggctcactgttgttaaatcagtaaaagtactttattgaaattttctttgttggtcaggaatgagatgtttcaaatgagatataagcaccaggctggaacagttgctaatgcttcttgcttcaaagtgatccttgggcagcaagatgaactcagtggtttctttagatcactttgctctctcatttctcgggtaaaaagttcagtgctatatggtgatacaccaggaaatcccacaagattagtggtagtctcaacatgtatctgtatgactgggatgttgggagtggttaataacatcagagggaataagtacttctttaatacaaaatcctgcatttcagactctgcctgtgcaaataaaaagtaaaaagaacttcacaaaaatcatccgtttctaaatattaaaacatttagtagcatgcatgcattgctggttggttaaatgaagttttcatgttttggctggtagttttgacatttaatcaaagttgtaaattagattatgctcactctttttgttcaggtgtctttattagtttcattttcaacacagaattctagataaagccatagctaaatactaatattgattgtcctacaaaatagtgtcacctcccttggggaactcatgcatcctgactgttaccttttaagaagatcataaattaaccattttaggctgggtgtggtggctcacacctgtaattccagcactttgggaggctgaggcaggcagattgctggaggccaggagttcaagaccagcctggccaacatagcaaaaacccatctatactgacaaaaaaaaaaaaaaaaagctgggcatggtggcacatgcctgtaaaaattagctcctattattttggaaatatatcttctaaaatctttataaagtaaggctatataaaacaaggaatggaaagcttgagggttaatttgtccagtgtaaatataaaactcaaagctcagatttattctcagtaagtccttaaaagatgccagggctcatggctttgctttttcttacccaacaatagtagtaaactgagcaccatatgagctgcttgattgagaacacttccaaatgctgtgaaaacataatcctgttcacagtgtaacactcatctcacattacagcgcaacaggtacctattgaataatcagcacccttgagaagcctcgatgtctcagatacaactcaaaagtaaaatggttagggaatggggctgctggatatcaattctacacttaacctgtgcatccagctacacattttccatctaccaatctgccttcccaaatgccatcactacattaacattttttatgcattccacagcaatgacaaattgttttctaactgtagggccagatttagtatgcgaaagacatgtttgcctctgccaacaaaccaataattctcactaacgtcttcagagttacaacatttataaagttgcaaagtggagtaaacaaaccatctgtttggcttttccatatatgtcatgctttcttattagcatattacgattcatttagtaaacaaatttggtgatttcgttcacgtcaaagttagatcggaagcttgaagatgattaacattcctgggacaagcacattaatacattgcttcccctgcaaagttaaatggcttctcaggagaatcgccccttgttgacaagatgagactgtcaattttgtctgcctgccacattaggggccatacggggatggcaggctctgagagaggggagtcgtgtaggcagcataattcactgtgaattgagaaaagaagtctaattctgataaatggtcgaccccaatacatcctacctgttattacaacagacgtgccgtatctgtgcagtaaattagctaaacccctaaagagtttggtaggagcttatcttcaagtgaataatttgaatgtagaggaaactgtctgcgtgactagtatggatgatttgttttatattgaaaggggttgaaatgactgagtttcatacttttaatttgcaagaatttgcttagattttgtttcttgcatttaatatgtacttccttacatttggggctttttgagtgttacccactagaatttcacattgaattttcttcctgagctaggggatggttttcagatcttttggacagagtctttaaataataacctgtagaacaactactaattttacagaaaggtatagtgtcaaaagtatcattttgtgcacagagccataagcatcctatcgttaataaatgataatacaaaaatgttgaggtaagtgtaatagatagtgttgtagcaatccagataagaaaaggactaatgaaggcagaagttttaatttttcatttctgtggattttgatagcaggtttacatttctactcaaaagtattgttgactcagtagtcttacaatgtacttaaccctagcatctagacttacccagattggatataaatttatctctctctctcccattctccccatatacatatatgtacacacatacatacagacaaataggcatgcatatggtatgtatatgttattgttacgctatgtatatgttgttatgatcattckgtacaatatcatttgagaatttgtgaatgtgtgtgttgaacggcagagttgagctggaaaataaaggcaaaaactaatccaaagtggggcctcagttatttttcccttgaggcattctaattaattattaagtattttgtttcaattcaccaagttcagaatgtctcaaatctgattaagaattaagacacttcatgcaacctatagcttggttcattattcagtctctgactgccacagtcttactttctaatttggtcatgcaacttgttttttttttttttctttttcgtgtctccccgatatcttaaagccaagtttaaaacctcaaaacactttctttagatagtgtttttgtttttagttttatgggccagacatcacattaaatctaacttaatgtgatgagaaaagagaagtccaaggcaagacttgctttctctctaaagggcatttgcacttacttgactacgtttgatggatttcatgtcttctgtggttgcatggtaaagttttcatcaaaggaacagaaaaagactggtagtccactttagtccagttagagtacttccactcagcatttcaaagaagaaggaagtttggttctgcagcaccctcccctcagtccaaggttttgtaactttttgcttttaagggtgatattggtctttaacaagcttttggtagattcacagtatagaaagagtacagaggtttaaaggaagcatttgtagttccaagcatagcccaagttacagggctttttcaagccctaattttgtggcattcccttataacatactatggtattaatagcgtcaggatcaccgtttgttttgtcgccaccacctttccttggatattctgttacatgagtcctaccttgggatcattgctttcttcccttctacagtgtattttgggaaatactttttgaagactcatgcatattattgatggaagggaaaccaatgtacttttaagtacctcctctgtgcaaagtattctactttacgtgcaggacacataagattgagtaagatttagttatgttcttgaaagtgaacgtctggggctaaggtttggaccactgccttaatgattaccactgcacttcttaagaccaagtccttaccccttatacctatgaactcattttctctctgcattccagtcactttttttctgtaagaggaacttccttccatatatctttcttgccttccaaatcaaagcaagtagaaacaacctttctactgttcatgttcttatagaatgtaagaagttctaatacagtcttagatatttgttattgagtattcttccctctttcctagagataaatattcagaacactaaatctgtttctagaaaaaccatctctrtcgctggagagctcaaaattggttccttgttggattctttgttccaattgttacatacaactgagtagggcttcctctgccagggagtccccctcctgtttccagcactctctggccttcctgccattttagggtcttctctcgacatctgattatcagtaggtgagagttctttctgtgtctctcccaacttctcttttcacctcttcagttttgctgatccggataaacttgtaatagtcctcaaattgctattaaccctaggtctttgtgtctcatgaggacagtattttatgacagctaatggtctggattgactgattcaagagtccaacaataggtctttgttaaaatcaagtgctgtcttttgtcccttctttggagactgaaccgtaacctcttgggtaggatcggtaccctctaaagaattttagtctgctttccttctcgtgctttccttccttccaccttaggaatactgtgtgagtttgtgagaaaatcttcaagcccactatcatgagagtgaacagcagactttcctcagtccatccttcccatctccacttcaagtgttttgcatatggcatttaggaggattattaaacaaaaatgaaatagattaggaattgaacgtaaaagaatcaattctcttgaactgtggttgcataatggaaatcgactaccatgaatgaacccgtgtactgaagttatgaagagcagagctaatgcactgccatgagttcatctttattattgcattacacctgaatcaattgataaagtagctgttttttttaaagtgagggatggcacttaattgaataaaagtcaatgtaattatattagcagaggccaacagtactgctgacagcggaaaagggacactgttgaacagagtgccagagctggtctacacatttctgcacatcgtttggttgacagatattgagggctggtacatcgtctaattagattacagatttctactgctgtaagtgagaaatgaagagaaaatctctttctggtaacatattggtggagatgtgtaatttcacaagtcatcttagggaagatgtgtccatctgggtgatcagtgtgtccttttctcaatgttaatttattcttccttattcagtgtgtcttgatgcaactgctgtgtgtctggctgctgttttctcagcagtgaacctaggaagtggtaactgcagatgtgtgagaagcaacagagttctagattacagtcatcgcaaaatgtgtgctcgtgaaattaagaaagggggagggtgttaaaaataataaacaggggtaggatttcatgagctgctcatagttggcagatagttttatcaatagaataatagcgcatagcgtaactctacttccacattcttgtaataactggtggtgttgtacccacatgtcagagtaaagacctcacagtaggcatttcctgcactttgcttagcaacctgcacttggagtcatctgccatctgacaccaaggaaacggggaattactgtgtcagagcagggaccgtggggacaacttctgtttatcattcacatacccacacactgcatgcatctgtttagaactcatttgtggatgatgatgctgtgaatttggtttgtgttaattcgatttatgatttttggattatacagctgatctgaaaatcatcaagacagcgtatgggatgatcgcttatgacagaaaataattttgtgatcagaacgttttaaatccctattttattgtttaagtttttcaaaaccagatgtctagaatgtgaatttgttttctctctctctctttctctttctttctctctctctgtctcttattcttgctttcttttgtgatcgatttagcaaaagattagaaagctgatcttattgtcacaaggtaagctcagccttcctaagtgcagttggagagggctgctgccctctgccccttaaaacccagagtgctgtatattgtcttgtgtggaaaggtggagaagtcttccccacctttcttgtctctgaggcacatacctctcaaccatctctaggaaatatcacccacgtttgtcaccaaatggaatgacacattttggtcttccatacttttaagtataatcgggaggtctgttgaactttatatcagccatttaggtcatttcttttatcacaattacttctccaagctgtagagcttccaccagtattgagaagcttttatgtatctgtagatatgtcagtttattttttggaagggtaaccttcaatttaggtactgttgaacatgtgagcctttgcaggtggagagaggtatgtgcccaagggcactttaaaaataatgggggatataaatacaaagacaatgtttccagatagatgataacatatcaggctttgtaaatcatgatgtccctatggattctctgggacaaatcctgtctttatatatatatatatgtaaaaaaatatgtatatgtgtatgtatatacatacatacatacaagcaaagcactgagtgagtagaataaaagttttgcttgtcgaagaagtatgggttccagttgttaaagtaaaggaaccctatgttattgttgtgcttgatttttttgtacttactgtgttttaatttttgtacctctgagttttctttctgttgttcagtgtgattttttttaaaaaggtgggtgggttttatttttttaaaaagtttctgtttttccgtttttgtcttaaagaattaaattttaaagtagaactactcgatgaaaatattttggacactaaaatgcacatacttctaaaaagtaaatgtattttattattagatttaactgggattcccaaatcattctgagaaaaggcattcgtgttgttaaaagacagtctgtaaccctatttcaaattgcttaatctgttaagctattgtttttccttaaaacttgaaatgtggagggtagagacggaagatttcattattttttgaagttgtatctaaattatctaggctacttttttaaaaaatgaattttttctatacctcaaaataaagtgtgtgctgtatagaaaagatgtttactttttcttgtttttaggtaaatttagactattccatttagacaagcagaaagtttctattcttttatcctatttaatatatattctaaaatctctgccatgaaattctctgcagctgatgctgctacatagtaaaactaacagagtaatcattgagaaaaaggtgcacgggtttgcattcatcctaccattgacagagtcaactctcttataaaaataatgttaatggaaagttcccctgattgcacctctcaccaccaccactaactcccagatcctgaggatataggggaatgcttgcttttataatggtgtaattagaagtgaatgtgcttatttgatacctagtgaaagctgaatcaattttaaaatgctttcctttttctcacctttccccaccccccatccacgtacccccccttccctcttgttttcctagacacagtgccaacataaacctacatcgtaaactgttgaccaaagaactcgatgacatgggcctggactcgtcgcagccctcccttagcaaggacctccgcgatgaatttttggtgaagatatatgrtgcccagcaccccatggggctcgatgtcagggaagacgcctcctctcccgcagggactgaagactcccacctgaacgggtatgggagaggcatggcagaggactacatggtccttgacttgagcaccacctccagcctccagtccagcagcagtrtccattcctccagagaatccgacgcaggcagcgatgaggggattcttctcgatgacattgacggggcgagtgacagtggggagtcggcacacaaggccgaggcccctgccctccctggcagcctaggggctgaagtttcaggatctcttatgttcagcagcttgtctgggagcaatggtgggatcatgtgcaacatttgccacaaaatgtacagcaacaaggggaccctgagagtgcactacaaaactgtgcatttgagagaaatgcacaagtgcaaagtcccaggttgcaatatgatgttttcctctgtacgaagccgaaatcggcacagtcagaaccctaatctccacaaaaacattcccttcacttcagtagattagtctcagaatggacactacaaatgccagctctcaccagatggcctacgtgtttgaactgccatagtcagtgtgcgcttatgtacttggggtgtgtgtgtgtgtgtgtgtgtgtgtgtgtgtgtgcatttatgtatgctctgtggctacatatacacacacgtatttccttgagataaacaagataaacactaggtgcttttgaatttttttcacttccctttatagttttgggaaaggagtgggatctttgatttcagggtgaaaacagagtacccctttaaacacacacacacacacatgcacatacacacacacacacacacacacacacacagtgtgcaactagccccagttttgacagaataattcttggtcttccccaaagagacaatttgttgtacccatgactgttgcctgcaaaaataaaagggaaaaaaaagaaaaaagaaacaaaaaggaacttcttatagttgtcttttgtgaactttaaggttttgaaagaatcttcaattaaagcatggcagattcacctgtaaatatttagccattgatgtaaaacaattgtattgatggttgtttaacttttttgtttaatttttacagttacatccagctgttagatatgcaggaaaagatagtttgctggctagctctattcatttatgttagcattaatgcacatttttaaaaaaagaaaaaaacatggtcttgtttttactacctgttagatatagtgctaaagaggtgctggcatgctttacagcacagatctgattttttaaaatgtcctgtactagtacataaatcccgtcatgcactttttttcatacactacaaggggatgtgtaataaccatgcttcttttttatccttaaactattgccatacttcagtaagtgtcttttttaaaaaaaattcacttgtataaaaatggtctggtcagtatagggcacaaatgccaaacaaagtattagtgttaacacaaaactgccaactttgcacaagtttccagaaaagaaaatacaattagtcactcaacataaccacaggccaatttgttggccaccagaaaaccgctttttaaaaaaacacttggtgattctttcaagtgccgaatgttattagaatcaacattgcatccttcttgcttatacgttaagttacataaaaggaaaacaaaattatgtggtgtgaaacagccaaggcatttattcttcagaggcaggataatatttcaggatacaaaagcccaaattacccgctacggaacaaagatgaatacagtaaaagagtcgaacactcatttccaaggccctaacccttatcctttaaaaagaaatcctctgaactgggtcggtctgttgtatggctgtctaatttgttgcaaattctgcagtcgtactataattcaggcctgtttggtagacaaaatcaaaaggcatttaacagcagcagtacttggaagctttgaaaacatgtgctaaacttgaatggagcaacactcctttctgaaaagccagaagaagggggttttaaagcaggatctctcaatgttyagtgttttgtgtttccccacacgatttgtcagagagaaatgaaagcaagcctgaaaccaagcaattgagagtgagaaagaggagagagactattctccaaaccttttttgttttgttttgtttccgatgtttacacatgttgcctgagctggttaaccacatcggcagcctcagctaccacaacatactgactaaatgatgatatttactcaagttcagtctgcagccaaaaccattagggtgtgcattgcagactgttttgttgtcttttttttttcttttttcctttttttttaagtggaggggaaaagaagagataaacaaggaatattttgtcaaacagtacacaataatttaaagagaatgtatttcttttttgcatttaatggcctcagacatttctttcatcagtctaaaagttagaaatatccctttrttttaacttttatgtcgtttccatttttcatgtttttgtaattattttttctatgttcacatcagcattcacttccgttaaatttgccaaaggaaactgttaatatgtttctgttgttattattcctgtaggatttattgtacctcacagtatttattgtttcccaaaataagcatcattagttggggattcagtatttttgttgtgaaaatttcagaaacaatagattcttaaagataagctagctatgtctaggagctttatcttttcacctccttcagaggatgctatggggtccattttaattcttcatttgttctacggggaggaaagaccaaaagtatttgcagtacaaaagaaactatatcaaacactatgttaaatgacaagtgtttatggtaaaaagctgaggaattagtaataatcgtttttgttttcttgtactttgaattccccaaagtcttaattgctttattttggtgttgtgttaaattgaacagacagatgttttcctttgttttataccatataagactctgtacagtatgtttgtgaaagattgaactagaataatgaaagtttgtttgcaaasattttggtcctctcagcgttctctgtgttgtgctgttgccccattaccaaatggttagattcaaaaagggtgggaaaagatttttaatatcccaacaaaacattatagaaactctggcttttgcagtgtgcatagactacatgtagttttatgaaaataaatacacatttttatttcagcaactttgaaaagttacactcagttgagttactagaactcatcttgtacaacagcaatgtttagtctgtttaatttaatgtcaaataaaaggtcagatagccctcgtgagtgaattacatagctgtcggcagtcacatcagcaaatgcaccaggcttagaacaaatgtttgttacttgctgcaaaccaagctaatgtgtatagccagttagaaaaagtccagaagtaatgagattctagaagtagagtttcccttgcttggaaacatgaatgtgttcacctgtgttttgtcagagaagtggcaataagtcctggacagctgacactttttaagtatctcccctatttgctactacttttgtgcctcaagtgcccagtcgttacggtggccttctaaatgagtaaataacattttccaatataaagcctatttgcttaaaagggacaggggagtggatggatgtagtacatgcaatggaaaatcataaaatgtacaattcttctgtttccaaagtattgctcgttcttgagtgtgtgcctgagtgtcttgttttgacttaactagaattctagttaagatggtgatcccatggcttatttgcaaacaggaaggataaagagatcagcgttttagtcatggagctcatctttgcccattcctactcatttgctttttcataggagttttttgttgttaaacagtttctctcaagccacatgcattctatgctggctgaaaattaatagtgatgtagatgttcatccgacaagcttttccccatgtgattggttttagccagagtttatcacaggtacaaaattaggcggtatgactgtgcatgttctctagctgatgttgaaacttgtactgtcttgatcatttaaaactatgtttttgtaaatatcaggtttagtccgctttcgggaatatctgcatgctatggaaagagagaaaaaaaggatagataatgaggaatttggtttaaaagtgtgataaaaatccttggcattctttgttctgatattaattgtatttaaataagtcaacccaatgtaactcattccagatcttagtccagctgccctgttcagcctgatgccttttaaaggtttaaaggtgttaatgttttccttttcaacatggcaaacattttttaaaacctttttggcacaatggtgccactgtcctcatagtgttatttctttggtcatgaattttcaggcccttccagtaagaggagaaaggcacttaactggttaacagccccattattatacattgctctaaggaaaaaaaaaaaaaaaaaactttgaatatatcaagaatgggctattccagaggcttctcctcaggagaaactatgcactaggttcccaccaaatacaatgtgacctttttttcccctttctctgtacacaccccagatatgtgccaagcaaatgagaatgagggccgttgacaattaaagcataaagaagctagtcaccagattgagatggacatgctgctaactgctgacagcttgacctgagcagtcctaacttgtatctggtctgttagcattgggttagattgactaacagagtaaataaaattcacctgtcataagacacgctacatctgctatcatcaagaaacaaatcatccagaagaaactttttttcatcctgtggtcacacccttttcttaagagcttcttttttaaaattatgacaaacgaatttcattctttaaaatcacttatcttctcccaaacttgaagtatttaaattaggtggttttgcttttccctctcattgtttattttttggggatggatctaaatgagtaagatgagcaataaaagataccagaaagactggagggatcacagtgttttcatcagaactaagtagagggtcggttcctgccctggttttggggtagctagaaaaggaaatcatgaatgcactggaaatgttggctcgagagaaaagactggcatagctctgcctcgcagtgggtgagagcgtattgatcgtagggacctgcagagttcctatgaccaggtgagtcggctctgaggaaggggttaggaaagcaagtacagctgcatgaaatagctgaagttcctttggggtcaggaagagccgacaattgtggggttttggttgcttttgctttgtttttgagtgggaagtgttgctggaatcccctgagaaccgaaagatgccaggggtcagcaaggctatagaaaaggccagtggtaacacctcgttttcatcctaacagaggagtaggtgcgaatggcaccagcatggatcgttcctttcttgatcattactcatgcttgccactgtagcaacacaacaaagccatgattgtaattaatactaggctaaagaccttgatcaaaatgggagctcatttactgttctatgaggtatgtaagtaacttctcttcatattttccctcagagataaaccacacgtggtagtcttgtttgcgttagtactaaggtcatgtttgatctgtcccagacgagtcgcatatttcctgtagctggagtgttgctcaccataaatggtcattttcaaaaagtattgtgtaaatccagctgtacaactgaccagtgagttatctgtcatcactgttgcccacatacccgtccttccttgtgtagtttcatcatcctcatccttcccacatcttgcgcaaaatgattttctgtgctcattcggcaataactatgttattcggcatactgtctttttggcatttgttgaaaaatccaaatgcttttaatccaaaagattaatccaaatcttttttaatccaaatgattttaatccaaatccaaataacaggaggttaaaaaaaaaaaaaaactaagcatttttacatgtacactgaattggatcagcattattgttcattataatgctatatatatttttggagcaacatactatagttgtcataaaactatctttattcttctcctctaaagtgctgttgtaaattcatttgacctttactgcaggaaaaaaaaaatcttttttatataggatatgaagaccaaggctcagtctgtaacaaatagtggaccattacaaaagaggaaagaaaaaagccagggctgagcagcaagaagcttcagttcaatttcacctcgtatctttctaataacatacttgtcactttattaccttccagtaatgtgaacgctgctgacaagactgtcacactaacagcagacaacaccctctctgcttcagcccagctctcctggctacttattgccctggccctgaagggacacaaactaatagtgtgctttccagttcagcacttggccatcaaatataaaaggatgcgtaattgcctgtttatccccttgtgaaggagaaattgactacaagggctaggctttcccatcgagttccctgatgtacacacacatccacaatcagtcagtctctctctctctctctctctctctctctctctctctctctctctcccctctctctctccttccctcttattctcccctcctaacatacaagcacatacacacacctactgtatctgtgggaagcccaaggctgcctctcgatgccctctccagctattaagtggacagtaacaagatgacttcttaaataaagggtca

SEQ ID NO: 6850 - DNA, 36110 bp, Homo sapiens
  misc_feature (1)...(36110): n = A,T,C or G, or insertion/deletion polymorphism (see Tables 1-2)
ctcctgcctcagccttccgactagctgggattataggtgcccactgacaagcctggctaatttttgtatttttagtagagacgggttttcaccatgttggccaggctggtctcgaactcctgacctcaagtgatccacccacttcggtctcccaaagtgctgggatgacaggcatgagccactgcgcccagccactgttcgctttttttctcagtggttctctagtccattgccttaaccactcaccatgactacagctcttatttgcagtgactctcaagaatgcaaatgcaaatgccattcctgacctcgagttaattcagctttgtcccctgagcatgggggaaaggcaggctgggggctggaactttctgcttgtgtacctatctctttagactctggaggctcctccccaatctctgtcattccctctccaaccaaatccacctgccgtcccagactcaaatgctcagccacctaactgcctgaggacccagcagttaatgagtttacatgctgggggcaggagtcagggccaaccctccttggttcctctggctccctggaaagggaaagtcaccaagaggcagctgcaggcagcaaagagaataagcaggagaacctcaaagccacaaagggacagcacacagcatcttccctgtttagcctggacttgagaatgctgtccccagcagtaagctgctcaacctcaaagcaacttgcacgggggtttacaaaaaaatgcacttggccgggcacggtggctcacgcctataatcccaacagtttgggaggccgaggtgggtggatcttttgaggccaggagtttgagaccagcctggcaaacatggtgaaaccctgtctctaccaaaaatacaaaaattagccaggcatggtggtgtgtgcctgtagtcccagctactcaggaggctaaggtaggaggattgctcgaacccaggaggcagaggttacagtgagctgagatcgcaccactgtactccagcctgggtgacaaagtgaggctctgtctcaaaaataaaaataaaacataaatgcactggaggaaagagggtaccactctccttaaggcgggggctgccaacttgtcctgcacagcccgtccgcctgcctcaggtggacttaaagcccagctctgagggactctgagcagtcatttaacctctctgagcctctctttcctcccctgcagaagggggattataacagttcctaattcatgagttgttcttggagtgaaatacattactggccaggtgagatggctcatgcctgtaatcccaacactttgggaggctgaggtgagaggattgcttgagcccaggagttcgagaccagcctgggcaacaaagcaagacccccatctctaagaaaagtaaataaataggcagggtgcagtggctcacccctgtaatcccagcaccttgggaggacgaggtgggcagatggcttgggctcaggagtttgagaccagcctgggcaatgtggcaaactcttgtctctactaaaaaatacaaaaattagcgaggcatggtggcacacgcttgtagtcccagctattggagaggctgaggtgggaggatcacgggagccccagaagcataggttgcagtttgccaagattgtgccactgcactccagctcgggcgacagaaggagaccctgtctcaaaaaacaaacaaaaaagataaatatataaatgaagctgggcatgatggtgcgtacctgtagttccagctacttgggatgctgaggtgggaggattgcttgaagccaggagttctaggctgaagtgagctatgatcatgccagcctgggtgacagagtaagaatctggctcttaaaaaaataaaaagtaaaatggaacaggtgaagttattttctttaatttttaaaataaaaagttatttttataaataaaattttaatttaaaccaaattattttaaactaaatataacattatatttgtataatatataaataatattttaattaaatctaatttaaaattattctaaatgttaactttttttttttttttttttttgagatggagtctcgctctgtcgcccaggctggagtacagtggcgcgatctcggctcactgcaagctccgcatcctgggttcacgccattctcctgcctcagcctcctaagtagctgggactacaggcgcccgccaccacgccaggctaatttcttgtatttttagtagagacggggtttcaccatgttagccaggatggtctcaatctcctgaccttgtgatccgcccacctcggcctcccaaagtgctgagattacaggcgtgagccaccgcgcccggcctaaatgttaacttttaaattgtctttttttttttttttttttttttgagacagtgtcttgctgtatcacccaggccagagtgcagtggcatgatcttggttcactgccacctccgcctcccaggttcaagcgattttcctgcctcagcctcctgaggttaatttttgtatttttattacagatggggtttcaccatattggtcagggtggtctcgaactcctgacctcaggtgatctacccaccttggcctcccaaaagtgctgggattacaggcgttagccaccacgcccggccaaaattttcttaatttaaaaatttaactcaatatattttttaaaaattatcatttcaagaagtgacattagccatctttcaagtgcttggtagccacatgtggctggtgggtgagggcagggcctgtttttttttttttttttttttttgagacggagttttgctcttgttgcccaaactggagtgcaatggcgtgatctcggctcactgcaacctccgcctcctgggttcaagtgattctcctgtctcagcctcctgcgtgcatcaccatgcccagctttttaaatttttagtagaaatggggtttcatcatgttagccaggctggtctcaaattcctgacctcaggtgatccacccacctcggcctcccaaagtactgggattacaggcatgagccactgtgcctggccacagggcctgtatttagatgtttgctattttgttcagcacagattattttacattagttaaaaaatattttttgaggccgggcatggtggctcacacctgtaatcccagcactttgtggggctgagatgggaggatctcttgagtccaggagtttgagaccagcctgggcaacatggtgaaactccgtctctaccaaaaatacaaaaaaaaaaaaaaaaaaattagctgggtgcagtggtgcacacctgtagtcccagctactcgggaggctgaggtagaaggatgatttgagcccaggaggcggaggttgcagtgagcccagatcatgccattgcactctagcttgggcaacagagccaaaccctgtctcaaaaaataaaaataaataaaaatgaaaaaaaaaatcagaattgcacacatgaaatgggtgaattgtatggtaagtatatctcaataaagctacaacaatatttttattgatttacataccatcaaactcgcccttttaaaatgtgcaattcattgggttttaataaagtcacagagttgtccgatatcaccacaatcaattgtagaacatttttatcatcctaaagaaacccagcaccatggagtggccactccccattcccttctcccacccaggccctgacaaccacaaatccacttcctgtctctatggatttgcctgttctggacatttcagataaatggactcacacactatgtagtctttagtgaccactttttcacttagcatcatgttttcaaggctcatgcatgttgtggcatgtactggaactccattcctttatatgaccaaataatataccattgcattggctggatgcggtggctcatgcctgtaatcccagcactttggggggccaaggcgagggcatcacctaaggtcaggagttcgagactagtctggccaacatggtaaaaccccatctctaccaaaaatacaaaaattagctgggcgtggtggtacatacctgtagttccagatactcgggaggctcaggcaggagaattgcttgaacccgggaggcggaggttgcagtgagccaagattgcaccactgcactccagcctgggcaacagagcgagacccccatctcaaaaaaaaaaaaaagaaagaaaaaaatatatatgtctataccattgcatggtcaagccatattttgtttatatattcatcaggtgatgaatatttatgttttttccactttttggctcttgtgaataatgctgctatgagcattcacgcacaagtttttgtatagacatctgtttttaattctttggggttttgcattcattttaattttaaaaacatattgcataaaaatgttatttaccttgatgactgggttttttggcattcccttaaaatttgcacctgggctgccaggcatggtggcgcacgcctgtaatcctaacactttgggaggctgaggtgggcggatggcttgagtccaggagtttgagaccaacctgggcagcatggcaagaccctgtctccacaaaaaatacacacacaaggccgggcacagtggctcacacctgtaatcccagcactttgggaggccgaggcggacgaatcacttgaggtcaagagttcaagaccagcctggccaacatggtgaaaccccaactcaataaagaatacaaaaaaattagccgggtgtagtggtatgtgcctgtaatcccagctactccggaggctgaggcaggggaatcgcttgaacctgggaggcggaggttgcagtgagccaagattgctccactgcactccaagcctgggtgacagagtgagactctgtctcaaaaacacacacacacacaacccaaacacacacaacacacacacacaaaatcagctgggtgtcgtggtgcgtgcctgtagtgccagctacttgggtacttgggtggctgaggcgggaggatcacctgaacccaggaagtcaaggctgcagtaagccatgatcgcgccacagcactccagcctgggtgacaaagtgagaacatagctcaaaaaataaaaaaataaatttgcacctgaggcaagtgtcacactcatcccaactcagtctcaccttgcatgttttctgccttgctggctgtatgaccctggacaagttacttaaccgctcagagcctcgatttcctcctctataaaatggggataatctctgtaactgctcacagttggtagcagaatgcaatgaagtgaattcgccctcacagagccagcactgttcttggcacatggtaatcttaacatattttttcctacagggaggcctggtgtcaggccgggagtggggtggaagggtcccaaaatggatggaagggccccaaaatggccgtgagcatcctctgcccttgagaagagctagcccagctgtctagagctccctgctgctgccgctctcgtaagcagcaagcatttttggctctcctgtctcagcatgatgcccctacaaggttctttcgggggtgggacccaacgctgctctcctgatggcctccctggctcccagcaccttccatcccagctgctcagggcccctcacctgcgcctcccccaccctcccctctgcccactcccatcgcaggccatagctccctgtccctctccgctgccatgaggcctgcactttgcagggctgaagtccaaagttcagtcccttcgctaagcacacggataaatatgaaccttggagaatttccccagctccaatgtaaacagaacaggcaggggccctgattcacgggccgctggggccagggttgggggttgggggtgcccacagggcttggctagtggggttttgggggggcagtgggtgcaaggagtttggtttgtgtctgccggccggcaggcaaacgcaacccacgcggtgggggaggcggctagcgtggtggacccgggccgcgtggccctgtggcagccgagccatggtttctaaactgagcyagctgcagacggagcwcctggcggccctgctsgagtcarggctgagcaaagaggcactgmtccaggcactggrtgagccggggccctacctcctggctggagaaggccccctggacaaggrgragtcctgcggcggcggtcgaggggagctggctgagctgcccaatgggctgggggagactcggggctccgaggacgagacggacgacgatggggaagacttcacgccacccatcctcaaagagctggagaacctyagccctgaggaggcggyccaccagaaagccgtggtggagacccttctgcagtaaggagccctgccccgtccccgctcccaggagagcctagaggggcccccctcagctcctaacgagccccccttctgagttgagtccccrtgaccttcagcctttagcctagttgctgggaagggggacagggcccatgagagcccaggggtccttgcttggaggtttgagcctccagcccctgaactgctcctctgcagagtcccaaatcccatgagcccaggcctttagcccagtccttgggcaagggggacatttcccaggggggtccaagatgggagaaaaagcaggtgagttcacaactcaaatgcctggagaactgggaggtggtggaaatttttagccactctgatcatttatactctccagaccctaactcctgcactgagtcctcagtgggtaggctccggggcccaggaagcactgccagggaggagggcccgaagctggggtttgggggctttcctggcctcctagggactcatgcgtttagccagggaagcccaggtctttcttacctgaggcagacagagcctcgaggtgggagctgctcccctttcctgtatggccacaggcaccccacctcaccagcaggcgccattagaggctgcccgttctacatccccatccgctggcgghctccccgtctcctggagaactgggtgggtcctgagctcgatgcctcccctctcctcagcagagctgacctagttactaattacccatgtgctttattatttctcttttgttttataaatttataaatggcaaaaggctctgataaggtctgtgatcattaacttgtaggaatggtggcctggaaagatctgggccaacccacctcccacctagtgggggtgggggatgggggtgtgggggagaaggaaggatggcctgggggctacaggggccacccctccccagcggctccctgacctccaccctacagcgcctgcttgaggaggttcactacttcctgggcgctgtgctgaggtttcacaggaataatttcccttcatggtgaggagtcctgggcagaagctattggtgactctgcttcacaaatggggaaactggggcttagagccgggaaggagctagactaagttcaccaaactgaggccccaaacctactctgttcggtgctctcaattgctatgaccggggaccagaggcctgcagggggtggccagggagtcagagagagaccgagccccaaagatgctccaaaggggcccatctcttttctgtccaaggtcctgatcccagctggggtgggggagggctggtggattcctgctttcccagaggcctcagggagcctcccgagggcctggacagggggcaggggagcagtcagggccccctgacttggcaggaagaggagggcaaaggactccagagctgcaggggaggggcaaagagtcaggcatcccagacccagggcgaaggcaaccygacggggtggggctgggcctgacctgcccagggccccagatgggactgggggctttggggtgagggtgggggcaggggatgctttcttacctggctgagtgagctctctcggtcagcagccccctttggtgggatggtggggttggggaggcttgatccacagcatttgaaggggaagcagaggtcaaagtgcttcctagggaccagcagagacctggaagctgaggcagagagtgtagagagaggccattgggggagatggacagagaagctgggagaagcagaacggaggagccaggggggcgggggctcagacccagctgggagaaggggcacgggagagaatgaggcgccccaagcttgcaaggaggctggagtgcttcccgcctgccccgattgggttttctttaatgctaacagcatgctatttactttccatttaaatttgagatgttgctataaattatcaaccagctccttgttcctgcagagtttataactaactacctgggttacttattgttcaggtaacaaaagggatcggaaaacgccctgagtgaaaaaagtggggcctccagcgtcagggtcaggaaaggagccagggagagaggggcgggggacccctattgaaggcctgggccattggggaggttgaggctgggaagacggtacagaggcagaatgtctagtagaagctgtytcccgggagaagtcagtgtctgggaagaagccggggtgggtcctgggtcccaggcctccctggggtgccccatgttggtggccacagcaggaacctgagctctttcttcagatctcccccttagctccctgagtgaccttgggaaagtctgttcctctccttctgcctcagtttccctccctggccaaggaataaagtccaaactccctgccttggtttcgttcccctccctccaccccaccaaattcctggatctcttcccaggtctttctcttcctctcggcctttgctgcagtcattttggctttgctgttcctcagtaccccaagccaattcccaccccagggcctttgcacgtgctcttcctgctgctcagaacctctttccagatcttcccatggccgattccttctccttcagctccctgattgctccatccaaaagggggccccacccccgtcactctcttccactactgttgttyactttctctggttccctgtcaagacttgtgatcatctgatttgtttgttttctatctcctgccatgaaaatagaagctcttcaaggacaaggcccgtgttgccttatttaccacttgtacccacatcctgcccagtggctgatgcacagcaggaatgagtgagtgactgggattgtctgaggccctgaagatatctgctgccctgttggtcagggcccagcagcctgagacgtggccaagggagaaactgggacccagagttccttcctgggtgtcctcccgggtcctttctgtccctgatcagctcaaaccccagcgtgtttcttttttkttgttgttgttgttatttttgagacggagtctcactctgtcggcccggctggagygcatggcgcgatctcggctcactgcaagctctgcctcctgggttcacgccattctcctgcctcagcctcccgagtagctgggattacaggcatgcaccaccacgcctggctgattttttgtattttagtagagatggggtttcactatgttggccaggctggtctcaaactcctgacctcaggtgatccgcccgcctcggcctcccaaagtgctgggattacaggcactcagagccactgccctcagccttcaaaccccaatcttgaagtattctgatcctgcccatcaggcagcatcagggcactgagactcaggaaaacagtagccacggcrggrgggggsggggacagaggatctgacgtccccaacaaaagccagactgcctgcatcctaatcctagctctgcccctttctagcttgagcaggtgattttatacttctgagcctcagtttcgtctgcagggtagagatgacaatagcccttgtccacagggttaaatggyatggcacttgtagagtaaacatgtagtaactgcaatatacagcagttattattagtgatcccattttacagatgagcaaattaaggctgagagaggcagtgccttaccgaacgaaactcttccaaatgactgaaggcaagccaggacttggacctgggtcctcctacctcacgctccatacagcaacctcgaggtcacactttcccctccccagtcattcctgctgtttaagttgaccatcaactcacttccatacagtgctttggagttcacaaagggcttacaaaatgcgctaagctcattttttcctcctccccatctctgaagtctgaaatatcattagccccatttcacagatgcggaaactgaggcacacrgaggttaagcaaagaatcaaggccaggtctaaagcccccacactgagaagtcagctcccctccagatgtggagatgaataccacaaccttgcatgccctgaaaccccaggggccagagggcaagaggctcaaagccttggacatccgattgaccctggaaagggtaggagagagaggaggaagatgtgggcgggtcttcacttctcctgggctctgctgtgtggggccaagggtctccagggctgcattgttaagatgatgatgatgacaatattattccacaaattcagcacttactgtgcaccaggcattgccctaagttcatcctccctatttgaagctcatttaattttcccagtagcagtgtgaggtaggggtggatttaccccacgttacagggcagatgtgggtcatgcaagagcacgcgtggctaggtcacagtggtgggatttgaacccacattggtttgactctcaaacccattagagtcaaagcaggagatgcctggagacttgtcctcttagttctttcctttttctttctttctttttttttttttgagatggagtctcactctgttgctgggggtggagtgcagtggcgcagtcttggctcattgcaacctccgcctcccgggttcaagtgatcctcctgcctcagcctcctgagtagctgggaccacaggcatacgacaccacacccagctaatttttgtatttttagtagagacagggtttcactgtgttggccagggtggtctctaactcctgacctcatgtgatccacccgcctcggcctcccaaagtgtggggattacaggcatgagccaccacgcccagccttggcctcttagttctgagctaggacagttggagaatctgccctcaaaaatagtcaggcccttgaagactctgtgtgtgtgtgtgtgtgtgtgtgtgtgtttgtgtaagagacacacagagagacagaagagagagagtgatagcaagggagtggggggtagggagagagagacatcgattcagtaggttctagaaaaaagtggcacaggtggcttctcccagaaaagggaaagacatgccctcttggttctctgactcctaactggcatttaaaattcacttttttgttgtggattttttgcccaactctactaggaattgtttaaaagtggaacgttcgtatcagctcactttaacagtttgctttccattttcacattcaaaagcctgtcttcggtttctaagggttgcacatgtatttgtgcagggtggctggcctttgttttattttcaagttcagcttaaatttgacctggcatgagagaatgagaatgagaatgagagagagagagagagaaagaaacagacagacatggaatcagatggacaggggcacatagaaaatctttggtttgagcccaggagaggctctcaagaggtgagaggaagactgaccctattctctttgtgggagagagaagggaaggagggaggaagggaggacacaggaggacatggcacaggagggtgatggctgcagatgggggaggggaggcatcaggcagcctggctctaggatcagataaacatgtttgccacagagcaccaggctggactttgtactgcccttccttctgagctctvagcagggagatgaaggagagaggatcctaggagccccggaaagaagggagagagagaagctggggagaggcctgcgggggtggggtggtcctggcaacatgaaatatttttgagtcccaactagatcaccttgcacaagtgactgcacctttctgagcctcagttttctcctctgcaaaatgggcacaccgtctacttcctagggttataagatgtaagtggccagtcctcagcacggtgcctggctcacagtaaatcctcaagaaacatgagttctcagacttttttttttttttttttgagacaggatttcactctgtcgccaaggctggagtgcagtggcgcgatcacagctcattgcagccccgacctctcgggctcaagagatcctcttgtctcagccttctaagtagctgggactacaggcttgtgccaccacacttagctaatttttctattttttgtagaaacagggtcccactatgttgtccaggctggtctcaaactcctgggcccaaggaatcctcccaccttagcctcctgaggagctgggactacaggtgtgcaccaccatgcctggctaatttatttttttttttatagagacagagtctcactatgttgtccaggctggtcttgaactgcagggctcaagtgatcctcccacctcggcctttcaaagagctgggattaccaccatgagccaccatacccagtttacaattcagttttaaatattatatatgccaaggtgggaggatcgcttgagcccaggagtttgagaccagcctggccaacatagcaagaccctgtctctatgaaaaaaaaaaaatagaaaaaagaagaaaaagtacaaaaattagctgggcatgttggcatgtgcctgtggtcccaagtacttgggagtccgaggtgggagaaccaattgagcccaggagtttgaggctacagtgagctatgatcacgccactgtgctccagcctgggagacagagcaagtagcctctaaaaagaaaaataaataaataaaaataaatattggctgggcacggtggctcacacctgtaatcccagcactttgggaggccaaggcagatggatcacctgaagtcgggagtttgagaccagcctggccaacatggtgaaaccctgtctctactaaaaatataaaaattagctgggtgtggtagcgcacacctgtaatcccagctactcgggaggctgaggcaggagaatcgcttgaacctgggaatcagaggttgcagtgagctgagctcgcgccactgcactccagcctggccacagagcaaggctttgtctcaaaaaaaaaaactaaataaaaataaatatcatgtatgcatatatagtatatattatgtaatttacaaagtacacaaggacaacagagaaaactgtccttctcactcccatccccagcaccccgttctcctctggaaggaaccagagtccccagttccttgcgtgccctcyggtattttacacgtgcacaaatatgtagaaatcctcttttamctcacttcaaattattcataagtagcagcacagcagacacaccagataaactctgctccacctgggcacacagagcttcctcagcggggttttttcagtggttgcattgaacagatgcacctccatttagttaatcagtatccttttgctgggctccttggtggcttccaatcttttgctatggcaagcaacgtggcaaggaattgccttctacttgtgccatttgtcacctgtgccaatattaaaagccacaaattctagaagcgaattgctcagcgaggcaggggaaagcacaggctttggaatcacgcagacccaagttcaaatcccagtctgcctgtttcagtgctgctgtattgagctgtatttatctgtaactttttgtttgtttgtttgtttttygagacrgagtctcactctgttgcccaggctggaatgcagtggcgcgatctcggctcactgcaacctctgcctcccgggttcaagcaatcytcctgcctcagcctcccgagtagccgggattacaggcacctgccacaatatctgacttattttttatttttattatttttttcrtagagatggttttctccatgttggccaggctggtcttgaactcctaacctcaaaagacccgcccaccttggcctcccaaagtgctgggattacaggtgtgagtcactgcacccagcctatctgtgacatattggtaatataagttcaggagagggagagagaaagaggcagggattgagacagagcaggagaggaggagagaaaatttatatggctcaggcagtctgatcccttctgttcccccacagggagacccacagcagagacatgactcacaggtggcatcrggtccctttgagtctctctggtgggagaatctcaacccacagagtaggattccagtgttcacatgcatttttggtactatgaggcctctgaatgtcaaccctgtcacctgagactctgttgaaaaaccagccgcggccgggcgcggtggctcacgccagtaatcccagcactttgggaggccgaggcaggcagatcacaagatcaggagatcgagaccatcctggctaacacggtgaaaccccrtctctactaaaaatacaaaaaaattagccgggcgtggtggcgggtgcctgtaggcccagctacttgggaggctgaggcaggagaacggcatgaacccaggaggtggaacttgcagtgagccgagatcgcgccactgcactcgagcctgggtgacagagtgagactccatctcaaaaaaaaaaaaaaaaaagaaaaagaaaagaaaaaccagccwcctgttctggtgctgcagggaaacaggcctggccacagccaagggtgcagattttcaggaagcatttttwaaaaaatatatatatatayacacatatatatatatacagagagagagaagccactgaggcccacagaatttgcatcattttattccttgtccaaggtcacaggacaagcagagtcccacccacctgaaaggattcagttctaagacagcctttagggcaaaaagtcacaaagttgatctatctatctatctatctatctatctatctatctatctatctacgtgtttgcaccctaatcactggcagtaaatgcactttttttcttttcttttcttttttttgagacagggtcttgttctgtcacccaggctggagtaggtgtaaaattggagaatccatatttctttccttgttttcagatttaatgctttcctttttccagcaggtctccttcgtccatccatccatcatccatctacccacccacccaccaatccatccatccattcatccaaccatccatccatccatcatccatcyacccacccacccaccaatccatccatccattcatccaaccatccatccatccatcatccatcyacccacccacccaccaatccatccatccattcatccaaccatccatccatccatcatccatctacccacccacccaccaatccatccatccattcatccaaccatccatccatccatcatccatcyacccacccacccaccaatccatccatccattcatccaaccatccatccatccatcatccatccacccatctatctgtccatccactctaccctaccatccatccaccagtccatccatctatccaccaattcatccatccatccacccattcgcccatccatccatccacccacccatccatccatccgtccatccacccattcatccattcatccattcacccatccatccatccacatatcttcatctgtgttgtgtgtctgtgtatccatgtttctaaacctttatctgttccagtgtctgtatccataggcctgtgtccacgtttgtcatgtgtgtgcgtctacaagtctctgtcctcatgaccatgtgtctgtgtccctgtgtcctggcataaatgaccatacctcacygtccctgagtctatgtgtaggcccctgggctccataactgctttcatgcacagtccccaccctcagrgttgacaaggttccagcacccaggaccgcagccccacctatggggagaracagcccttgctgagcagatcccgtccttgccctctcccagggaggacccgtggcgtgtggcgaagatggtcaagtcctrcctgcagcagcacaacawcmcacagyrgragrtggtcgataccactggcctcaaccagtycyacctgtcccaacacctcaacaagggcactcccatgaagacgcagaakyrggccrccctgtacacctggtacgtccgcaagcagygagaggtggcgcagcgtaagtaatgaccctaccccgcatcttccctgggagggcccaggactctcccctaactcataggtsggggctggaagcttcaccatccccattacacagacaggtagatggaaaggaagtcagtgggattcaacctgcatttattacctattctgcgccaggcactctgtgggacgggagtagacttggtcctgaacatccaaagatgaatgaaatgggtccctgctttctttttctttttttagatagagttttgctcttattgcccaggctggagttcagtggtgcgacctcagctcactgtgacctcctcctcccaggttcaagcaattctcctgcctcagcctccggaatagctgggatcacaggtgcccaccaccatgcctggctaattttttgtagttttagtagagacgggggtttcaccatgttggccaggctggtctcgaactcctgacctcaggtgatccacccrcctcagcctcccaaagtgctgggattacaggcgtgagccaccatacccggcctgggtccctgctttctcagagcccatggttaagtgggaaagtgggagaaaagctcattatgatccagcgagtcatgtattagaatgggacaacagcagccacaacaacaacaataatggccactatttatcatgcatttttggggtgcctggtccagtgcagagtattacacaaagcatttcagggtgctgagctgactgtcgactggggagtaacctgttcttcctcaggaaggcagaggtatcaggaagcctcacattgcaaatatgacctttagaatatgacctttagactaggtcttaaagtgggagttgaattttgacccatggagacgcagggaagggtgtttcaggcagaaggaacagcatcagtaaaggctcagaggcaaggtctacggtcaggaaatcctccactgcaaactcaggaagctctgggagccctattactcagggaatggtgggttttcttctccaggcctcataccccaccaaatcccaagggcactgtcaccttccaacctccatctatgtgtgacattttttgacatttcttttattaattatccaggttaatttttttttattatttttttatttttttgagacagagtctcactctgttgcccaggctggagtgcagtggcgtgatctcggctcactgcaagctccgccttccgggttcatgccattctcctgcctcagcctcccgagtagctgggactacaggtgcccgccaccacgcccagctaattttttgtatttttagtagagtcggggtttcaccatggtctcgatctcctgacctcgtgatccgcccgccttggcctcccaaagcgctgggattataggcgtgagccaccgcgcctggccttaattatccaggtttttaaaaaaggaaatagccaggcatggtggtgtgccataatctcagctactgaggaggctgaggtgggaggactgtttgagcccccaggggttcggctccaacctggacaacatggcaaggktcctcctctaaaaaagaaagaaaggaaagatgataggaragggaggaaagataggaaagggaggaaagataggaaagggaggaaagrtaggaaagggaggaaaggtaggaaagggaggaaggaaggaaggaaggaaaagaaaagaaagaaaaagaacgagagaaagaaagaaaggcaatacacatttggttaaaaaaaaagaagaaaaacagagtttataagaaaaattagatgcctttaccctaaagcagccactggaattcccagactcttgtgtatccttccagagagattttctgcrtatagtagcaatagatatgttattttcttgctctttttctgattaatgggaacatactagacacactattttacatgttgtgttttgtctcttggcaataaatcctgtatatcttttcatattggcactgagagattgatggatctcattctttataagggctgctggctgttatttgtttaactggccacctactgaaggacttttagggattttgcaatctgcgaatacaaccaactgcagcaaaaaacatccttctttatataagtgcatgttcacatgtgactgtgtctgtaggataaattcctagaagtggactgctggaacacagagtagctgctttaaaatcttgggtacatattggcatagttccttccaaagaagttatatcaatgtacacttccaccagcagtaaaaatcactgttgaaaaaaaaaatgtatgcaggccgggcgcagtggctcatgcctgtaatcccagcactttgggaggccaaggcaggtggctcacttgagggcaggagtcygagaccagcctggtcaacatggtgaaaccccatcttaactaaaaatacaaaaattagctggacatagtggcgcatgcctgtaatcccagctacttgggaggccaaggcaagggaatcgcttgaacccaggaggcagaggttgcagtgagccaagatcacgccactgcactccagcctgggtgacagagggagactctgtcaaataaatgtatgtatgtatgtatgtatgtatgtatgatgtatgtatgtatgcatgcatgcatgcatgcaatagacaactctagtccttactctatagctacccctcatcccaattattggggtgttcacactctactgtgctgtaatacacacttggaaaaacagtacattttaatactattttaatttgtatgagaagaaacaaagatttattctgaaaatctgttagaactagatttagtttctgagagaaatagtgttctcctaaaaccatcactagacgaaattttacaatattcgataaaatgcattaaaaaatttctaacagttagaaatgtcatcaaggacttcagcctagagctgagaatagagatgcaaactgtggcccaaatagctttccctgggggatttttaacttttaaggagaaattggagaatttgagatgcagagtcaatatatgactgtagtattaggactctttcagtaacaggggacagaaccccarctcaaatggatttaaacagaaaagggaatgaattgactgaagcaatgtgaggagtccagggctgcttcaggcatggctagatcaaggggctcaaatgaggttcacacagcatttcttgactcttttcttttttgttggcttcattctcagacaggctctcctcatataggcaaagatgggttctggaagccctgggctgccatcctaccagcttagcaaccttggaaggaaaagagctcttcttttcagctactttcagttgaatgactctttttatacttgataatgtaaacttttatttattttattttttgagatgaggtcttgccatgttgcccaggctagttttgaacttccgggctcaagtgatccctgcctcagcctcttaagtagctggaatggcaggcacacatcactgtgtctgctataacagaaacttttaaatgaagtctaacataaaaagtgcccaaatccaaagcatacagttcaatgaattttcacaaagtgaacacaccaatacagataaaaaatagaatattaccagctcccagcctggtgtggttgtacccacctgtaatcccagcacatttgggaggcaaaagtgggaggatcacttgagcctaagagttcaagacmagcctgggcaacagaaggagaccccatctctccaaaaaatacgaataaatgagccaggtgtggtgcagcaggtgtgtagtcctagccacttatgcccgctgctgtttcttggcactgagatggtgagggccctgctgctgctgctgcgcccctgattcagaatctaccttcctctcttctcataaagtgctgtcctagcacttgtgtgtcccagtcctttggtggcctgctcagggataagctggtagaccagtttccagtaaagtggtaccagctgatgaaggctggctgggtctcttcctctagctaacatttgcattttaagcctgattttcaagtctggaaagctgaatataattctgaatacactgaggacatatggctcaaatttttgctctactgcgtgactctggaaaaatatgtaagctctctgagcctcagcttcctcatctgtacaatggggatagtaaatgtgccaaatcagaacaaatgctaatgcttacctgcagtcttgtactgagaaggatggtgagatcatatcttgggttggtaggaaagcattcagggattgattagtgatgtttgccttgaacacaggttaagaaagtgatggcatgtgtgctgtgtgtttgtcatcagtagattagatgatttctaagttctagctgtaagctcctctggttcagcrccatggcaatgagaaagaatcaagggcaaggtcaggggaatggacgwgggaaggtgagagtggccagtaccccaytcacggctttctgtgcctgcagagttcacccatgcagggcagggagggctgattgaagagcccacagrtgatgagctaccaaccaagaaggggbrgaggaacyrtttcmagtggggcccagcatcccagcagatcctgttccaggcctrtgagaggcagaagaaccctagcaaggaggagcgagagacgctagtgkaggagtgcaataggtacaacggcgggcgggaaacagtgctggtttggtctgggctgcggcaaggccagggaaggggaaggtgactctaggtcctgtaaaaggctgtccagttgccgagaactcctgatattggcttagcctggcccagaaaattgagaatacttgaacctaagcccattcctcgcagcccccctgcaccctggacaccaagcaaccccttccatggatgctcacccaattcgattctctctacaatcctatggctcttttgctcactttatgaatggagagactgaggtcagacagactgtcaattgcccaaggtcacacagcagacctggcattggaacccagatctgccagcctcaaaccctccggcagagctcagcttctcagaaccctccccttcatgcccaggacagggttcctctgagcctggcctggaggctcatgggtggctatttctgcagggcggaabgcatccagagaggggtgtccccatcacaggcacaggggmtgggcwccaacctcgwcayggaggtgygtgtctacaactggtttgccaacbrgyrcaaagaagaagccttccggcacaagctggccatggacacgtacagcggscsccccccagggccaggcccgggacctgcgctgcccgctcacagctcccctggcctgcctccacctgccctctcccccagtaaggtccacrgtaagtggtatgtggggacaagggacacgtgggaaggtgggagggttggggaggactgtcccagtgacagcagtcacctaaacctctttgcacktcagtttggttccattccattcatgccactccttatcactctacttcactctgttcattcatccattccactctatctcattccattcactctactcctttccactctattcactccatccaccacaattaaccccattccatccactccatccactaccttcgactccactccatccactctactccattcactccactcaactccactccatccactccactccgtccaacttcatcccatccactacattcaactccactccatccactctactccatctactaccttcaactctacyccatccatccactccactccatccattccatccaacttcatcccatctactacattcaactctactccatccactccactccatccattgcatccaacttcatcccatctactacattcaactccactccatccactccactccatccattccctccaacttcatcccatccagtacattcaactccactccatccactgtactccatctactacattcaactctactccatccactcccctccatccattccatccaacttcatcccatctactacattcaactccactccattcattccactccatccattccatccaacttcatcccatccactacattcaactccactccatccactccatacctggctccatccactccactccatctactacattcaactctactccatccactccatactctattccatccacttactccatccactccattcagctccactccatccactccactcactcaactccatctactccactccctctacttcattcaactctgctccatccactccactccacccattccatccactgcactccaaccagctccattagactccactccatccactctacccactcttctctccactcctctccactacataccattttattctatctgtcccatccactcaactccattcactccacatgactccacatttcatccattccactctacttcatccactcactccactctataccattccactccactctattcacatactccaccattccagtctactccattcactccactccaacccactcactccactccataccattccactccactgtgttcacacaactccatccattccactctagccactccattcattccactccacgccacactattcctcaccattccatccactccaccctataccattccactccactctattcctccccacccgtcctctccaccctttaccactccactcgactgtacccattccacttgatcccactcattccactcaattccatctactctactccacaccatccactccacttcatatcattccactcaactcaacctaagttgatttgggttaattcaattcaattcattcatttcagattgtatcaattcaattcatttcaattcaactaaattcagttaaattcagttcagttgtcttctactgagcacctactgcatgtcaggtatagcactaggcagtgggrggaatggagctaataaatgcagtcccagccttcaaggaactgggagcagctgacccagggcttggcaaaaggtagaaacaaaggcagatttgctggctgcataaaggcagacaggcagctggcctaagcaaaccaatggagtttgaagtgctgagggctgtggaggcaggggagggcagggaagtggggtgctgaggcaggacactgcttccctctccaggtgtgcgctatggacagcctgcgaccagtgagactgcagaagtaccctcaagcagcggcggtcccttagtgacagtgtctacacccctccaccaagtgtcccccaygggcctggagcccagccacagcctgctgagtacagaagccaagctggtgagtgtccttgcttgtaaggaaaacccaacctcatctttccttggcagggagattctggagcagtccctagggaggccctgtgkggaccccggccccccggacacagcttggcttcccctcgtaggtctcagcagctgggggccccctcccccctgtcagcaccctgacagcactgcacagcttggagcagacatccccaggcctcaaccagcagccccagaacctcatcatggcctcacttcctggggtcatgaccatcsggcctggtgagcctgcctccctgggtcctacgttcaccaacacaggtgcctscaycctggtcatcggtaagctggtggggatgggtgggcacctgggtgggaggctcatggggcaaccgcagaatccaggagctggaagagccactgggactcattcattcattcattcattcatacaacatgtatttatccagtgcctactctggaccagtcactgtgctacatcagtgatacctgggtgaaccaaacagaccaaaatctcagcaactcaagcagggaggcaggcactaagcataatacatcaattctgtggtacctcagaaggtgaagggtctatgggcaaattacagcagggtaagggrgactgatgttttctaagtttttgttttatgaagaaaaattaagcccagaaagcccttatttgcaggtacaattatgcagaagcccagtacataagatagataaggagctgctaggagaggggagcagagaactgaccccatggcctttgcactgctgtggaaccccagggctccagggaaccgcagtttgacaacttttgaacaagtcaccgcctgcctctcccactagcctagacaaagagctaaaggctcagagagggggaatgacttgccagagccacttaaattagtggcaggtcccagtggagggctgtttcctgaccaccctgccccctcctccaaaccackggctctgggaaggagaggtggtgcccttgggaggtcttgggcaggggtgggatataactggggggcccagctgattccctccccttccactccaggcctggcctccacgcaggcacagagtgtgccggtcatcaacagcatgggcagcagcctgaccaccytgcagcccgtccagttctccyagccgctgcacccctcctaccagcagccgctcatgccacctgtgcagagccatgtgaccyaganccccttcatggccaccatggctcagctgcagagcccccacggtgagcrccctgtgccccacacagcaggagatgatgatagaggttggctgtcaatggatgcaggggaaaggggtgcctggcaggcattgcagtctgcatgtgtctctgggacaagtgtktttccgtgattgagggtgtctgcaggccagtgtgttcccatgtgaatgcacgtatctgtgtgtgtgcacgactgcttgtgtgagcagatccctagtgcgtgtctgggtgtgtatcggttgtgcatgcatttgtgtgcatgcctgtgtttctctgaaactcttagggccatatgaatttctaaaatctattcagattttagaaaggtaatctggggccaggcgtggtggctcatgcctgtaatcccagcactttggaaggccgaggtgggcagatcacttgaggtcaggagttcaagaccagcctggccaacacggtgaaaccccgtctctactaaaagtacaaaaattagccaggcgtggaggcacgtgcctgtagtcccagctacttgggaggctgaggcagaatcgcttgaacctgggaggcggaggttgcagtgagctgagattgtgccactgcactgcactccagcctgggcaacagagtgagtactctgccaaaaaaaaaaaaaagaaaaagaaaagtaatttggtggatatgccagctatcacataacactcccagcagggtttgagacagccccctgtgatcaaagcactgctatttctgcagccaaagataggatttccacaaggcagtttaaacactcataacctcataccaggttcaggctgggtttcgccaccaaatgagctctagtgccaatcttaaggaaatcttttggtttcagacctttttggaatttgggactgggttaagagatttggggcctgtgtatgtctgtgtgtacmtggttgagagtgtatgcgtgtgtgtgtgttacatttttatctgagtcactgtgagaatatgtggtttatgtgcgttttcctagtgtctgtgtgtctcttgtagggtctatgtgtctcctgaggggtgggtggaggtgctgtaggcaaaacatggggttatatttggaaaggtggcctggagatggaagtactgctgtcctctgccttgctctttgacaggggccacctgaacttactacacagcacctgagtttagtacagtagcacctgtgcttagtacatagcacctgtgtttagtatagtagcacctgtgcttagtacatagcgcctgcatttagtacagtagcacctgcgcttagtacgtagcacccgtgcttagtacagtagccctgcacctgcacctcccgttccctttcatacctgctgtctccaggtgacaagaggagctggagttggtttctggcctcctccaggctcccctgcatcaagcgcagctgagcagttccctgtaatggggagagggtctgtccctttatctggagcctccagttttgaaaatcagccctggatctccaactgctgcccagtctggctgttcagcaggccccatgcccccctttccccagtcttgaggcctgggactagggctgtcaggcacgtctgccacgtctgcccctctctcccctgcggccagccctctacagccacaagcccgaggtggcccagtacacccrcacgggcctgctccygcagaytrtgctcatcaccgacaccaccaacctgagcgccctggccagcctcasgcccaccaagcaggtaaggtccaggcctgctggccctccctyggcctgtgacagagcccctcacccccacatcccccgggctcaggaggctgctctgctcccccaggtcttcacctcagacactgaggcctccagtgagtccgggcttcacacgccggcatctcaggccaccaccctccacrtccccagccaggaccctgccrgcatccagcacctgcagccggcccacsrgctcagcgccagccccacaggtgagaggccctggctccaccccctcccttactgtccctgcccccttccatgttggtcccaccccttctgttgctgtccgtcactgtggggctgtgcatgcagcaggcctagggctgctgtgaggaagcactggcaggcgtggaggggtggggtgggcttccatgaagcccaagaggcacaggcgaccccaggaagatggggcccaccttacaagaacatctcagggactggactgaggaaaatgatgaagtaattgttagaggcagtggagagtaacgataaggaccaggtctgtgagccagaagcgactcttgcatgtgtttggtttggcttggctcagggttgaacattctttgaatttgttgccaacatttcaaaatcaggaattttcacatagaaatccagatttctggcatcttttggaaaattggaaaaattcatattcccatataacagtgcaccaggcctcactgcatccactcacatcggctccaatgacccctggcrgtggggcggtcacctgagtttgtaatctatgatgccattgtcaggagtgggcactttggagtcaggtgggtgggctttgcagcctgcctttttgcaagctgccccctttctataaggttcctggacccggccctggcagctgtcatgacagccactgaggccattctgtgtcctggcattcaccccatgaggcgtgtccatgaycacccccattttacagatgagaaagtggacactcaaggaggggagggacttgcctcatctcccacagctaccagatggcagggccaggactcgaacccaggtcccacctcaaagcccattctcttaaccattgccatcagtcagggttctccaggaacacagaaccaayagatttatttgaaggacttggcccgtgtctgcggggggctggcaggcctgaaatctgttgctggcagctcyggggagtgaattctgcagccttgaggcagaattccttctctgggaaaccggtttttgctcttacggccttccactgatgtaggaggcccacccatattttcagggtaatctccttcactcaaagccaactgattgtggcattaaccacatctacaaagcacctgcattcacagcagcgcctagattagtgtttgactcagcctagccaagccaacacgtacaactacctacctcggcatctcaccggggcttctccagtgttcacactaagatgtactcaggccactccatgggcggccgtggaccctggctgggaggctccctttgttaagaaccgagggtagaggtgtgactttggggttcctgttatctgctgtgatccaggaggtgtggccctgcctccccatcctgagtacccctagggacaggcaggtggggtgggtgtgggtgcctggtgggtggcyagcagccttgtttgcctctgcagtgtcctccagcakcctggtgctgtaccagagctcagactccagcaatggccagagccacctgctgccatccaaccacagcrtcatsragaycttcatctccacccagatggcctcttcctcccagtaaccacggcacctgggccctggggcctgtactgcctgcttggggggtgatgagggcagcagccagccctgcctggaggacctgagcctgccgagcaaccgtggcccttcctggacagctgtgcctcgctccccactctgctctgatgcatcagaaagggagggctctgaggcgccccaacccgtggaggctgctcgggktgcacaggagggggtcgtggagagctaggagcaaagcctgttcatggcagatgtaggagggactgtcgctgcttcgtgggatacagtcttcttacttggaactgaagggggcggcctatgacttgggcacccccagcctgggcctatggagagccctgggaccgctacaccactctggcagccacacttctcaggacacaggcctgtgtagctgtgacctgctgagctctgagaggccctrgatcagcgtggccttgttctgtcaccaatgtacccaccgggccactccttcctgccccaactccttccagctagtgacccacatgccatttgtactgaccccatcacctactcacacaggmatttcctgggtggctactctgtgccagagcctggggctctaacgcctgagcccagggaggccgaagctaacagggaaggcaggcagggctctcctggcttcccatccccagcgattccctctcccaggccccatgacctccagctttcctgtatttgttcccaagagcatcatgcctctgaggccagcctggcctcctgcctctactgggaaggctacttcggggctgggaagtcgtccttactcctgtgggagcctcgcaacccgtgccaagtccaggtcctggtggggcagctcctctgtctcgagcgccctgcagaccctgcccttgtttggggcaggagtagctgagctcacaaggcagcaaggcccgagcagctgagcagggccggggaactggccaagctgaggtgcccaggagaagaaagaggtgaccccagggcacaggagctacctgtgtggacaggactaacactcagaagcctgggggcctggctggctgagggcagttcgcagccaccctgaggagtctgaggtcctgagcactgccaggagggacaaaggagcctgtgaacccaggacaagcatggtcccacatccctgggcctgctgctgagaacctggccttcagtgtaccgcgtctaccctgggattcaggaaaaggcctggggtgacccggcaccccctgcagcttgtagccagccggggcgagtggcacgtttatttaacttttagtaaagtcaaggagaaatgcggtggaaacttcttgcttgtccacaaatcattcagatggggtttgggcaggtagcgggaggctggggcaggccagaggcctgcgaagaggagacaggctccagcacccacgctctcacaccccacatctctgcttttcttgctctgctgagactctaatgacaaagccagatttcatcttaacctcaagcttctactttttaaaaaaattttgttttggagacagggtctcactgtcacccaggctggactgcagtggcattatacagctcactgcagccttgaactcctggactaaagggatcctcccacctcagcctcacaagcagcctcacaggcgctcactaccatgcccaactaatttttgtattcttttttttatagagacgaggtttcaccatgttgcctaggctggtctggaactcggctcaagtgatccacctgcctcggcctcccaaagtgctgggattacaggtgtgagccaccatccctggccatgagcttctacttcttttctttttcttttttttttttttttttgagatagggtcttgctccattgcttaggctagagtgcagtggcgcaatctcggctcactgcaacctgcacctcctgggttcaagcgattctcccacctcagcctcctgagtagctgggattacgggcgtgtgtcaacatgctcagctaatttttgtatttttagtagagatggggtctcgccatgttggccaggctggtctcaaactcctggcctcaattgatccacctccttggcctctcaaaatgcttggattacaggcatgagccactgcacccggccacaagcttctacttcttgcagaatgcctttgtcccatgaaacctagtccacgagtgctatgacacttcctgaagtcttgggtggggtgaacgcacaaatcctgggggtgtagagaggaggaggatgtttacttaaaatgtcttaaggttcagcattgacagagaggcaatatccaaatcactctaagttttgttttgggtcctctgacaattgagtttccataatctggtcggctcagagacaccatcatgtgtggtatattcacaaatgcagacaaagaaaattctagaaagccaggggtgaaaaagctctcctttctcagacgattctgtgaagtctatgtgggctaaggagagaagaacaaaagtttctctgggccttggcctcttggggatcccttctctcattttctaaaaactgtttctcacaccaggctaaggaggtggtggggaaggtctcccttcccctgcccacctcagacagttctagggagatggaggtttcaccacttggccactagtctcaaataactggaaggttccttttttcctgaggtcatgaaatgttctggaaccacagcgcccccgccagccctccgtgggagcacagaggggcnnnnnnnnnnnnnnnnnnnnnnnnnnnnnnnnnnnnnnnnnnnnnnnnnnnnnnnnnnnnnnnnnnnnnnnnnnnnnnnnnnnnnnnnnnnnnnnnnnnnnnnnnnnnnnnnnnnnnnnnnnnnnnnnnnnnnnnnnnnnnnnnnnnnnnnnnnnnnnnnnnnnnnnnnnnnnnnnnnnnnnnnnnnnnnnnnnnnnnnnnnnnnnnnnnnnnnnnnnnnnnnnnnnnnnnnnnnnnnnnnnnnnnnnnnnnnnnnnnnnnnnnnnnnnnnnnnnnnnnnnnnnnnnnnnnnnnnnnnnnnnnnnnnnnnnnnnnnnnnnnnnnnnnnnnnnnnnnnnnnnnnnnnnnnnnnnnnnnnnnnnnnnnnnnnnnnnnnnnnnnnnnnnnnnnnnnnnnnnnnnnnnnnnnnnnnnnnnnnnnnnnnnnnnnnnnnnnnnnnnnnnnnnnnnnnnnnnnnnnnnnnnnnnnnnnnnnnnnnnnnnnnnnnnnnnnnnnnnnnnnnnnnnnnnnnnnnnnttttttggcccaactctcgagcaagccttcatcaccatcagggtctcatgggcagtctgggtttgccagcccagtccttgaacttggagagggaggtggggcttggaaatgccttgtccccagggtgggggggacaccttgtccttggagctggctgagccctgtgcccatggctgggttcagtttgcaggtatagctgtagcactctttgctggtgggaatggagaggtctcgctggccttctttgcctttttcttctttttggtcccaagcgacacctggtccccgttgagctcacctgacttctgcttctggactgtggccatgctggtgggggtggtggcagcgacagccgagtcgacactggccaccttcttggctttctttttcaacttccttttcttctttgcctccttctccactgttccagggctgtggatggctgactcctgtaggatgtcggacgccgacacagctgcctcccggcaccgccgccactcctcgtcactgtcctcactgctgcaacgagagggtaccctgggttagctggagtcaggacacagccccagagctgcctctcgctgtcctcccttggtccaggtcaccagaaggtggccgcagagagaggcaggtagtgagttcaggcttgggagtgaggccaacctggcttccaatactggcttctgggcgtagcagccttgtgacctccttaagtgacttaacctctctgactgtatcatctctaaaacggggatcttaacagagtccaggcctcccagggatgtcccaggaggcaactatgatcaagtgaggtgtctggcccaagacaggtgctcaaaagcagtaaacatccaaagctgccgccaagagggctttccctcccgctgagctcatgatttctccagctgcctgacagggccactgccttggcctggtcctgactggagtctgcttggctattccagggaacccaccaagacagaagaggagaaaaaaggaggggacgtgaggagaggtgtgagttctcacctggagctggagggctgtcgctttcggcggggttggggagactcttccttctcacggcctccagggacagatgtgaagaaaaggcggaaacctaagattcaatggggcagagtcaaacaaaaacaaaacaaaacaaaaagaaacataaaaaaataaaaaataaagaaacaaaaaagaaaaaaattttaaaaaggaaaacgaaagaaagaaaagataaagagaaacaaaaaaaaaattttaagaagacacaaaataaaaaaatttaaaaaagaaacaataacaaaaaaacccaaccaagcaaacaaacaaagaaaacaaaggagcagagtcagcacccccagatgccagcccctcctcccaggtgccaggtgctgaagctgccccgcctctgccctcaggagctcctggtccagaggcaaagacccaggaatcagtcgtctaactacaaagtgattctgcatctgccaagggtcatgctgatgcctgatggagccagtggagggcgcgctggagcaggagccagcagccacatcagctcagcaagccctcagaggcttctggaagtcagcacttgagctcctgacctaaggcagccttcaaagtggcaaatgtgttggtacaggacagacgcagatgggcgaggctgtggagggcagcagtaaagtgctcctgctcagggtgacacagacgaggccgcctcaggcaaatgacttcgtttctcagggcctcagtctccttgtctgtacatggggttcaatcataatacctgcctcaccacaggggctgagcagatgaaagaatggtgaggtggcccatgcctgtaaccccagtactttggtagtctgaggcgggaggatagcttgaggccaggagtttaagaccagcctgggcaacatgacagaaccctgtctctaaaaaaaaatacaaaaattagccaggtgtggtggggcacgcctgtagtcccagaactttggaaggctaaggtgggcagatggcttgaggccaggagttcaagaccagcctgggcaacatagcgagatcctgtctctaaaaaacataaataattagccaggggtggtggtgtgtgtctgtggtcccagctactcaggaagctgaggtgggaggactgcttgggtccgggaggttgaggctgcattgagctataattgctccactgcactccagcctaggtggcagagagagttcctatctcaaaaaaagaaaaaaaaaaaagaatataccaaaactgtttcgcccacctccagacacacattaggtgcttaataaatgatagcttctattaagtataaccactcaccatcatcctccaaagcgactttctgtaccttagcttttgctggctcctttgctgcttctgagatggtaatgaagctacagggagacgagacggttgatttaagatgagatttttggataacgacaaaaacaaaattctttttcaagtggaggggatggggtatgtgattgtaaatgcaaaagcgaaagcgtgctggcctagtaagagggctgatggtctggttataacatgctgaccagcctctgccacgcgaactgcagtgcttcatttctttaaagcccactttattccagtaagtgttgaagaagttttaaagacatagtaaaacaagatgaggccaggcatggtggctcacgcctgtaatcctagcactttgggaggccaaggcaggcagatcatgaggccaggagatcgagaccattctggctaacacggtgaaaccccatctctactaaaaatacaaaaaattagccgggcatggtggcgggcgcctgtagtcccagctactcgggaggctgaggcaggagaatggcgtgaacctgggaggcggagcttgcagtgaactgagactgcgccactgcactccagcctgggtgacagagcaagactccatctccaaaaaaagaaaagaatttaacaaaatgaatgcaatttcaaataggacaaagagatataagggcaagaggaacagaaagacctagaagtgtagtcaggaagtcctatacacttgttagagagagggcatacattttgctctgagcttcctagcagcaagcatgaaaagggaaatatgaccaatctagaaaactggttcagaggacagcttctggagcagggcagacctgtttttaaatttttttttttaattaaaagaaattggagataattgtagacatgcagtagcaacaaataatgcagatgttccatagaccctccatccattttctcgcaatggtaacattgtgcctcgctatagtacaacatcacaactaggaaatgcaaattgatccaattcatggacctcattcagacttcagagacctgggttttgaatcccggttttgtcacttattagctatgtcccttaagcaaatgactttatctctctgagtctctgttatccacctgtgcagtgggaacgatgaaggtccctacctcttaaggttgtcacaaggattgaaggggaaaatggatatcaagcacttgtggcacacggcctagccacaagtagctgctcagcaaatggtagctatgatgacgatgcagatgatgactgtcatcaagaaaagcttcagccttcacaggctctctaacataaaaataaaccacatttctctagaggcacaaggccaggaagcatgtgtctggtgagtgcagatggagatgccactgtgcacagcagagaacaaggctctcagcaatgccctcgaggcagacgcagcaatgccctgggtgctttccctaacctcccttcctgtatgccaaaggtgccccccaagccctgttcaggaaaagcaacccggggagagggagtagagatgatgccacccaggcacctgttcttgaccccacacagtggttcaatggtggccatcaggggcatttggcaatgtctggagacatttttggatgtcacaactggtggggtgagtgctactatcatctagtaggtagaggccagggatgttggtaaacatcctataatgggaagaaggatagacccccacgacaaatgctagtcaaagatgtcagtagcgccaaggttgagagacactgacctaacactagggaccaaatgcagtatcatttacatttccttttttttttttgagatgggatctcactctgtcacccaggctggagtgcagtggcacgatctcagctcactgcaacctctgcatcctgggttcaaacgattctcctacctcagcctcccaagtagctgggataacaggtgcacgccaccatgcccagctaatttttgcatttttagtagagatggggtctcaccatgttggccaggctggtctcgaactcctgtcctcaaatgatccacccgcttc

SEQ ID NO: 6851 - DNA, 27246 bp, Homo sapiens
  misc_feature (1)...(27246): n = A,T,C or G, or insertion/deletion polymorphism (see Tables 1-2)
tggcgcacgcctgtaatcacagcactttgaggggctgaggcgggtggatcccttgagcccaacagttcaagaccagcctaggcaacatggtgaaaccccgtctctactaaaaatacaaaacttggccaggtgcggtggctcacatctgtaatcccagcactttgggaggccgaggtgggcagatcacgaggtcaagagatcgaaaccatcctggccaacatggtaaaacctcatctctactaaaaatacaaaaattagctgggtgtggtggcatgtgcctgtagtcccagctactagggaggctgaggcaggagaatcgcttgaacctgggaggcggaggttgcagtgagccaagatcgtgccactgcactctagcctggcaacagagtgagattccatctgaaaaaaaaaaaaaaaaaaaaagaacaaaacttagccagatgtggtggcacgcacctgtggtcccagctactcaggaaactgaggcgggaggatcgcttcagcttgggaggtcaaggcgcagtgagttaagattgcaccactgcactgcagcctgaggtgacagggcaaggccctgtctcaaaaaacaaaacaaacacacacaacattgtgcaaatattttttatcttggctagtcagaaaacttggcaatgccaggcttatatttctttttctttttctttttttgttttccttttgagacagagtctccctttgttgcccaggctggagtgcagtggtgcgatctcagctcactgcaacctccacctcctgtgttcaagagattctcccacttcagccttccgagtagctgggactacaggcatacgccaccacacccggctaatttttgcattttttggtagagataggttttgccatgttggccaggctggtctcaaactcctgacctcaagtgatctgcccgccttggcctcccaaagtgctgggaatacaggcgtgagccactgcacccagccaaggcttatatttcttctggaaagaatcagctagaggcctgaccctcgccagcattttccaggtgctctccagccacctggggctctcaggccctggagtgtagcctctggaggtggtgagaacacagactctggagtctgaccaacctcacttcacatatctgccctgctccttactacctatgtgattggtgttcagtaaattacctaaccctgctcagtttcctcatcaataacatgggggtaacagtagaaccaaccaactaatagagatgctctgagaataaaatgcattaagggtatggaaggtgctcagcatacagcctggaaagtgcttaccactccctaaacatttgctgctgccgctgctgctgctactattgtaaagataaggacagatgaagggaacatttgcacatcagacaaagaagtgtggacttaacacctctccttctccctctcccttccagagggcacgagacatccacttgacagtggagcagaggggttacccagatttcaacctcatcgtgaacccttatgagcccataaggaaggttaaagagaaaatccggaggaccaggggctactctggcctgcagcgtctgtccttccaggttcctggcagtgagaggcagcttctcagcagcaggtgctccttagccaaatatgggatcttctcccacactcacatctatctgctggagaccatcccctccgagatccaggtcttcgtgaagaatcctgatggtgggagctacgcctatgccatcaaccccaacagcttcatcctgggtctgaagcagcagattgaagaccagcaggggcttcctaaaaagcagcagcagctsgaattccaaggccaagtcctgcaggactggttgggtctggggatctatggcatccaagacagtgacactctcatcctctcraagaagaaaggagaggctctgtttccagccagttagttttctctgggagacttctctgtacatttctgccatgtactccagaactcatcctgtcaatcactctgtcccattgtctactgggaaggtcccaggtcttcaccagttttacaatgagttatcccaggccagacgtggtagctcacacctgtaatcccagaactttgggaggccgaggtgggaggagcgcttgagccgaggagttcaagaccagcctgggtatcatagggagaccccgtctctacaaaataaaaaaataattcactgggtgtggttgtgcacatttgtagtctcaggcactcaagaagctgaggcagaagaatcacttgagcccaggaggctgaagctgcagtgagctgtgatcacactgctacactcctgcccaggccacagagcaagaccctgtgtctaaaaactaaaacataaaaataagtaaatccgtttaaaaaaaggattatcccagccctgccagggggaggatgaggaggggtgtgaggactaaatatacaaataaatagtgtggtcacatgacgcacagcaacagaattcggacccacagccttctgcagcaatcaaccccaaaccatcaggacttgggcgataactggcagcatctctaactccccaccctactcccatcctgcttcctatttatgaccaacccaagaaacccaaataagctccccagaccaatcacatggttagccccacttctggtgagtgcacttccagcttccccataccaacagcctcaatcacggcatccctgaagccttcccattttcctgcctgtctttaaatctctgtcaaaagcgagagatgggtggctggttcctttgctatagcaagttgggaataaatcgcctttgttagttctcatttgggggctgtttatttccacagggcctaatgctgtcctaatggttattgcttgatcatttgagcttctcaactctaagaaatgaggactggggaaactgaggcaaaaagagacaaagaatgggagattgaggatgatgcagtgtaaaaaaaaatcacctcaactcctaaaacccatacacaaacagtacataatagtcaggaaactgtaggaaagtaatagcatctttattatcaaaggacgtcatgtgatcaggtttactccaagcaataaaaagtttccttttgcccccctgttttgcctagttttctggtgggctactctcctaccatagcatagaaaatgcacactgcaattggttatcaacagcctctggtcaatttagcaatcataatctgtgtatctcccacctctgtttgccttcagggacagaaaaagtgcctcctttccaggaggtagacaggctgttccagtccccatctttgtgtccttcataatgcccagcacagcccacattgtaggtggtgggaaaattcttgtttaaaataaaaaaaagaatgaaaaatgcaatgtcttagtccatctgggctgctaaaacaaaataccatacactggatggctcatgaacaataaccatttatttcttacagctctggaggctgggaagtccaagtcaagacactggcagatttggtgtctggtgaggacctcttcctgattcacagatggcagcttcrcactaagtcttcacytggtayargaggcaaaggtgtctctaggatcgcttctttttttttttttttttstttttgagatggagtctcgctctgtcacccaggctagagtgcattggcatgatctcagctccctgcaacctctgcctccgaggttcaagcgattctcctgcctcagcctcccgagtagctgggactacaggcacctaccactgtgcccagctaattttttttttatttttagtagagacggggtttcaccatcttggccaggctagtctcgaactcctgaccttgtgatccacctgtcttggcctcccacagtgctgggattacagttgtgagccaccatgcctggcctctggggtctcttttatgaaggcattgatccagttcatgagggctcaggacccattatgtaattgaaagattctccgtggggcctgaaagcttaagagaatgaatgacccctccctcccctccctccttgggcccggtcccaaggcgcaaggccactcgcgccagcagcatgtgtcagcaagatagcagaagcgggaagagagcgggccagaagacacctaccccctgaagaccgagagagacgtcatccgggtacaatgtagcggttacaacagactgagaaacttcctgtttacaggagactacaaaacccctgccccgtcctcatttggtgctgacgccattttaagcctcagcccacctgcacacacactgcctcatgttgtctgttggccacgctcttggggttcgaaccaacacaagaccctttcactaattacttcccagaggtcccacctcctaataccatcaccttgggagtaaggactttttggaaattatcagtatcaaaatggagtcacttatgtcaaaccctaacaaatgcctgtcacaaaaattatctcaagaagttcctaaaatccgcagtattatagataaaccacttgcataagaatatttgcctaacagtgggtgtctccacaataagctaaagccaactcctgcaacaggctcctgtgatcaacggtacttgttttaaagaagcttatgtggactttgtcttttctcgttgccacaacctcttttaatgtgcctatagtccactatagcatgcatatctcaaattgcaattccttgcaattctggaataaacgctttattttggagagtcagtctctctgttatttattttacggtgtcaattttaacatatgaattttggaggaacacattcagaccatatcagtcaccttcctcttctttgaaatagaaaaagctcaaggccagagagtttattttagtaaagttttgacatacctgtcttcaaagataaaacatgaaacagcattccacacacaaaagtaaagtgattttgttcatccttcactgtgaggtattttaaccacagagattctaattttttggtcttggatgggtcctgggagtcagtattgcctggctaatttttgtatttttagtagagatggggtttcaccatgttggtcaggctagtctcgaactcctgacctcatgatctgcccgcctcggcctcacaaagtgttgggattacagatgtgagccaccgtgcccggacaggattctgcatttctcttttttttttttcgagacagagtctcagtctgttgcccaggctggagtgcagtggcacgatcttggctcacctcaacctccacctcccaggttcaagtgattttcctgcctcagcctcctgagtagctgggactacaggtgcgtgccaccatgcccagctaatttttgtatttttagtagagatggggtttcactatgttggccaggctggtctcgaactcctgaccttgtgatctgcctgcctcagccccccaaagtgttgggattacaggcgtgagccaccgtgcccagcctggattctgcatttctaacgagctcccaggtgttaccaatgctgctggctcatggactacactcttaagtagtaaggccctaggctattaaaggaaatacagattcctggattccacctatcagagattctgattctgttagtattttctgtgagacccaaaagtctgcagtttaaccagctctctaaggtgtttcttaggcccaactggactgggaaattactagaataaatgacatggaatcaaaacctgggaactaatcctgggtctgtcattaactccttaggagattcccatcccctctggagatctgtcatcaagaaatgattggagaagttaatctcttaggcccttctagctcttgcctttgagaaccgcccacctccccattcccacctggtatccccaacccagtacagttcatggccaatggcggtccaagtcttggaactacaatccccacaatgcctcgcgcctctcctctcacgtgacgtcatgaaggaggcttgataacggcggtgttctccacaatcctttgcggtggttcaagatggcggcgcccagtggcacwgtgagcgattcggaaagtagtaacagcagtagcgatgcggaggagctggagcggtgccgcgaggcggcaatgccggcttggggcttggagcaacgcccgcacgtggcarggaagccaagagccggtagggtactatgtttggggagactggctgaggggcgtgggatcttcccctggagcctgagaggatggatggtgaggagagagtcactgggactcggcttccttccccgagagacctccagggactgggtgtagtgcagattgaaagcatgggcaggtgcagtagggaggktatttcattattccagtcggggaagctgaggtacccaaatgtcttttgattctgcctccttgggtctatcctcactgccccacactgggaaggctgccgtctcttcgagataactgcaacagccccctcccggtattctcgcacccagcctttccccacctccaacacattctcccaccctggaggttgttgccaagagcagtgcccagcacatcactctgaccgtgactccctagtgccctgggaataaatacagagccccgcaacatcaaggggcctaatcatggatagaacccaagggttcttgaatttggaatgaaaacatgttgcatctttgctttctattcatctctgactgaattttagcatctctttccgtcttgcaagcactaagccacagtagttctggcaatgccgttactttatcccaacagaagtcacagattttcatatctcattacaatctttgcagatacagatatcaatatatcattttattgataaaaagatattggggaaaaaagtcatttacactcatccctgatttaaaatgtgccactctaatttttagacccatctctatatctaagatgtaagaagcacatacatcacaagtttggttgtttactatcatgataattaaatttcggtatcattggttttctttgtaatcctgtatgttgcatttcatgcatttaaaacattgctctgagaagagaaccgggcttcaccaggctgttagagaaggctatggcaaagcaaggttaagaaccgctggatttgtttaaaaggacttacaagccctttggtgatccattgccttcctctcccttccttccctcctgccatactgcacttcctgtaggtagcttccagaccatagtctgcccctctcaccccctagtaccataaccacagttttctctgcaagttctatttacagatctgcctttccatctcattagcggtgggaacttgagcaaagtacttaaatctcactgtacctaaatttcctcatctgtacagtgcgggtagtgatagtacccaccccataaggttgagaagtaactgagataatgcaatctacagtgcttggcacatcttaaaggcccaatacatggtggcaaatatgtggttggtctttccacatggactgctttcctcctcctgcctaattctcgctcttttttttttcaaaactaggactcagtctgttaccgaggctgacacaatcatggctcactgcaacctcgacctccccctactcagatgatcctcccacctcagcctcccaagtagctgagactacagatgtatagtcccagctactttttgtattttttgtagagatggggttttgccatgttgcccaggctggtctcgaactcctgggctcaagtgatcctcccttctcaaccttcaaagtgctgagattacaggtgtgagccactgtgctcrgcttctagttttttttgtttgtttgtttgttttttggggttttttttttttttgcatttttttttttttgagatggagtttcactcttgttgcccaggctgcagtgcaatggcacgatctcagctcactgcaacctctgcctcctgggttcaagtgattctcctgcctcagcctccctagtagctgggattacaggcgcctgccaccacgcccagctaattttttgtatttttagtacagacagggtttcaccrtgttggccaggctggtctcaaactccagacctcaggcaatccacctgcctcggccttccaaagtgctgggattacaggtgtgagccaccgcgcctggtctctttttttctttttgagacgcagtctcgctctgttaccaaggctggagtgcaatggcgcgatcttggctccctgcaacctccgcctcccaagctcaagcaattctcctgcctcagcctcctaagtagctgggattacaggtgcccaccaccaggcccagctaatttttttttatatttttattagagacagggtttcaccgtgttggccaggctggtctcgaacttatgacctcaggtratccgcccaccttggcctcccaaagtgctgagattacaggcatragccaccacacccagcctagattacattcttgagtgcgtctagtaatagccaccaggagttgagaattttctttttgcccctgttctaaacactttgtatttgttgtctgttttcatcttcccagcaatgccacaagagggtgtattagccccattttacagaaaactgattctcataatggtaaaataacttggccaaggttgtccaatttgtgagtggcagaaccaggcgtaaacccaggcctacctgactcccaagtccatgctcttcattgctgctgtgccactctgccatggacaagtgtctattgtggtcaaaactcccaccctttggtccatgactgtggaaatataggtcactattttatttatgtaacctctagagacagctcttaaatccagtgatgaactcgtcactcaaaccactttaattttagggtrgcatctactttgacttatttttctgacaattaattcaaaccaagacactatggcaggatctggggatacagaggtaaaaagaggcagaccacgtattcaagtagcttacaaatccaggaaggggatgggtatggaaacagcgtccacaacactgactccagaaggttggtaatcgtattcccattttatagatgagaaaaacaaaggctcagggagagaaagtgacttgcccggcatcacacagcttggtggcagagccaggactcaactgaacygtctccctctgtaatactgtttctgttccctgacggtacctcaccttcatcacactgtagtcatgatggaagagatgctcttcttccaagtgattatgtgctgaagacgaaagaccaggtctttaaagactgtccatccaggcccccacattacccacctccaggagcatggggcgtgtttagcattctgtgttgtgctctggagtacagtgacacagaccacaaggtactaggacacagatgcaatgtgtatgggtgatgacataaacacagcagtgcccccatggagctgtttcttacaccatggccctccactgggcccggagctaccaagtgtccactttgttcagttggccccttaaatatacaagcacgttttgtcttgttagttaagtcagaaacctcagagctaactttcactcatttctcacgccctgtagtcagtccatcagtgaatcctattgactccatctttttttttttttttttttttttttagacggagtcttgctctgtcaccaggctggagtgcagtggcgtgatcttggctcactgcaacctccgcctcctgggttcgagcgattctcctgcctcagcttctcaagtagctgggactacaggygtgcaccaccacacccagctaatttttgtattttttagtagagatggggtttcaccatgttgaccaggatggtctcgatctcttgacctcgtgatccgcctgcctcagcctcccaaagtgctgggattacaggcgtgagccacsgcgcccggccttgactccatcttaaaagtkcatctatctggagttcacccacttctcaccacatcaattactgcagcagactccgtgttcctgcctttgccccaacagtctcacgctgcacagcagccaaagatgttctgtcaaaacccaggtcagtttatgtcccttctctgctcatttccagagctcctcctcctcaaagtccaggtcctcccattrgcccacgtcagggcccttcatgatctggcccctctgagttctccatctctgctgctcccggtttactgggcaggctctggtcacactgacctccttgctggttctaaacacacaaagcaggctccagtctcagggcctttgcagatgctttccctctgcctggaaggctgtgtcccacatgtccacttggttcactccctctcctctctcaaatctctgttcaaatgttgccttatcagtgaagccctctctgcccacctttatgttaacaatccccagcccaacactccccacctctctcgcctactttgtttccgtttttttccatacacttagcattatccaacttgacattttgtttacgtatgtgtgtttatcatctctctccaccaactagaatgtaagctcctgcagacagtgatagtcgagtaagttgctcagcaatgacaacacctggttaataaaaggcattcagtatctggtttgagggaatgaccaaaaggccgggcatccccaccgttttggcttgaaaaatgtgatccacaaaagagccatcttctctctcttccacggcacttagcacacagccaggcaggcattaaactgtgcagtcaaatcacacttagacctgcctgttcagcacagcgtggtggttaagagggggctcaggagtcagatggcctgggcccccagcccaaccctgtcacttattaggtatttgactctggccaagttattttacatatctttgacgtttcttctgcaaaatgggataattgtaatccctccaatcgggttgttgggaagattcactgagttatatgtgttatatatattttaagttacatatataactattttaagttttatgtatatataactaagttatatatataactattttaagttttatatatataactaagttatatatatattttaagttatataactaagatatatatatatataatgtacttacataaaatatgtaactatattatatacatatataactaaattatatgtaactatttgaagttatgggtatataactattttaagttatatataaatataatatatatgagttacatgtgtatgtatatatatgagttatatgtattttaagctgctgaaaatagtgcctggcacgcatttgttgttgctgtcattgtttcctctataaatgccctaattttcatttttccacaggtgctgcaaatagccagttgtcaacctcccaaccgagcctcaggtactatgcactttgggttcaagtttcacttattcaacaaatactgatcccctgcgtgtgccagatgctaggcttcacgcctggcatttccaggtgaacaagacacacatggtccctgtgctcatggggacagcttctgagcgggcaggaagtgaggtctctttgtgtgtgtcgtaggcataaggtgaatgagcatgaacaagatggcaacgagcttcagaccacccctgaattccgagcccacgtagccaagaagctgggagccctgctggacaggtaaacaaaggtggagtttctcctctcttgcccttgttaatatgaacagcaatggctcacattggctgggagctcacggtgtccaggctggcacggtggcaggcacctggcatatgtcatctccctgcatttataaagaacattatcatgtgggtcctgttgttacctttatcctccaggtgaggaaacaggctgtcagcaaggagacaggtgtgcctgaagtcacatcatcatcrcagctaccatttactgagcaactgtttgtggccaggctctgtgctaagtgcttgatgtccattttctcatttaatccttctgatgaccctgagaggtagggactgttatcattcccactgtacagatgggtaactgaggctcagagaggcaaagtcatttgcccaggggacaccgctattaagtgacaaagccaggattcagaacccaggagggaacagaattgggcctcaaacccaagtgcgtctgactccaagcccacatttttttgttttgttttgttttttgagacagagtctcactctgtcgcccatgctggcgtgcagtggcacgcacaatcttggctcactgcagcctccacctcctggattcaagcgattctcatgcctcagcctcccaagtagctggacttaacgggcacctgccaccataccaggctaatttttgtatttttagtagagacggggtttcaccgtgttgaccaggctgatctcgaactcctgacctcgagtgatccacctgccttggcctcccaaagtgctgggattacaagcgtgagccactgtgccgggccaagcccatgttcttaacccctgcattatcctgcaaccatgagagtaagagaggaacatcgagaagctcattcccgccacaagagggcaaggaaggaccgtgttcctatttcttgggtgccttctgtatgctagacactgtgccaggtctctatcttacattctcagcacaggttgataacccagtcggtaaggattcaggttggcattcctaaagtaggtgtcaaggatacaacctgtttgagtccatatgggctgctataacaaaataacataaactgggtagcttataaacaaaataaatgkatttctcacattttggaggctgagaagtccaagatcaaggcaccagcagattcagtgtctggggagagccctcttcccagtacagatggcgccttcctactgtgtcctcacatagtggcatgggcgaggggtctctctcagaccttttttataggagcagcaatttcattcatcaaggctccaccctcccgacctaatcacctctcaaaggcccccatctcctaatcctaataccttgggttgaggatttctctttttcttttctctttttggagacagagtctccctctggagcacagtggcgtgatctcggctcacaacaacctccagttcctgggttcaagcgattttcatgcctcagcctcctgagtagctggggttacaggtgcgcacccaccacgcttggctaattttttgtattttttgtattttcagtagaaatgggttttcattatgttggccaggctggtctcgaactcctgacttcaagtgatccaccggctcggcctcccagagtgctgggattgcaggtgtaaggcaccatgcccagctggggtgaggatttcaccataagaatttggggaggacacaaacatttggattctagcactagcccaaagcgtggctttagaaaaaaggaggtccaacagcaaagaagcgtgagaaacactgcaatctacatacctccacgtgtccttgcagactgcaagccagagtagtatattcaaggctctgagaattcctgtagtgaagagacctgtgtaactgtttarcccagcattttccaaacttgtttggccacagtgcctttgtttcatggaaaaccagtcaacaacctgcggaacaggtctggggatacactggtctagatctgttcctgactggcagagccctggcagggttttgaaagggagatgaggcaggatttggggccattgtcattccattcaaagtagatatcaaaaaggacaaatgagccttcccaaagtgtgaaccagctattcttctgagacagaatgatgggccagagccccgcagcctgaatcccacagggttcccctcaattggagaawgtagaggaggtgtttaggaaggcagctgcakwtcagcctgtgggagcagttttcctttgtgactctctggcttcaggctgaacagggcctgcttggcattgcactgagtcacagagatgtttctgcagtagaaatgccagtcagccatggttagaatattccctgcagcattttcatgtttctccaaagaaatctaaatgataccttaggccaggcgtggcagctcatgcctctgatcccagcactttgggaggctgaagcgggtggatcatttgaggacaggagttcgagaccagcctggccaacatggtgagaccccatctctactaaaaatgcaaaaattagctgggcatggtggcgtgcacctgttatcccagctacttgggaggctgaggtaggagaatcgtttgaacccaggatgcagaggttgcagtgagctgagatcgtgccactgcactccagcctgggtgacagagtgagatcccatctcaaaaaaaaaaaaggaaatgtaaatgatactgcatttggtccctagtgttaggtcagtgtctctcaaccttggcgctactgacatctttgactagcatttgtcgtgggggtctatccttcttcccattataggatgtttaccaacrtccctggcctctacctactagatgatagtagcactcaccccaccagttgtgacatccaaaaatgtctccagacattgccaaatgcccctgatggccaccattgaaccactgtgtggggtcaagaacaggtgcctgggtggcatcatctctactccctctccccgggttgcttttcctgaacagggcttggggggcacctttggcatacaggaagggaggttagggaaagcacccagggcattgctgcrtctgcctcgagggcattgctgagagccttgttctctgctgtgcacagtggcatctccatctgcactcaccagacacatgcttcctggccttgtgcctctagagaaatgtggtttatttttatgttagagagcytgtgaaggctgaagcttytcttgatgacagtcatcatctgcatcgtcatcatagctaccatttgctgagcagctacttgtggctaggccgtgtgccacaagtgcttgatatccattttccccttcaatccttgtgacaaccttaagaggtagggaccttcatcgttcccactgcacaggtggataacagagactcagagagataaagtcatttgcttaagggacatagctaataagtgacaaaaccgggattcaaaacccaggtctctgaagtctgaatgaggtccatgaattggatcaatttgcatttcctagttgtgatgttgtactatagcgaggcacaatgttaccattgcgagaaaatggatggagggtctatggaacatctgcattatttgttgctactgcatgtctacaattatctccaatttcttttaattaaaaaaaaaaatttaaaaacaggtctgccctgctccagaagctgtcctctgaaccagttttctagattggtcatatttcccttttcatgcttgctgctaggaagctcagagcaaaatgtatgccctctctctaacaagtgtataggacttcctgactacacttctaggtctttctgttcctcttgcccttatatctctttgtcctatttgaaattgcattcattttgttaaattcttttctttttttggagatggagtcttgctctgtcacccaggctggagtgcagtggcgcagtctcagttcactgcaagctccgcctcccaggttcacgccattctcctgcctcagcctcccgagtagctgggactacaggcgcccgccaccatgcccggctaattttttgtatttttagtagagatggggtttcaccgtgttagccagaatggtctcgatctcctggcctcatgatctgcctgccttggcctcccaaagtgctaggattacaggcgtgagccaccatgcctggcctcatcttgttttactatgtctttaaaacttcttcaacacttactggaataaagtgggctttaaagaaatgaagcactgcagttcgcgtggcagaggctggtcagcatgttataaccagaccatcagccctcttactaggccagcacgctttcgcttttgcatttacaatcacataccccatcccctccacttgaaaaagaattttgtttttgtcgttatccaaaaatctcatcttaaatcaaccgtctcgtctccctgtagcttcattaccatctcagaagcagcaaaggagccagcaaaagctaaggtacagaaagtcgctttggaggatgatggtgagtggttatacttaatagaagctatcatttattaagcacctaatgtgtgtctggaggtgggcgaaacagttttggtatattcttttttttttttytttttttgagataggaactctctctgccacctaggctggagtgcagtggagcaattatagctcaatgcagcctcaacctcccggacccaagcagtcctcccacctcagcttcctgagtagctgggaccacagacacacaccaccacccctggctaattatttatgttttttagagacaggatctcgctatgttgcccaggctggtcttgaactcctggcctcaagccatctgcccaccttagccttccaaagttctgggactacaggcgtgcmccaccacacctggctaatttttgtatttttttttagagacagggttctgtcatgttgcccaggctggtcttaaactcctggcctcaagctatcctcccgcctcagactaccaaagtactggggttacaggcatgggccacctcaccattctttcatctgctcagcccctgtggtgaggcaggtattatgattgaaccccatgtacagacaaggagactgaggccctgagaaacgaagtcatttgcctgaggcggcctcgtctgtgtcaccctgagcaggagcactttactgctgccctccacagcctcgcccatctgcgtctgtcctgtaccaacacatttgccactttgaaggctgccttaggtcaggagctcaagtgctgacttccagaagcctctgagggcttgctgagctgatgtggctgctggctcctgctccagcgcgccctccactggctccatcaggcatcagcatgacccttggcagatgcagaatcactttgtagttagacgactgattcctgggtctttgcctctggaccaggagctcctgagggcagaggcggggcagcttcagcacctggcacctgggaggaggggctggcatctgggggtgctgactctgctcctttgttttytttgtttgtttgcttggttgggtttttttgttattgtttcttttttaaatttttttattttgtgtcttcttaaaattttttttttgtttctctttatcttttctttctttcgttttcctttttaaaatttttttcttttttgtttctttattttttatttttttatgtttctttttgttttgttttgtttttgtttgactctgccccattgaatcttaggtttccgccttttcttcacatctgtccctggaggccgtgagaaggaagagtctccccaaccccsccgaaagcgacagccctccagctccaggtgagaactcacacctctcctcacgtcccctccttttttctcctcttctgtcttggtgggttccctggaatagccaagcagactccagtcaggaccaggccaaggcagtggccctgtcaggcagctggagaaatcrtgagctcagcgggagggaaagccctcttggcggcagctttggatgtttactgcttttgagcacctgtcttgggccagacacctcacttgatcatagttgcctcctgggacatccctgggaggcctggactctgttaagatccccgttttagagatgatacagtcagagaggttaagtcacttaaggaggtcacaaggctgctacgcccagaagccagtattggaagccaggttggcctcactcccaagcctgaactcactacctgcctctctctgcggccacctyctggtgacctggaccaagggaggacagcgagaggcagctctggggctgtgtcctgactccagctaacccagggtaccctctcgttgcagcagtgaggacagtgacgaggagtggcggcggtgccgggaggcagctgtgtcggcgtccgacatcctacaggagtcagccatycacagccctggaacwgtggagaaggaggcaaagaagaaaaggaagttgaaaaagaaagccaagaaggtggccagtgtcgactcggctgtcgctgccaccacccccaccagcatggccacagtccagaagcagaagtcaggtgagctcaayggggaccaggtgtcgcttgggaccaaaaagaagaaaaaggcaaagaaggccagcgagacctctccattcccaccagcaaagagtgctacagctatacctgcaaactgaacccagccatgggcacagggctcagccagctccaaggacaaggtgtcccccccaccctggggacaaggcatttccaagccccmcctccctctccaagttcaaggactgggctggcaaacccagactgcccatgagaccctgatggtgatgaaggcttgctcgagagttgggccaaaaaannnnnnnnnnnnnnnnnnnnnnnnnnnnnnnnnnnnnnnnnnnnnnnnnnnnnnnnnnnnnnnnnnnnnnnnnnnnnnnnnnnnnnnnnnnnnnnnnnnnnnnnnnnnnnnnnnnnnnnnnnnnnnnnnnnnnnnnnnnnnnnnnnnnnnnnnnnnnnnnnnnnnnnnnnnnnnnnnnnnnnnnnnnnnnnnnnnnnnnnnnnnnnnnnnnnnnnnnnnnnnnnnnnnnnnnnnnnnnnnnnnnnnnnnnnnnnnnnnnnnnnnnnnnnnnnnnnnnnnnnnnnnnnnnnnnnnnnnnnnnnnnnnnnnnnnnnnnnnnnnnnnnnnnnnnnnnnnnnnnnnnnnnnnnnnnnnnnnnnnnnnnnnnnnnnnnnnnnnnnnnnnnnnnnnnnnnnnnnnnnnnnnnnnnnnnnnnnnnnnnnnnnnnnnnnnnnnnnnnnnnnnnnnnnnnnnnnnnnnnnnnnnnnnnnnnnnnnnnnnnnnnnnnnnnnnnnnnnnnnnnnnnnnnnnnnnnnngcccctctgtgctcccacggagggctggcgggggcgctgtggttccagaacatttcatgacctcaggaaaaaaggaaccttccagttatttgagactagtggccaagtggtgaaacctccatctccctagaactgtctgaggtgggcaggggaagggagaccttccccaccacctccttagcctggtgtgagaaacagtttttagaaaatgagagaagggatccccaagaggccaaggcccagagaaacttttgttcttctctccttagcccacawagacttmacagaatcgtctgagaaaggrgagctttttcacccctggctttctagaattttctttgtctgcatttgtgaatataccacacatgatggtgtctctgagccgaccagattatggaaactcaattgtcagaggacccaaaacaaaacttagagtgatttggatattgcctctctgtcaatgctgaaccttaagacattttaagtaaacatcctcctcctctctacacccccaggatttgtgcgttcaccccacccaagacttcaggaagtgtcatagcactcgtggactaggtttcatgggacaaaggcattctgcaagaagtagaagcttgtggccgggtgcagtggctcatgcctgtaatccaagcattttgagaggccaaggaggtggatcaattgaggccaggagtttgagaccagcctggccaacatggcgagaccccatctctactaaaaatacaaaaattagctgagcatgttgacacacgcccgtaatcccagctactcaggaggctgaggtgggagaatcgcttgaacccaggaggtgcaggttgcagtgagccgagattgcgccactgcactctagcctaagcaatggagcaagaccctatctcaaaaaaaaaaaaaaaaaagaaaaagaaaagaagtagaagctcatggccagggatggtggctcacacctgtaatcccagcactttgggaggccgaggcaggtggatcacttgagccragttccagaccagcctaggcaacatggtgaaacctcgtctctataaaaaaaagaatacaaaaattagttgggcatggtagtgagcgcctgtgaggctgcttgtgaggctgaggtgggaggatccctttagtccaggagttcaaggctgcagtgagctgtataatgccactgcagtccagcctgggtgacagtgagaccctgtctccaaaacaaaatttttttaaaaagtagaagcttgaggttaagatgaaatctggctttgtcattagagtctcagcagagcaagaaaagcagagatgtggggtgtgagagcgtgggtgctggagcctgtctcctcttcgcaggcctctggcctgccccagcctcccgctacctgcccaaaccccatctgaatgatttgtggacaagcaagaagtttccaccgcatttctccttgactttactaaaagttaaataaacgtgccactcgccccggctggctacaagctgcagggggtgccgggtcaccccaggccttttcctgaatcccagggtagacgcggtacactgaaggccaggttctcagcagcaggcccagggatgtgggaccatgcttgtcctgggttcacaggctcctttgtccctcctggcagtgctcaggacctcagactcctcagggtggctgcgaactgccctcagccagccaggcccccaggcttctgagtgttagtcctgtccacacaggtagctcctgtgccctggggtcacctctttcttctcctgggcacctcagcttggccagttccccggccctgctcagctgctcgggccttgctgccttgtgagctcagctactcctgccccaaacaagggcagggtctgcagggcgctcgagacagaggagctgccccaccaggacctggacttggcacgggttgcgaggctcccacaggagtaaggacgacttcccagccccgaagtagccttcccagtagaggcaggaggccaggctggcctcagaggcatgatgctcttgggaacaaatacaggaaagctggaggtcatggggcctgggagagggaatcgctggggatgggaagccaggagagccctgcctgccttccctgttagcttcggcctccctgggctcaggcgttagagccccaggctctggcacagagtagccacccaggaaatkcctgtgtgagtaggtgatggggtcagtacaaatggcatgtgggtcactagctggaaggagttggggcaggaaggagtggcccggtgggtacattggtgacagaacaaggccacgctgatccagggcctctcagagctcagcaggtcacagctacacaggcctgtgtcctgagaagtgtggctgccagagtggtgtagcggtcccagggctctccataggcccaggctgggggtgcccaagtcataggccgcccccttcagttccaagtaagaagactgtatcccacgaagcagcgacagtccctcctacatctgccatgaacaggctttgctcctagctctccacgaccccctcctgtgcaccccgagcagcctccacgggttggggcgcctcagagccctccctttctgatgcatcagagcagagtggggagcgaggcacagctgtccaggaagggccacggttgctcggcaggctcaggtcctccaggcagggctggctgctgccctcatcaccccccaagcaggcagtacaggccccagggcccaggtgccgtggttactgggaggaagaggccatctgggtggagatgaagrtctysatgaygctgtggttggatggcagcaggtggctctggccattgctggagtctgagctctggtacagcaccaggmtgctggaggacactgcagaggcaaacaaggctgctrgccacccaccaggcacccacacccaccccacctgcctgtccctaggggtactcaggatggggaggcagggccacacctcctggatcacagcagataacaggaaccccaaagtcacacctctaccctcggttcttaacaaagggagcctcccagccagggtccacggccgcccatggagtggcctgagtacatcttagtgtgaacactggagaagccccggtgagatgccgaggtaggtagttgtacgtgttggcttggctaggctgagtcaaacactaatctaggcgctgctgtgaatgcaggtgctttgtagatgtggttaatgccacaatcagttggctttgagtgaaggagattaccctgaaaatatgggtgggcctcctacatcagtggaaggccgtaagagcaaaaaccggtttcccagagaaggaattctgcctcaaggctgcagaattcactccccggagctgccagcaacagatttcaggcctgccagccccccgcagacacgggccaagtccttcaaataaatctgttggttctgtgttcctggagaaccctgactgatggcaatggttaagagaatgggctttgaggtgggacctgggttcgagtcctggccctgccatctggtagctgtgggagatgaggcaagtccctcccctccttgagtgtccactttctcatctgtaaaatgggggtgrtcatggacacgcctcatggggtgaatgccaggacacagaatggcctcagtggctgtcatgacagctgccagggccgggtccaggaaccttatagaaagggggcagcttgcaaaaaggcaggctgcaaagcccacccacctgactccaaagtgcccactcctgacaatggcatcatagattacaaactcaggtgaccgccccacygccaggggtcattggagccgatgtgagtggatgcagtgaggcctggtgcactgttatatgggaatatgaatttttccaattttccaaaagatgccagaaatctggatttctatgtgaaaattcctgattttgaaatgttggcaacaaattcaaagaatgttcaaccctgagccaagccaaaccaaacacatgcaagagtcgcttctggctcacagacctggtccttatcgttactctccactgcctctaacaattacttcatcattttcctcagtccagtccctgagatgttcttgtaaggtgggccccatcttcctggggtcgcctgtgcctcttgggcttcatggaagcccaccccacccctccacgcctgccagtgcttcctcacagcagccctaggcctgctgcatgcacagccccacagtgacggacagcaacagaaggggtgggaccaacatggaagggggcagggacagtaagggagggggtggagccagggcctctcacctgtggggctggcgctgagcysgtgggccggctgcaggtgctggatgcyggcagggtcctggctggggaygtggagggtggtggcctgagatgccggcgtgtgaagcccggactcactggaggcctcagtgtctgaggtgaagacctgggggagcagagcagcctcctgagcccgggggatgtgggggtgaggggctctgtcacaggccgagggagggccagcaggcctggaccttacctgcttggtgggcgtgaggctggccagggcgctcaggttggtggtgtcggtgatgagcatagtctgcgggagcaggcccgtgtgggtgtactgggccacctcgggcttgtggctgtagagggctggccgcaggggagagaggggcagacgtggcagacgtgcctgacagccctagtcccaggcctcaagactggggaaaggggggcatggggcctgctgaacagccagactgggcagcagttggagatccagggctgattttcaaaactggaggctccagataaagggacagaccctctccccattacagggaactgctcagctgcgcttgatgcaggggagcctggaggaggccagaaaccaactccagctcctcttgtcacctggagacagcaggtatgaaagggaacgggaggtgcaggtgcagggctactgtactaagcacgggtgctacgtactaagcgcaggtgctactgtactaaatgcaggcgctatgtactaagcacaggtgctactatactaaacacaggtgctatgtactaagcacaggtgctactgtactaaactcaggtgctgtgtagtaagttcaggtggcccctgtcaaagagcaaggcagaggacagcagtacttccatctccaggccacctttccaaatataaccccatgttttgcctacagcacctccacccacccctcaggagacacatagaccctacaagagacacacagacactaggaaaacgcacataaaccacatattctcacagtgactcagataaaaatgtaacacacacacacgcatacactctcaaccaggtacacacagacatacacaggccccaaatctcttaacccagtcccaaattccaaaaaggtctgaaaccaaaagatttccttaagattggcactagagctcatttggtggcgaaacccagcctgaacctggtatgaggttatgagtgtttaaactgccttgtggaaatcctatctttggctgcagaaatagcagtgctttgatcacagggggctgtctcaaaccctgctgggagtgttatgtgatagctggcatatccaccaaattacttttctttttcttttttttttttttggcagagtactcactctgttgcccaggctggagtgcagtgcagtggcacaatctcagctcactgcaacctccgcctcccaggttcaagcgattctgcctcagcctcccaagtagctgggactacaggcacgtgcctccacgcctggctaatttttgtacttttagtagagacggggtttcaccgtgttggccaggctggtcttgaactcctgacctcaagtgatctgcccacctcggccttccaaagtgctgggattacaggcatgagccaccacgcctggccccagattacctttctaaaatctgaatagattttagaaattcatatggccctaagagtttcagagaaacacaggcatgcacacaaatgcatgcacaaccgatacacacccagacacgcactagggatctgctcacacaagcagtcgtgcacacacacagatacgtgcattcacatgggaacacactggcctgcagacaccctcaatcacggaaaaacacttgtcccagagacacatgcagactgcaatgcctgccaggcacccctttcccctgcatccattgacagccaacctctatcatcatctcctgctgtgtggggcacagggcgctcaccgtgggggctctgcagctgagccatggtggccatgaaggggntctrggtcacatggctctgcacaggtggcatgagcggctgctggtaggaggggtgcagcggctrggagaactggacgggctgcarggtggtcaggctgctgcccatgctgttgatgaccggcacactctgtgcctgcgtggaggccaggcctggagtggaaggggagggaatcagctgggccccccagttatatcccacccctgcccaagacctcccaagggcaccacctctccttcccagagcccgtggtttggaggagggggcagggtggtcaggaaacagccctccactgggacctgccactaatttaagtggctctggcaagtcattccccctctctgagcctttagctctttgtctaggctagtgggagaggcaggcggtgacttgttcaaaagttgtcaaactgcggttccctggagccctggggttccacagcagtgcaaaggccatggggtcagttctctgctcccctctcctagcagctccttatctatcttatgtactgggcttctgcataattgtacctgcaaataagggctttctgggcttaatttttcttcataaaacaaaaacttagaaaacatcagtcycccttaccctgctgtaatttgcccatagacccttcaccttctgaggtaccacagaattgatgtattatgcttagtgcctgcctccctgcttgagttgctgagattttggtctgtttggttcacccaggtatcactgatgtagcacagtgactggtccagagtaggcactggataaatacatgttgtatgaatgaatgaatgaatgaatgagtcccagtggctcttccagctcctggattctgcggttgccccatgagcctcccacccaggtgcccacccatccccaccagcttaccgatgaccaggrtgsaggcacctgtgttggtgaacgtaggacccagggaggcaggctcaccaggccsgatggtcatgaccccaggaagtgaggccatgatgaggttctggggctgctggttgaggcctggggatgtctgctccaagctgtgcagtgctgtcagggtgctgacaggggggagggggcccccagctgctgagacctacgaggggaagccaagctgtgtccggggggccggggtccccacagggcctccctagggactgctccagaatctccctgccaaggaaagatgaggttgggttttccttacaagcaaggacactcaccagcttggcttctgtactcagcaggctgtggctgggctccaggcccrtgggggacacttggtggaggggtgtagacactgtcactaagggaccgccgctgcttgagggtacttctgcagtctcactggtcgcaggctgtccatagcgcacacctggagagggaagcagtgtcctgcctcagcaccccacttccctgccctcccctgcctccacagccctcagcacttcaaactccattggtttgcttaggccagctgcctgtctgcctttatgcagccagcaaatctgcctttgtttctaccttttgccaagccctgggtcagctgctcccagttccttgaaggctgggactgcatttattagctccattccccccactgcctagtgctatacctgacatgcagtaggtgctcagtagaagacaactgaactgaatttaactgaatttagttgaattgaaatgaattgaattgatacaatctgaaatgaatgaattgaattgaattaacccaaatcaacttaggttgagttgagtggaatgatatgaagtggagtggatggtgtggagtagagtagatggaattgagtggaatgagtgggatcaagtggaatgggtacagtcgagtggagtggtaaagggtggagaggacgggtggggaggaa

SEQ ID NO: 6852 - DNA, 113819 bp, Homo sapiens
  misc_feature (1)...(113819): n = A,T,C or G, or insertion/deletion polymorphism (see Tables 1-2)
ctcttcttcctctcttcctcctaggagtgaagtgcaaccagtggtctgaggaggcttctatggtgtttcgaaatcatgtggagaagaaacctctggtggcactggtgcagacagtcattgaaaatgctaacccttgggaccggaaagtagtggtctacttagtggacacatcgttgccagacaccgatacctggattcatgattttatgtcagagtatctgatagagctttcaaaagttaattaatgactgcctctgaaaccttgacaactaattcagattttttagcaataacaaaatgtagtaggcttaaaaaaaatcttaactctgctacatggctctgactgctgtgggggattgaaaagaatatgcttatgtttgatgaaagatatttaacaagttttgttttaacagagttgacttttcaaagaaaattgtacttgaattattactataatattagaataaaaatgtttatcaatataaaagctgactaccttttaatttctaggcttcatgatcttaagatgaaagcttccgtttcatgttgtcttccttgcagagctgggttcttctccagtgaagctgagactattatgacttaactctaccctgatgtagtagtgtatctcaaagcaagtgatcaccaaagcatgtgaggacttatcctgagtcttaacacatcagcatttctagaggagcagcccaggcaaaccaacgtgaccctcaacccaaatcttgagtggcttctcttctcattgcccacagagtccagctaggacccaggctttctacaatcctcctacccaacctccttatctaccactccctgccacactgtacctttatttggtcactgaacccctgcttattccattctgtcaacctgcatctcattctcctcccatcatttttgcttgtcagtgtcctgcctgacctcctgggccaaccatgaagctttctctggtacccctttctactccatcgtactttgatcatgcctctcttggtgcccatatgtcactgtgttttatagtatatgactagtctgtgcaccgattaccccagctagatcatggtctccctgaaagagggacgggtcttagtcatctccggtgatataccagtaaatgtttgacaactggttctgttgagtggggagctgagccttgatttgtagtgtctgaaaattctcatattgtaaatggtcccaccattgttgattttcagctaataatatgacaagactgaatgtggagttgggaagagactcacctaagcagctcttgagaccgcatatgacaggctctccagcacaccaccgtctgagcatccacagccgtcagaatggcatcttacacacatcaggcactccttttgtgcttgctaattgatgggcagatagattggcagacaggttataggctttagcagtggtccaaagatgaggtggggaggccctggactaagagtggagcaatggtgttgaagaaaaagtgttgatgaccttgtaaagtttttaattacaattattagacagcttagatacagattgggaagagtgaagccaagtcttaaggtatgagagcctaggaccttactcagatggagtgggggagtgggaagcttaaaaatttgattttgaacacactgaatttgagctaatagacttccatgtgaagatatgcagaatcttggaaatgtggaataaacttcaggggcaaaaaccaggctggaaataaaaattctcaatgtcatttgtttgtttttatttgagaaaaatccagaaacaaatgagaacagaaagaggaaggtagagaccaaatatttgaagtttttcattttaaacatgtcaaaattatctctagctttttaaaactcagtatttacaacaagtgattcaaaattcaggagtgctgaatgccagtgatttatcacttatgatgaaataaaaatatcccaacacagaaatgtttaagtgaaataaactggtatgtttttaataattgtttcattctctaataaaaaaatggaaaaatcctcaaattgtctacaggttaggaaaaggtttctatttcactgactttagaaatgtttccattacttttatttatttatttatttatttatttatttatttatttattttttgcaaggcagaagaatttttcttagtacagaacaaaatggagtctcccatgtctacttctttctacacagacacagcaacaatctgatttctctttcctttccccacacttcccccgcttccactcgacaaaaccgccatcgtcatcatggcccgttctcaatgagctgctgggtacacttcccagatggggtggcggccgggcagaggggcccccccacctcccagacagggcggctgggcagaggcgcccccccacctccctcccggacggggcggctggccgggcgggggctgccccccacctcctggagggggcgtctgctgggcggagacgctcctcacttcccagatggggcggctgccaggcggaggggctcctcacttctcagacggggcggctgggcagagacgctcctcacctcccagacggggtggtggtcgggcagagacactcctcagtttccagacggggtcgcggcggggcagaggcgcttctcacatcccagacggggcagtggggcagaggcgctccccacatctcagacgatgggcggccgggcagagacgctcctcacttcctagacgggatggcggccgggaagaggcgctcctcacttcccagactgggctgctgggcagaggggctcctcacatcctagacgatgggtggccaggcagagatgctcctcacttcccagacggggtggcggccgggcagaggctgcaatctcggcactttgggaggccaaggcaggcggctgggaggtggaggttatagcgagccgagatcacgccactgcactccagcctgggcaacattgagcactgagtgagcgagactccgtctgcaatcccggcacctcgggaggccgaggctagcagatcactcgtggttaggagctggagaccagcccggccaacatggcgaaaccccatctccaccaaaaaaatacgaaaaccagtcaggcgtggcggcgtgcgcctgcaatcccaggcactcggcaggctgaagcaggagaatcaggcagggaggttgcagtgagccgagatggcggcactacagtccagcctccgctgggcatcagagggagaccgtggagagagagggagagggagagggagactgtggggagagggagagggggagggggagggggaggagtccattactttttaaaataaagcaatagattgtttcttgatgtaaccacaaaattagtgctaagtcagtgtgacacaaacaaatgaaatgtgaatgaacccttcctcataccatattcaaaagtcaattccagatggattgaaaacctaaacattggccgggcatggtggctcatgcctgtaatcccagcactttgaggtgggcggatcacttaaggccaggagtttgagaccagcctgggcaacgtggcaaaaccctgtctttaccaaaaaattagctggatgtggtggtgcacaactgtagttctagctattcaggaggctgaggtgggaggatcacctgagcctgggaggcagaggttgtagtgagccgagatcgcgccactgcactccagcctggatgacagagaccctgtctcaaaaaaaaaaaaamaaacaaacaaacaaaaaaaacaaaaaactaaacatgaggctgggcacagtggctcgcgcctgtaataccagcactttgggaggctgaggcgggaggattgcttgagcataggagtttcagaccagcctgggcaatatagcaagtcccctatctctacaaaaaacatttttttaaatagctgggcatggtggctcatgcctgtaatcccagcactttgaggggctgatgtgggggttaaggggttggcttgagcccaggaggttgaggctgcaatgagccgtgatcacaccactttactccagcctggccaacaaagcgcaagactctatctcaaaaacaaaaacaaaaacaaacaaacaaaaaacctaaacatgaaaggctaaggtgggaagataacataggaagataactttataacccaggaacaggaaagagttcttaaacaggacacagagtgctgccaataagggaaaagattgccagactgtatttaagaacacctgtttatcaaaatacgttaataaggtgaaaaggcaaaagagtggaatataactgaggatacacacaccattgaatctattcaatacacaggactatccagaagaaaaatggacaataaatctgaacaattcacaaaacaaatccaactggccaataaatatgaagtgatactcaacmcattaggatatagggaaatgcaagtttgaacctcaatgagataccattactcacatatcagaatttctaaagtgtttcaatttttgtaacttcaagtgttgttgaagatgggaaactgcactgtacaatggtactataactttggaagagttcaggcttatctctgccgaagttgaggttaggctttctctatcacccagcacttccaacagcaggctgtgcgcgtggacaggaggattctggcaaggaatgttcgcagcagcactatttgtaatagctaaaacctggaaacaacctaaatgcccattaatagtcaaatggatttttttttaaactgtggcatattcatacagtgaaaaactacagctgcataaaaccacagattaacaacagatttgaacaaatgaagacatactacagagggaagaaaaaaaacaaggacatgatcaccgtaagggtcaagaaagtgatcatctttagaagggagttgggacccaggagggacaggttggcttctgggctgtaggcaatgttctctgagtgactggttgcacaggtgttcacgttgtaaaaagtcatgaagctgcacatttattttgtttacacatacaacataacttatgttgtatgttcttatatgttcgattcacaacaaaaatgttttaaaataatctgaaatattagatcactgcttatttttaaatgtatggcatataccccttgaaaagagcgttctcattgtgaggactttagagaaattcattttcttgagaaacaaaatttggttaatgagtgtttctcattaataatctatacatcaggattaagagctgattttattaaggtctaccctaccaaaagctttcccataataatccaaaataagacgttttcctatttctatataaattcctttgcatgagacatttgtttattaaaacacttaaaattgtatttggaataaaccacctaaagtggtttgttctgaaaaaaaaaaaaaaaaaaaaaagccttttaagaacttgggtctttttgttgtggtcatttaaaatcagtattttagacactccactcgctctcagtgtagagagaatgtattcgattgcgtgttggaactacgtgtagacaaaacgatcgcggttaaagcttgcggctcagagcccacctggccgcgctgctgggaaacggacggagcggcgcttcaatcagaggtgaaggtgcagcagctgcttagctggctttggtccatcacttctggggacttcagattctcaaaatcttaaattctaaaccccacaggaatgcaaatctgcccaccttttcccacataactctaccgtcgctcaaactcttcctggtaccagcggggaagcggaggagacccaggcaggggcccgcgctcgctcggctgcagcccgactcccctgcgctcccggcccagggccgcgtcccgacggggaagtgcgctgcgcccgggcgcccccgagtggagggggggggaaggagggagccggcggcgggcggggcggggcgcggtgacagccgagccgggcccgcccctggctcccacccccgagcccacagctcccgcccgcccgcggccgcccgggagctcgtccagccccgcgctgcgctcgcccgcccgctgcccgccggagcaccgcggcctccgcccgcgtccatctgcccgccgcccgcgcctgttccgcagcccgcgtccgcgccggccccacagctctgcgtccgggtaagcccccaccccgcctggggtccccctcgcgctcgcggggctccctgcccccgctccggggcctcagccatatctgggcaaaatattcagctgtcgccgccgccgccaagagggactgagcgtggctccctctataaatagctgccgcctcgggttgcctctggggctagggagcccgggtctcggggttccgagcccagcgctcccgtccccgcctccccgcgcgcgcagccctggccagggcgccctccgctctggacctccgcaccgcgtctgtgaacgcgagaaggacccggggttctggaggagacggcgccccgggctggggtcctggcggaggggcgcccccgccacccgcaggactccagcgcggcggggctctgagcccgcggggtgctcagctgggtacaggtgccagccggagctgggctcgggggcgcggcctcttctccgcctgcaagagtctgggggtgggagtgggggagtaaaggctcgactggacgtggatcccaggttcgcgctgagagtgtttggggcaggtgaagtttcccaaactgggagagacaaggtttaaagcaccacgacacgcgctacgcggccaartggagctggaaagagcttggaggcgggagccccaggttgtcgccggctctcggcatggccttggcaatccccctcttgtttctggatctcagtctcccatttgtaggggcgaggtttggtagccgcgatggagctgggagcccaagccctgagagctgcagggcgcgctcttggccgcctgcgctccccacacctgttcaccctctccgggcctgggacgctggggtcccagccgcgcacatgcggagacgctgcagaaatcggagactgactgccccagactcgatcgtatcctgggactcactaaggccgtcggatatcctaagccgtacaaccctaggaagtgcacttttggggtgcctatgggcatctctctgctccgtagccggcaaagcagcctgtgagccacgcagcttcagatgcgatgagctgggcaggggcagtggttccagtacagccgctccctggccacagtttcccggtctatatcgggcctatgatgcgtcctccaacctgcgcagcgccgccccctcctacacccttcacccaccgctactattacagaccctgtctccagccctcgccctatgccctcagactctcggagacgacctggcccaagctcctccgtgtctgaatcgcagaaccagaccctgaacccaggtgctgggccctcagcgtgagaacccctagggcccccaccccatctttcttccagaggtgactgccattttgtcctctgtgcagggccgcagagccccctgctcaaggtcacacagggccggtcacgccagaagttctgcagtctcccagcctttcccatctctttccgcacccttcccactgctcaggcaggtccgggagctctgggagcacccgatcaatgccccctcttcttgaatctgctgctgttctggactttaccttgtctggacaatagcgccctcatcctgaagtttcctttttgcttctactttactttctgttatgtgtttttttctaaagccatctcaaagacttacagaaaaaagaattaacgggaaatggagtcagataataaagtttccatcagttagagccacacaaccaacaggcagagtgaaaacaagaatactgtcactttggtgtattatctttaatgagctagtcttacaaacccgtgttttagagagtcattgacccttgagtttctcccagcctaagatgaaagccagtgtcctctaaaaatagcctccgccccaccttatcagggtctcacaccttctccctccttcagggtagggcgttttcttgcagctcagcaaaaacagaaaacacaaagtaggtgtggcagctctgagcaatgggaggtggactggcctggaggttaggatatctggctccagccccaactctgccacccactcagaggaaccttgagcaatgagggggcagacaaggtggtctctagtggacctggagtggagagggcttagagtcttccttggaagcctttctagcatgacccatcctgtaaggaggagctggggaaggagtgagagacagtggctttcccaggtgccaagggaggacagaggtgggcagtgtcacttgctgtggagagacaggagtagggggatgaggactgggaaaagaccatcaggattggcagggatcatgagtgacttagaccagggtattgcagcaggctcaaaaaatgagatctgccagtgacccascctgtctgagcctcgttttctcctcatacaatggagacaacaatagccccatttcataggggctgcttgtgagaattaagtgagatgattcagggcaagccctcagcccagagcctgatattgcaatgatagtattcgttgtggtgagggggaaaggcaggagctaacaggagctgaagaagttctccacttcttcaggctgtaggctgaagaaggctctcaacagagccagcaactctttctaaaagcttggatgagaaaggaagggagagggaaggtagcaggaactgaggacaaggaacagaagggaggcaggcattctaggataaagagtatggcaagtagtgagaagaacccaggagaggggagagagttaaaggggaatctaaaaggtgtgcccataatgaggattggggaccttccttagtgacttgcagaatgtcacagactctgcaggtggccttcatcccctggaatgagcaaaaaaaggtaaaacgaagcagatcctggctcagacccctatgtctctggcagaccagtatctgcgatggaggatggtgatgggctgtgaagagtgttttgaccctgctctggggcctcataaccttggcttatttatttctgaaatgacatcatctatcgatgactcctgctgagcccggtcgtaatggccttttccagtcaatgttttgacttttcagtcttactaatggaccagccaggctgccaacatttctaaagaggccagtttacttttcccttaaagccagaacaccagataaatcaattattgggctgctaggagccattatcagtttaaaaccacaggcctgtttctatggaaaagcatgaaccagatagcacaattccgggccatttcctctcttttgttttgttttgtaaaatcttcctttggctaatcatgatagaacctaattctctttgctcttaatgagagaatgagctcattggagtcaacttaggacacggtctgggaggttttctttcgtgttaggtgttgctgggtttttgtctgatctgaaaaactaaacaaactcaagcatgccttttgtttctccttctcttatgtccttttggttttctttcagagaaaaaaatgatttgtgaaagggttggacattaccatctgtgaggaggaaagagggagggagagggagacaagggcttgcgtccgtccacgcatgtccatccctgtctcagttcatgttctcaggggccccagcctcaggccccactcactctggggcttcaagggtggtgaccccagggccgtttctagcgatgattctggagggtgatgagttgtgaccactgcgttgttgctctccatgcccaaaggaatgaaggaaagcagaactgcctctgggcatccttcagcctccttcatagactcatcgctgctgcccatcgctttgctgttggtgccttggtgccactcctacccctattctctttccaccgcacactctcacagtctcattcactcccacgactccagtcacctcccaactccctaattcttgcatcaagctggactgtgctcctcatctatagacatctctgcctcctgattcctttctcttcaccaccccattyatttgcccaccaagtcctgtcaatgctaccttccttaatttctcttacatccatttctatcgccacatccagtaccccagtaaggacttcctctctcccctaagctgctctcagagcctcttaaaggtatttctgcctcaagtcattccttcttccatgctgctcttaaaagatcttcacctgcgtcaattgtctcccttcagggactccccatttcctaagggataaagaccagattcattagcctctaagaccgggcctcaagctacttctccaaaatcatctctaggcactcctccaaattctctttaccttctggccatggcaaaagcatgctgtgccttatgcctccctgcctttcccctgctgttctttcggccttcagtgctgttctccctcttctcagtctgtgaacttgtaatcacccttaaaagcaaagttcttcattgatttacctgtacccccacagccccctgtgccaactcagagcaccagccagagtgtgttctaaatggaaccacccaatgatgtatctctgtctctggctagactaaaagctccctgaggacgaggtttctgactcatttatttctgcttccccatgtgcagctcagagcttaatgtgtgacatagtacaggcacttcaggttttaataaatggctgaccaccgaatgaatgaatgaatgcatgaaataaatgaatgaaggctctgtgataaccaggacagtcacacaacaccaaccagcatttacagcatgttctcctacccgaccaaatcatcagctctatgagggcagagaccacacctattctgctccccactgccagctctccagctcctatcagccccatcatgatacgtagctagtgtgaatccaagagctcatttgaaattcacagtaaccccatgagggaggaacagcaagtattgttacctaccttttgtaatgggacagtgaaccctagtaggaattgtcccaggtcatccaattccagaaaactgaagtgctctccagggtttgacaaacttgagaaatgagtcttcttgttttatatccgtgcttctctaactttaatgtgcattgaaattacttgggatcttttcagaaatgcagattctggttcagtaggtatgagatggggcttgagagtctgagtttctaaaaagctccttgcttctaataagctctaataagttgattagaaaataaacttaataattcctaataagctctaataaacatctagtcaggtggtgttgaytagtatctacaaaccaccacattttgaacaccaaggtgagtgctagttaccacaaagcttcctcctggccattgcattaagatagtggatttttaaatctacaaatgaattcatttgtgccttggatcaaaatcaagggctctttctggtcagcaaacttcttgcaagtttggatctatgagcacaagatgggtgcctgggcagtgctgggatgggaacctgagacacctgagaccctgagacatcaaaaccactcagaagtgtgcaaagtgaaggtaagagagagggagacgtgaggacagacttcctccatgcaaaccaagagagatttaaaaattcagaatggatagcaacattgcacgcatttgcttattatggttttacattgtattccacttacagcattaaaaaggcttgagatggcttaaaaaataaactacatgaccaatgcaactagtaagaacagaaattctagaaagacaggcagaaaccctgaagattaagatcacgaaactcctggagaatctgattagagcttatgaattcttgctccacaaaaatgaatatattcatatacacaacaatttgcatatcatttcagtgggtgtgtgattcccctgaagcctattcaaaagtccgggttaagagcacccgatacagagaataaagagagaaaattatgccagtgccctggctgaagatgacaactgtatttggacactcaaattggctctgagatgactcatggcagccaaggggaaagggggggacaagatgaatgggaggactcttggtgtctgatagtagaaggaagaacatcaatcagtctttcaggagagggaactattttcttaaccccaatcctcagtatattgtcaagacaggccactagacagagggcatagtrgttaaggcggactccggatcagtctgcacaaggccagggaacctaggagcaatgaagggcagactcaaatccttcattagtcctttggggggccttaaatagcaattgacacataatgaaacacaatctatcttcctgattcacacacacacacacacacacacacacacacacacacacacacacacagactctggagaccaccttgctggattcaaatccaaggtctactagttactggctctgtaatctcaggtaacttttaacatttctttctttcttttttttttgagacagagtctcgctctgtcacccaggctggagggcagtggggcgatctcagctcactgcaacctccgcctcccaggttcaagcaattctcctatctcagcctcccgagtagctgggactacaggtgcacaccaccacacctggcaaatttttgtattttttagtagagatggggtttcgccatgttggtcaggctggtctcgaactcctgacctcaggtgatccacccacctcggcctcccacagtgctggaattacaggtgcgagccaccgtacccagccaacttttaacatttctgtgcctggtgtccccatctataaactggggttgttgtggggatgaaattagttcttatatgtaaaatgcttaagacgtgcctgggatattatgtaagcgtgagctgttatattatgggaaggtggcagcatggagtactggtaatgagtactgatggcctgcctggatgtaaatcctggctctaccacttattagctttgtgaccttggtcagtgtacttactgggttaaacagggtcccccccaaaagtcatgcccacctagcaccccagaatgtgacctttctctggaaatatggtctttacaaatgtaattaatgaagttaaaatgaggtcacactggattagggtacgtcctaactaccctatgactggtgtcttaagaagaagagtggacacacgcccttaaaaaggcttgagatggcttaaaataaacctatataggcagcataactagtaagaacagatgatgatagagtcagagattggagtgatgtggctgcaaaccaaggactgtcagggatggccagcagacaccagaaggtaggaatgaggcatggaacagattccccgtcaaagcctccagatggaatcaaccctgctgacacctcrattttggacttctggtcctctgaactgagacagagtaaatctctgttgttttaagccatccagtttgtggtcatttattatggcagccctataaatctaacatagtctgcacttcttcatctgtaaaatggggataataaaagtatctgcttcacaattattaagactgcaagaaataatccatgtaaagagcttagcattgtgcctggtatgcagtaagaacaaaacaaagcttctattataaggtacagtgacaagtggccaacagtagcctcaaggatggtgttaatagtagtctgttgtatgtctctaatttatttactcaatgtcttattgaatttttatgccgttttgggggttttgggtttttcttcgctaatagaggtttttttttttgttttttttttttttttagacaaggtctcactctttcacccaggctggagtgcagtggctcactgcaacctccaccttctgggctcaagtggtcctcccccaaaccccagaagctgggaccacaggtgcatgccaccatgcccagctaattttttgtatttttaggcgagacggggtttcaccatgttgcccaggctggtcttgaactgaaaaagggtataccaatgtaacttctcttctgtgtgaggacactggtctccccacatcttgtcaacactgggaattctcagacttttaaatctctgtcaatctgatagaactgatatctccttccacaatttgcttttttataattataagtgagttttgttattatttatatgtgtattagccattagtatttccttttgtgtgaactgtctattcctctcctctttccacattttctggcctgttctgtttttttattggaggaactctttgtctattaaacaaatcagccttttgtttaatatgaagcaaatatattttcccccarcttgcygtttgctttttggtattgttcgtattaattttcatattggttttttggaaaatacaaaaacatgtttcataaagctctatcttacattaacacctgctatgaggctatgtgatgaagttcatgtttgtaaaatggagaatgaggataggaatgaattccacaagctttcctacaagttagcttttttttttttgacactgagtctcactctgttgcccaggcaagagtacagtgacacagtctcggctcactgcaacctccactgcccaggttcaagcgattcttttgcctcatcctcccgagtagctggaattacaggtgcccaccaccacgcctggctaatttttgtatttttagtagagatggggtttcaccatgttggccaggctggtctcgaactcctgacctcaggggatccacccacgtcagcctcccaaagtgctgggattacaggcctgagccaccacacccggtctacaggttagcttttattctacaagtgcttttgacttacggctatcaaagctaataataatgctaggcatttattcattcattcattcattcaacgaatatgtcttcagcactggacaggtgcagggctttgtgaaggaccatgggagacagagatgtttgtcctcaggtagcttttagtcttgtgggaataggggtgcctgaagataatgcaataactcccaaagaactctgatggcctctcttgtttgtactacaatcgttagcttcctagaactctcttctgctggtgtggagggaaatgaaatggaaggggcagagcgtggggagagctaagtgtggcctgaaccagaaaagttgcagagacataggaggagtggagtgcagcatggtttgagggcaggtgggcaggccagctgagacagggagatgtcttcagactcttttcctggaaccctgttgcttacagatgattgctgtggtgactcagacaccatgatgaccccaagagatgcaaaatgaaaacatgcacccgcgcgcgcacacacacacacagacacacacacacacagacacacacacacacacacasmggcttttccaatttaaaccacttgacaactttgacgtttagagcatcgagcatggctcattgtgttctgggatgaagctcatagcaactgcagaaagtgatggagtcaaacactatgtttagtgtgtttgtttttttagaaggtactttcccatatgactaagagaatgaaatcagccagtgaaaataactgcaaatgagccagaaaacaagtctgttaacaatagctggtctctaagtccccatcctcctccattcaggggctccacgcacatctgtcataatagaactaggccttaaagggccttaaatcctgtattgtcaactccccaataaccaccatcaatcaagacatcaaccctctctggaagacctcatctagggctctgccatcgctgctcacagcctatagagacaggtgctcactacttcccggcttagcccagtgtacccctgggcagtttttgtttgtttgcttgtttgtttgtttgttttttgtgtctcattctgtcacccaggctggagtacagtggtgcaaacaggactcactgcagcttcttcctcctgggctaaagcaatcctcccacttcagcctcctgagtagctgggactacaggagtgcgccatcacacctagctaatttttaaattgtttgtagagacaaggtctcaccgtgttgcccaggctggtttcaaactcctggcctcaagcgatccgcctgcctctgcctcccaaagtgctggggattaccggtgtgagtcactgtgcccagctggccctcgggcagtttttattgttagaaagttccttgtgctgatcagaaatctacttcctggtaatttcaataaatctatgtcttctgccctctggggagccacagacctcttctgttccctcttccccaggtgagcccagtagaggtttggagagtgtgaccatgttcctcctggtccttcaactgttcttcatatgacaccttgtttaccttctctggactcagcaccactcaaaagagaaggcctaattcacagcagaggtcatccccatgtccagaaggcatatgaaatgtgctcagcatcattagtcgtcagggaaatgcacaatgagttcccactacctgcccaccagaatggctaacaggaaggtgctgacagtaccaagtgttgacaaggatgtggagcagctggaactatcatacattgttggtagaaatgtaaaattgtaaaattactttggaaaactgacaatatctactgaaactaaacatatgcccactctatgacctagcaattccactcctgggtacacacccaaaagaaggaagtgcttatttctaccaaaagacatattcatagcactgtttataattaccaaatactggaaataacctaaatgaccattaaaagtagagtaaataaataaattatggtatatttcagataatggaatactacacatcaatgagaaagaacaaactgttactacacacagtagcacaggtgaatctcacagatacaatgttgaatgaaagaaaccagatgcaaaaaaaaaaaaccccaaaaaacacatccactatatgtttccatacaatgttcaaaaagccaaaactaatctacagtcttaaaggtcagaatagtactataaatatattattttatatatattataaatagttacttttgagggagattgaccaggagggaatttaaggaagttttcttgggggctggaaatgtttagtatcttcatttgaatgtctacataggtatataaatgtgggaaaattacatgagttgtatacttaagccttgcacacttgactgtatatagccagtgtcttgtttaaaaaagataattaccacccaccccccacaaaagagtgtggcccagagttgagctccagcataaaaccaagcaagactgtcattgcccttactttggcactacacttttattacagcagctaaggtctcaccatggctttggggatgagcaccttgaactgttgatttatgctgggtctacagtcacyggagagccccacatctttctcatggctgctcagccacgtccactcatccggtgcttgcargctgcaggctgggcctgaaggaaggtgaaggaaaccggttatcgagctgtatcatcccttctctcatgtcccctttacagtaccccttgggagaacattcagtccgtgtcctgctctcactttgcagaagaaaccccgaatctcagaggcacaaagtggtatgcctgaggctgcccagtcagctagagccaggggtagggatttcagcccaggtttgcatgacccctagttcaagctctcatctttaaccaggctgacccaagatggggcctcacctgtaaaggaaactaagggcccagggcatctgttctgctccaggggtggtggatgaagagaggacgggtgtgacattatcccaggatctctgtgtgagtcttatctccccatgttaattataagcgcctgagagctaggacttcttattaatttctgtctctcccaaaaagacccagcatgccctccccatagtgggtacccagtaaatactcacccagtgaattaggttgtagaaactgagatccagagaagtacagcagtttgctcaaggtcatatggcaggtcctcaactaaagtcaggacttgtaaccaggccccctgacttctatggcaatgctccttctgccattgcacagtggccctagtgtcctcgagaccccgggactagaaatttcaatggattggaagacactagggaggaaaaggacattcacatgtaagccaaggctgagtctggccctggggccttcagagcgtgtgccctggggctaaggctggaaacaggttgtacacctgtgcaggtgcacagagccctgctttcagagggacgctgtgcttggtggaatgttctgcagtcactgtcttaaatttttttttttttgagatagagtctcactctgttgtccaggctggagcacagcagcacgatcttggctcacagcaacctctgtctcccaggttcaagtgattctcctgcctcagcctcccgagtagcttggattacaggtgcccgccaccacacctggctaatgttttttttttgggggtgggggggttgtgttttcttttttttctttttctttttttttttttgtatttttagtagagacagggtttcaccatgttggccaggctagtcttgaactcttgacctcaagtgatccgtccgccttggcctcctaaagtgttgggattacaggcgtgaaccaccgcacctggccgaaattcttaataattttatctttgaatttatatttttaagtgaagtttcaatgaagtatgtgccagggctcagaatctcagcttgcatgaggtcccacctcttgttgcctcactgcttcctggggatgggttcttggactagagctccctcgcccctggcaccctctggttccattcagcctcccacttcccactcctgctgggctgccagtgaggccgcctggtgtattcagctggaaactctgcagggcaagcctttcatccactgctcttacaggtacctaatgtcctggcacaggggttgtaataccgttgggaattgcccatgatattgcagtcgctgtgccaggacattaggtaatctgaattagaagtggacgaaaggattgtgttgcggcagcggccaggaccaggccactcactacctggatcggggcagacaagaagattgtgttgggccagtgaaccgtgggaaggggaaatgcctggcatgacttcctggccctgccctagggcaggatgtgtcggtcctgggtgtgataagagaaagaaattggcagccagtgggcttcttgtgcagyacacggacacctatgtggatcacggtattaataataaataaaaaacaccatgacagtctgggcatggtggttcacacctgtaatcccagcactttgggaggctgaggcaagaggattgactgagtccaggagtttgaaaccagcctggtcaacatagtgagaccctgtctctaccaaaagtttgtaaactaaaacaaaaatgaaaaaaaaaaaaaaacaaaccaccatgccagatcaagagagagaccatgggagaaaygaagagctttatattttgatactttgttttgtttttgttttgagacagggtctcaatctgttatccaggctggagtgcaatggcatgatcttggctcactgcaactcctgcctcccaggctcaagcaatcctcccacctcagcctcccaagtagctgggactacaggcacacaccaccatgcctagctaatttttctatcttttgtagagacagggttttgccatgttgcccaggctgttctcgaactcctgagctcaagcaatccatccacctcagcctcccaaaatgctgggattacaggcatgagccaccacgctcagcctattttggtacctttaatggcacttttgtcttgccttttgagcaaagggtcccactgttttactttgcactgaacccagcaaattacgtagccagtcctgcctgggtgcatctttcagcaaggcagagtgagaagcctcagctattttacacaggggatccttaggggaagcaggatggtttggaatcaagacattggtgactgagagagctcagccctctcagttcagctctctccctctccctgtttctcctcggctctcttctatctggaacccatcacaggtgacaacacgcccccggggacatgaaactgcaagcataaaagtagttatatttttatgcgctgcaaaggtctctgcacatcggaggagtggttattggcataattattgcaccaccttttatgaccctgatctcagccttaaaaactaaggaagctaagccccctcaaacttccattactttttgtctactccttccacaccttaccctacccctgcccacccaatcgattgctggttgactttcttcccctgccggtcactggcctgagataggattcagttttccaccctcgcccaggggtctgtatccctgactgacaattcagttcaatctgcagtaacttcaccttcactctgagccaggcaggggctgggcgctgagatgtgcagatgtcagatgtgatcttgcccggctcaatctgggaacacagagagatgtggggagtcccagtctcctccgctaggcaggggcagcgctgcttctttagagcttcctacagaggtgtgggagcagaggggggcattatcccaaccaggggtgccgggagcctgtgtggtgaggtgcgctttaaagacatgctctctatccatccatgggaagcagttggarcttgggaagcagttggagcttaggagttggagcttgggaagcagttggagttttcagcttgggagtagcatgaggactgattttcaccaagatcatttggaggctgagttgagtgaggataggaaggagggagaactgaggcaggggactagtttggagaccactgtactcactgagatcataagaggcagtgccgtgagaagggagaggagggacagatccaaggatgttaaagagacaggattccagtcacaaagagacaacacagcatgactccagtcatcggtggcccccggagtagtccaattcgcatagacagaaaggagaatgtggttgccaggggctgggggaggagagaaaggggagttagtgtttaatagggacagagtttttagtctgagaaaatgaaaaagttctggagagggatagtagtgacggttgcacaacaacaggaatgtacttaatgccgcagaactgtgcaactaaaaatggttaaaatggcaaattttatgttttgtgtattttaccacaatttgaaaagcaactataacaacaaaaagatagtgggcctgtgggggtggggaggagaggccagacatggtggctcacacgtataatcccagcactttgggaggctgaagcgggaggattgcttgaggccaggggttcaaggccagcctgggcaacatagcaagacctcatctctacaaaaaaatttttttaaatgagctgggcatggtgatgcacccctgtagtcccagctactcgagaggctgaggagggaggattgcttgagcctgggagctggaggctgcaatgagctatgattatatcactacactccagcgtgggtgatggrgraaaaaaaaaaaagtttaaaataagagaaagagctttgtcaggctcaggctggccctgagctggagagtgggctgggaagtctatgctgaccccaagggtctggcctgggtgactgacaggcagaagaggagctgcaaaccaggccaggggagggtggtggtgccaaagccggacacgcatgctgggttgggcatgtggggcctgaggactccagggggaggtacccagaagggagcaggggctcaggaaggggcctgggctggatagacaccatctgagtgtcctcagcttatcacaggtagcaggccccacacgggagaagatgagaaccagccagggagaacgtgagaagagggcagagcccagagaaacaggtgggccaagaataatgcrtcatcaaggagacctgggaggattcagaaaggaagcagggaaaccaggagagcttcgctgcaaggagtgggagctcattaaggtcccttaggacagcgagtgggcgtggccagatgggtgggcctggacaggctcatgggaggacagggggctcgtgggaaacaggctgagccgtaccatccaggcttgagggaggggggcctgggcattgttgggtcttgtgtgctctgtctctcatgggcagcacaagctgtccctcaggactccactcccttgcccattctcatcccccatcgcctcagcttccacacgtccgcgatgggccccccagcttctcttcaccacagctgccccaacacctgccccatcttctcctcctgtcccagttccatgttattatgggttggattgtgtccccaaaaaagctgcacctgtgaatgtgacctgtgaatgtgataaggtccttagggaagccctaatgcaatatgactgctgtcctcagaaaaaggggaaatttggatccagacatgtgcagagggtagacactgcgaagaaaaaaacagggaaaggagcctctgccggccaaggaacacctgaggccaacagagcagctgggaacagattcgtcctcagagcgagccagccctgctgacccttgatttctgacttctgcctccagaactgagagccaacacacttctgttgtttctgtcacttggtttgtggggctttgacgggggcatccccaggaaacaaatacaaatgctaagaaatgaaygagctaagaactcctcttttacccaactcctctttttggttttttctttgtcttgggccaccttgggaccttgtcactggccttccaatcaattggctacccttgagccaggcacccctctgcccagtcatctgagagtggaggggtgacccgtgatatgaagcatggctgccctgagaggtgccccttaaagggtgcaggggagtagcggggagacagctctctcaggagggacaggggacattgcaggtgctcttgcatccctgcagccgagggaagagagattccagagagggaggtagatggcattgtcttgggatacagaatttagtgtagagggaacctgacataaaatccctttggccaaagtgtcttccggaagacagggacaaatccacaaatatctggggcataaaggatggactttctaagtcaaccttgccttcccatcctcaagatgttcactgtggctgaaataacaagtcagtataactggaaaatatttatttgaacttgtgactcagctcttcctgagctcaaggaagtgcagtccataaatcaagatgatgccgcgtaagtgcctcctctggagtgttcccacattggcgggcaatgctggagaagccattagcagaagtgactggaccggctgcccgtgaaagatttaaaagagccttgtgtactccaggagctgctccttctcagagctttcatttctgaggctttcctgatggatggcctcagcctttgactccctcattttcactgtccaacctgccgagtgctacttcctggcacagcttgtaaattctattttttcatatttaacggaggcttaaggcttctgccacagagaagcggggtggccggatatgctgtaagtgtaaaatagacaccagatttggaagacttgagtttgcgaaggtgttttaaatatatttacctgtccttttattgctctcaccaactcttgctcagggtcaccaggagctgctgcaggtgggccatgctgggagccccagyggcttcatcacccccttcctgcccatcyctcccctctcagactttcagtccctccagatctggtccaatcttgccgtggtaaagatgggaaaacagagcatctgagaagataagggatttgcccaggattccaagtaccctagaccaggacccagaggtgctcattccccattcctcaggtgacaccactgggccaggcacagggcaaggcactgggaacacgaagacacatagaacacgggtcctctcctgagggacctcggagcctgacgacagcatggctcggggaaaggaggtagagactccagcagcgacagcctcataataatggctaatatctgtgaagccagttgactgcaccagtcaaccccaggctacagcctcatctgcttgctaccccatgatcctcacaataccttacgggggcgagtacggttagcctctcactatgcagaccaagaaacccagtccagggattttccactttttatttgagccacrgaatcctttcttcaagtgaaattttatatggaacccaaataaatacatcaggtaaaatcaggagtgagtccccctcacttatccctaaccctttgcagggccctggaggcactttctcagagcctgagatctcctgttggcatagtttaaaaaccagccaggtcagtcaatgctttcatttttcagaggagggaaggaacttagcaagggtcacccagggaattactgtcacaattaacactccaaccacaagtcctatgaagctcaggcctgtgctccatccctgacacctcttctcttaggaaacagaggccttttattagcagctataaaatacaatctcttctaagccatattttaagaccgagtttgcagtgggctctctgaacacactgttttcgcctccctcccaccctgtgtcttccctacctccagttctcccatttcctccaccacaggagaatactgcttcgtagcaaccgtccttgtgagccaagtcgatgagtgtggcttgaaactgacagcttcatagtttaccttagagtttttggttcttctcagtttatttcatgttgtgcctcatcactccataatattcacaggactcttgacgttagaaagggctttttaaatccagtgaaataggattttagaaatcaatagcaccttggggtgtgtatgtggtgcattaactttcctgggtgcagtaagaggagacttctttaggaaatttcatgatttgcccccctcagggtggcatctctaggggaggcctagtgccccaccacatatccctccttcagcagtcctcatagttgccacctcctttcctttctggctcttttcccagccccttttccccaagctggctttgataaaggatttctttctcccctgctccctcggcctggctggtccattctccagggtctgtccatgactctttttctaaggcttttactataaagcatctagaaaataaggcagctggaagaggtaacaagtatgagacactcccagggttcccaacctgtctgatgttccccagaagtgtttcccagctggtcctgtccttgtgtcccttcttgtgtggttctgatgtgacccagaggtgaggcaaaaagcgtgttttccaaacttggttttgtgagattccatttccgggtgcagtttctcagagacgtgcttttatgataaaaaagactgggggaattctgcttgcaacctattcctcttggagactccattgtatacccacataccaacatttttgaagaagtcctgcagtccagagtcctagggaacttcatataacccaaaacccgtttgagcaccaaaagcttgtgtttgcagcctctctaagagatgctagttttaaggcagttctggacatctctgtgagttggttctggaagactccaagcccttcactggagtccctcttggccccagcacagagatcatggatcctctccccatcctggcttcacttaggaaaagccaaattaggctgttttctgagggccttcaggaaggttttttcgtcgataccagagcactgtcagctgtgctttctttggaagtaatagaaatggatcaagtgatggggggccatttatggtctgagcattgcattcttggggcctggtcaaagaggacgttaggccaagctgagccattctgagagaaaaggatggcactgaggtttctgtatttgggaagcaagtccttcttatcaagccagctgtcatatacttggatttctcctgcaaataggccgacacatgcacaggcttacactgataaaatgtgctctctgctttctgagacagagactttttctgttagcttagtgaactttggttttcatttgttttagatgcctttaattatttttcattaacaactattcccaggttttggatcgattggttgactgtcctttcctagttttcatttttctctactttagaaaattccatcatcatttcacagatgagccacgggtgggttggttggttggcttgcatggaggtctaaatacgtacgttgctgtgaagaaggtcatatctgttacataagtttgcctgggctgctggaacacagttccacacacagcgtggcttaaataacagaaacgtactgtcacacagtgttggaggctagaagtctgagatcaaggtgtcggcagtgtgggttccttctggggctgccttctggtggcttgctctcaatctttggcattccttggcttgtagtagcatcaccccaatctctgccttcattgtcacatgatattctcttagtgtgctatatctgtgtccaaatttcccgtttataaggatcccaggtaaaatatattggattaggggcccactctatccagtaagaccttgactaaacttaactacttatatctgcaatgaccgtatttccaggtaaggtcacattctaacttgcaatgtgttgctaggttactgagatactgggggttagaacttcaacatatgaacttttatttgtattttatttatttatttacttttttgagactggatctcactccgtcacccaggctggaatgcagtggcgggaacatggctcactgcagcctcgacctcctgggctaaagcgatcctcccacctcagccttctgagtagctgggactataggtgctgcacgaccacacccagctaatttttgtattttttgtagaggcaggatctcactgtgttgcccaggctggtctcaaactcctgggctcaagcaatcctctcacctcagcctcccaaagtgctaagattacaagcatgagccactgcacccagccttatatatgagtttttaggagacacatataactcatcacactgattctatgcacagtactacatttagccaagctggaggacaatagcgctcgaggtcctgctgtccctcctagctcagcggaggcagtgtggtggagtagagagcaccctcggactgatgtcaggggtcctgagtcaagccctaggccatcccttagttttttcactaataaaaatgttttaattaaaagacctattagtatccaagaagatcttcaaggtataaaaaaggggaaaaaaaagtgtgtgtggagaggctcagatgagttaacaggtctgaaaatgtcatggttatgggaagtagcagagacagggtccaaacacacagggtccaaatgcgttgggtgtcatctgtgaaatgggaaatgaacagtaggcttctccagcaagagagagcagtctgggaagcagcagaggtgaaccctggtccccagggtcctgctggcaaaccaattcttccctctgaaccggctccctctggggggaaatgggggctctggactaggcagtcccctggccacgccattgggtgactccrcagagaaggtctgcagccagcagacctgagtttaaatgtggatctgctgcttcctagtagtgtcgtttgggtaagtcacttaatctctctaagtccttctctataaaatggggataatggtaatacctacctcacaggttaaatgagaaagtccttgtgaagtactgaacacacagcttgatatgcagtagtaaaagttagctatttctatgaactactttttgtaaggattgaatgagatggtgtaggtgaggggcctgtatgcagtaggtgcttaattaaccaccgatactcccctgccccttttaaactcagttttggcagagtttccagcattcatgattccctctggggtgtagggtgaagggtggagagttacacagaaaagtatttgaactccttaaagaataacattgttttcaggcactcataagccatttacaattgcccatttacttgtaattaatgtccatgccaattctaaccaattacaattcattaacttacatgctctcaggactttaccttgcacagttttattagagaattagccaaacttagtgtagtattccaccatagtaatgattatcctggcaattcataaaatgtacccaggccgctgtgtgaacgatgagcctccatttgctctgagagagcaaatctgagacgggtctttctaaggttcttgtctttctggtaggtattactmagcacagaaattcaggagacacagacaagttcttccacgatgtcgtacagacgagaactagagaaataccgtgacctggatgaagatgaaatccttggagccctaacagaggaagagctgaggaccctggaaaatgagctggatgagctggaccctgatgtgagtaggtgctaaagggaagcacattgtcactagcgaggggacctggggagggacaggtggatgcttcctaaagccaccacttcctttttccttccatggcaatgacattggtataactttgcctttgcagatttttcttttaatgtgttgtattagggttctccagagaaagagagaaccaatagggtgtgtgtgtgtgtgtgtgtgtgtgtgtgtgtgtgtgtgtgtgtgtgttgagacagagagagaaggggagagagagatttgttataaggctttagcttgcaaggctatagagaccagcaagatctgcagttgctaaggtggagacccaggagagccaatggcacagttccaatacaaatacaaataaccagcaggccgaagacccaggaagagttgggtctgggaaaagatgttttagtttgaatccgaaggcagaaaaaagccaatgtcccagctcaaggcagtcaggcaggaggaaattcccgyttacttggaggagggtcagctttttttccctactcaggtcttcaactgattggatgcccaccccccaccgccatatcgggggaataatctgtgttactcagtctactgattcaaatattggtctcatccagaaacaccctcacagacacacccagaaaaatgtttgaccaaatgtctgagcatcccatggccaagtcaagttgacacccaaaattaaccatcacagtctaccccttgtcaacttggcacacatatacatctctttaaaccatacttaatttccaaataaagacagtaacgatgtcataattctgcctaacatgatacaactatcctgggtacaatggaaaacacactatcaccttccccagaagaggaggtaaagtccatgagtgatgtttattcttctccttgctgtcctgtaacttaaatattataatgtaaaattaatgatacttaaatcctattatacaaagccaatacaccaataacagtaaagtcggtatcaaacaatcttgtgttacatgataagggaataagagagggaaaaagcaaagatatttgctacacacacacacacaatacaagtgttcataaaataaggaggaagtactcatgacaattacagtcttcatttctgtaactactcagatagttgtagctggtatttataactaccctgtttcattccccattctttgcctttagcaagcacctcagctggttgtggttctttacccgatggggtgacctaagctttcatttctgaaaggcctaggccattagtagtcctgcctggattagtttgttgtagttttccattgaccctaatcacagggcatggtaatactaaaaaacgccctaagggctctcctgtatccagacatactttcttacctcccttgtgcaatagctatccaatttctccttggtagtcagcatctgtcaccccagccagcccagtaactcccttctttgctcattgattcagagtcatgaggagcccaaagtggcctggtggcagttttaacttccattttaatggaattgttgtgtctcctagtggaactttggtcctttgaaactaagacttctaggccagcagaccacagggtcatgggaacaatgaacaaaagttttgctagtgcatcactaggagwaatggtgagtggtgccactcctatttccaatcttgattccctgacccatgaatcctagctatgggagaaatggcatccgcaattgcccactgattcagagcatatacagccttctggagaatgttgccccggcctgtaaggtgtggccacctagctggcactgtaactgagtcttcaaaaggccgttaccccgttatatcgagccagcagcttcaggatggtggagaacatgtgtcatggaatgaatgagctgagaaataaaggaccagaataattcttctcatttaatgtttgatgttttatcattgcatttcatagttggcacatttagaagtgtgtttaatactcagaattcatccctgcagtcagggtacacagtgtcaagagtcaaaagtctctttggttgtgtatgtggtttagcaagtcacactagaactgtgagcatgggcatagaggggttcgtaggtggcctcctagacaagggtcttcatcctacagctatatcccaggcacccaggtcaataaccagcacagagaaggtagataatcaaagttactgaactgagtaaatgttccatgttatatatttttaattaaaaatggaatgtatcacaccctttttttaaaccagccattgctcaactctggtttaatagtgatccataaagaaaacaacacttcaatctcactcacccagagatggtcactgctaacatcccgggagcacagtttgatgaaaaaatgcaggactagaagttaggtgtttcgcttccaatcccaaccctgtctcttccactccatgtgaccttggaccaagctrccatccttcctagacctcaatgtccccagccatggaatagcagagttggttggtcattttcagggttaagctaacctgacttataatctggtcttatacccaggtgtgattaagtggcttcattccagataactcagaatccttgcctagggctcttgggtcccaggccccatagaattacacatctctccaacagtgtgtcctcctcttcctgatattcacgatcttcccctgcctgccaggagaagatggtttcctgatgaggctgctcaagttgatcaaaagtcggcattggtggaaagagccttgcatttctctttcttcccccgcatcatctctccccattagcctgtgtttcagtaaaaacaagccatgtaggcaagaaaaaaatcaagctgcaaaattattctgttctaattctatcctagatcactgtcacacagaattccaagaacaaacaactttataaagggagaacaaaagaggcatgtagccacttccagttaactcaataaatgtgactcggttacctgccgagcactgtgctgggyaccaacagggcagcctggctgggactctgcctttcaggagcacaggctggtggggacacaggcataatacactgagcttgacacagagcagacaggaagctgtgccaggagattaactcttactggtgcaaggcatcacagagcaggtgatacyggaactgagctctggatttttttaattccatgccgagtgagggcctttgagaaaggccgcaaggagagtgttgtgtagggaaggaattggggatgggaatcttagtgtggtttctgtggagggtcagatgcgactagaaagaggggttgggatagataacgcgggggaagagggggcggcaaggccgactgacgggtttagactttgctcagtgggttcagggagcccttgagggtcagagactcagaggggttttgggagctgatgctggggacacatggactggaggggtgtcagggagatgggtgagaggtgggaggcgctcccgcgggggaatctctgccattcccagggagaagtgcacctgagggccctgcaggccttttgggctgtttgagttgccctgagatgctgcatggggatgaggttaggtcaggctgtgaccgcaaataaggcaggtgatgacaagggtcagagccaagcgacagacctgggagtggagggggacagatggaggaggcctcgcagaacccaaaatacatccaccagcaactgcattctgtttcacccccaaactggcaaagagctcccgcaggtctgccacccgacatatcagagcatccagcctcagcagcaaatacccagggccctgcagctctcacacagccagctttcccgcccaggtgattagcagggaagggacactccacttgtgctactggagggacagagcacctggggctcaacttgctgacggtcgcaggacccaggcaggcacggagactcggatttcaaacaggctccagagtgtgtgcacctcccactctggcaggagaaaagtaattgagcacaggggtgtgggagcaggcatgggccatctgagacctgagattctcagaccactgtggtttcccagttggcattttcaaagacccctttctctctcagttcaaagaaaagagaagagaaaccacagagaggataggagataatggaggccagtgagtttctgtcccagccacacaattgatcccttcattaagatcagctctgttacctgatttgcaagacagtatgtgagcttcgaaaaggcctggagggcctcccttcttttggagagcacaaacattccagttctagtttcaccctcccttggcccatgctctgaaatcacagcacagggagaggccaaagatatgcagacaatgagagactcctagccagccagcaggtgtctgcccctcccacggcttcagagcaggagcagagcccagagaggggaaagaacttggtctaggtcacacatccaagcagaaccagatcagaaccctggtgccttggcacctaggccactgccctctctgttatagtccatattcctcctgtttttgtttaatgagtgcttagatggcactcactatgtgcaggtgctgttctaaggaatttgaaaatattaacttatttgaccatcatgatgatcctaggaggcaggcgctgttatcatccccattttacagatgaggaaactgagaggtgaagtaacttgtccaaagtcccacaactaggcgatggcagagccactgcgtgtgggtctggagtccacgacgtagccatgccactccaaggcctcatgggagtgttcagggagagagtttagactgcagatgtgctctggttttgtggttgggggtcgctgtaggaaaataatccctcttttttctgggaaagagcctgaggtgcagaagtccaggttccagtcctggctctgctctggacttgggtacgtgattttccttctttggatctcaattttcctgtctgtaaaatggatacagtcggcctagatggccttggaagccccctctagctctaaccacatatgatttctttgaaccattcctggctgtcttagtacctgaattcaacaaacacttcaaggggtgacgtttctggttatgcaattgttaagccccagtgtcatgtggcagaatggagtacgaggacttggaaagcagctctgtttgcagcagaggattccaaacttgtgcacgttaaaaaaaaaaaaaaagtccccaaaactttctatctctctctctggaaaaactcgagcttatcatgagattgttgcacttggactccctcgggaaaggaatgcttcatgtgctaaaagtatccgctgttgactgattccccagaggatctgccctttctcatctctctggagttaagtggatgctgctctgaagcagagccagctcctcagttcagattgcctttgtaccaggcagtgggggcaacacagagagaggttttgagaatgacaagtcatcgtgacttctgcagggagcagtgtacagttttcatatgagtaatagacgctcaatacttcctgggtgtgccataagcaaagccctacgtggattatctcatttagtcctctgggagggttcagtcattagccccattttaaagatggagaagccgaggcttagagatataaagtaacctgcccaggatgcaatctgagcggtgctgggattccaacctagacagtcttggcccagtaacctgtgctgttaaccctgggagcacctctgagactagcccagaaggaaactsagagagcagattggggaattatgcgtaaattcttatttccaacttgatttcttttgaagttgttatgttattttcacaataaatactaatctttcaagaaaagaagaatccaccaacacaaggaatttaactgtaaatattgattgttaatgaggatttggggaaaggcagaacattttttaaactgtctcagtaaaaggctcaaaatattcgcaggagagaagatggtagagataattcaaccttataaagaaattgggtcctaagagttgattttaaagtcagctgtcaggaatctgtgacacaatataaccatagaaacaataatggaaaacaacagaccctctgcaaagcctgaataataataacgatgattttctactgaggagttttttttttttttttgagacagagtctcgctctgtcgcccaggctggagtgcagtggcatgatctcggctccctgcaagctctgcctcccgggtccacgccattctccttcctcagcctcccgagtagctgggactacaggcgcccgccaccatgcctggctaattgtttttgtatttttagtagagacggggtttcaccgtgttagccaggatggtctcgatctcctgacctcatgatccacctgcctcagcctcccaaagtgctgggattacaggcgtgagccaccgggcccggcttttttttttttttttttttgagacagtttcactgttgttgcccagattggagtgcaacggcgtgatctcggctcattgtgacttccgcctcctaggttcaagtgattctcctgcctcagcctcccaagtagctggacttacaggcgcacatcaccatgcccggctaatttttgtatttttagtagagatggggtttcaccatgttggccaggctggtctcgaactcctgaccttaggtgatccacacccaccccccccaccaccccttggcctcccaaagtgctgggattacagatgtgatccactgcacctggcctctgctaaggtgttcttacatgccaggtgctatgctaagcattttatgggcatcatttcataaaatatttacaaggatcttacaagattgatcctcataggatgaggtttaatgtcattctgtagataaagaaataggttcccagaatcacacagctattaagtgatagaattcagacagaccctgctttccttagaccataatgtgtcaagagttctgagaacaggctgggtgtggtggctcatgcctataatctcagcagtttttggggccaaggcaggcggatcacttgaggtcaggagttcaaaaccagcctggccaacatagagaaaccctatctctacttaaaatacaaaaattagctaggcgtggtggtgcgcaactgtaatcccagctacttgggaggctgaggcaggagaattgttcggacctgggaggcggaggttgcagtgagccaagatcatgccactgcactccagcctgggtgacagagcaagactccatctcaaaaacagagttctgagaacaaagggccatgaattgcaggacgaaatatggaaaacagaattggagaatcccagagctccaaggacacttagaaatcatctaacagtaccccaccccaggcatctacatacgcggtaccggtagagaaagcctgattttggagtctgtcctggacacacttggtgttttatgtatttcatcaaatcctcatacccatcctgtgaggtgtcattattaccatttcactgatgagacatccaagcatcaacaaaaccctgaagtggaaagaggggtaaggactcattcaaggtcacacagcaagtcagcggccgagccaaggcgcccacctggtacttcctgtcactccacatggcttcccatcagacgatcataaaatcctccctacttgtgccccaaatcatatcctttaaggcaaagacactcttgccatccaggaagcagccaagtttggtccacagggccgtgattctcctttgtaacacaaaccggcagaatcgcaagcccaggacagaagtaaacagttgaaatggaaagaaataaatctctcctctaaaaataggcacacatccttagaaacactgctggctgtgcacagagccgaggatgggcctggtggggtgagggcaagtcaggccaggcatctgtgtgtccccaccctaccctctgccctctggacccatgaccacctctcccaacccctcctctggctggggaacctcctcgacctggaacccctcacttcctcacatttttcaaggcttgacctttcctcccctccctcgggaagccttttagactctttcaccttcacacccctagcacagcacctgctccaccctggcaacactgagctgtttcctatttgattttgacatgttgaataggaaacattttaaacacataggagagtacagtatatacctattttctcatcatctgaatttagcaaatgttaaaattttgccttatttggttctgatcattcttaaaaaaaaaaaagaaatcactacagataaaatttaaaccctgcctttctgtctccctttctattcatcatctctgccactctactgagcgctttctattgggaggcagcaaaccaagtatccacaacatcatgtaagtgacctacatgaaggaaggaagatgggtcaattttcttgagccatgtggtcatcttggcttatctattactttctcactttataaaggtatgtgtatgtaagaaaatgttcacttaccatttacattttcagaactaaaagcaacagcaaaaccagtgctatgtagtaactgaccgtggcctctgtgtcagagaaaacagggagtggtggggactgaggcaaatgggagtttgtctaaagcgcccagcattttcagctccactaattgttgccggtatgagagtgcagacctggtattgccacgtcacctaatgtttccagagatgttggaaatctggatttttaaaaaatgtataagctccttattttaaaatgctgacagcttatttaaatgcacagaccaaacaaacccaaccaagtgttagcttttaattggcctgtaggcctctcagtttgcagctctggttctacctcctatggcaggtgtttgttttagcataaaaaatagacacatacacaaacatatacatgtgtgattagatgaaaagcacctagcccagtgcctggcacgtggtggtccttaataaatgtgagcctgagtatatgatttgtccactagaatctaagttttttgagactgggaaccatactgtatggccacagatacagtgcagccaggtatagttgtgcaagttggacactttctccaggagacactgttcacatagactagagagtgaataatgtccttggcttagtgcagtgcacaacctgcacaaccagatgtgactgccctgacagaccacctccataatgcagtgtctgttcagttgaatgaaagtgaatgatcatacccagtgatggtaaaactgaatagcaagaagctgcttccatatggagtttaaacctttattctgaggtttcaagataaaagggctctggaccctcattttacagatgggggatccaaaaccagagagcaccagtgccccgtctgtggcctcacagccctgggctgagaacccaggttatcaggtagggtgcagcttcgctacaagtaacagagactcagaataatgtgatttgtgcagtgttttatccatccctcaagtaaaagtccacaggtaggcaatctagggctgggatggagctcagctccccagacttctcagagtcctagaytttgtccagctcatctttctgccattcctaaggtgtagccctatagccataatagccacattccaggcatccaaatagagaaaaagggatggggagggggagggataaaagaaaggagaaaagccatgattcaagtcccttttaaggaaagttaccagaaattgccactggacatttctcatatcattgcctggaacttaattatatgactcaacctagctgcaagggagcctgtgaagtgtagcctttaatctgagcagscaagagctcaactaaaaagtggaggctttcttttattgctaaagaaggggaagcttgaatcggggacgatttggagtctgtcactgtgggttcactagtgtgatggcctgatgttctactctgctgaaagccctgagatggattgagaggagttggcaggactttaaccaaatccaggccctcaaagtaaacattataaaggtctcactctctagcttggcatttcccaaaacccacgacagtgaaccttggtctcatcctagacactccccaactctgacatctttcataatatgtccctctccccaaaacccaattggggacagcagctgggtggaaaagccaatggcttgggacagcaggtgcaacatgggcctgaagggagtccaagtcataccatcctgttcccagctggagcatcagtgttgtgtgactggacaactcagaccacattctcttagcactcatggcttggtgctggggattcagagaaaactaagatatatcccagctggcccttgaagggcacccagtatccttagggagagagatacagcatagatatgctccacagagtaagatgagcattattcaagaactggcaagatgcctaggggagtttggagcaagattcaccaggtcagtttggagaatcctgcaaaggctgaacagggtgcccaagggaagggctttgaaagatgaatgcaggggagctggagtgacagaattccaggtggaaggcacagccttgagcaaaggcatggcagtgggagagtgcagggcgtggctgtggaatatggagcagcctggagtggctagaacatgggctacttgatgaagggaagaggctcaggaggctggagaggtgggagtaggttggagtcaaatcatgaaaagctcttcatgcctggctgatgaattggtcaagaattcgtaggtcagggaagttggtgagcatctccgagtatgctggggagtgatgtggtcaggtacacatgtcagtggagtctaaggagcagaggtagagaggcctgaagcaggaaaccagccaggaggcttctctgctggtcccggcaagactcacaagggctggaacgagggtgatgcccacrgaaggagacatttcggaacactgcagcctcagaccctaatgcctcccctagcaggccatgccgccctcatctgctgggcctctgctgcactgtgctttctctytccctgcgatgcccctgcactccctctcttcacctggctggctcttccctggtccctcagactcagttcaggaccacctcctccaggaagcccagggctgagtaaggtgaccacaccactgagatgtgtatctcccctgtggctgtgagcccctctgggctgggatcgtaccgtcattgtctcaggatacccagtccccagcacaacaggaacatggaacattttccctgcacatgaggcaggaaaggaggatttggagaaagccagggagggaaggtttgtccccaccttgaataccagagagagactgtgctgctatgacaaataggtaccaccacaagcaattattgggtttcagctacaggagtgcctttggacgtcggcattaatgccctgtaaagttgactggggaaatggcagctattgagtttcaccagccctgcatcaaggtcagggcagctgagccaaaggcctagctctttgtggagagaaagcaaagagagggaggaagagtcccagagtgtgtatgttagggcagaggctgtgkstggagggggtggggctcttagaggtttggatcctgctggtccctttgtaacatcaagacgctgtgactgaggcaagagttggctcaccccgctgcccctgccacactctcaggctaaagtatgtgagaagagcgctccactgcatcatttccagtgggatctggaagctgctggacagtaatgcaaaggcagaactctgtatattgggatgggaccataagtgcctaagtttttcataaggagaaaccgacctggcagataactggaaaataaaatcctcaaggccagttaaaaacttttgttttccagtcaaatcccytgtaaaaggcaactaggggagttgctggcctgtgataggtttggcctggcctggcctggcctgatgtggaggcaggtgggcgtctagggcacacttaggttaaattgtttgaaatgggaggagggaagaggagtcagctggaagttcgaaaagtgaggccactttggtttcactcctaccccaggacaattactcaatgcccctggacctcggtttctccatgtgtaaactgagactcatttgataagcaggggagtctccactcccctgctttctaacacttgtggaggagacctggctctcacgtgcggccacatctggtttccaggatttgttcccagaggacggcagtcaggtgggatggaaaattttctgtgggatggaagtcaagagtcctgggctctcggtccagcgtatgacttcaggcgaggcccctcccttccccggcccttggcttcttccaatccctgataaagaggttttaccacctgtcctgtcctcttccaagaagctgtgtgtaattcagtcacagaataggaacctgggaccgccagagcccagacccaggggtcacgttttgcattcccttgttcttagatatagctgatgtatttgggaaaagtgataaaaattccttgtttttttgtcactgtgaggaaccaggttaaggggttttgcatggttttatgcatggtgagccaccagtctgaagatagttatatagatccttgaccatgctaatatatatacatgctaattatatacagtgtcatttttatgtaagctcaggcttcccagctatgaggctaacaagctatgtgactttgggccagtgacttcagttttctatgcctcagtttccccaatggaaaatgaaaaaaatcattggtctagaggatcttttagggctttatatttccgagctgccaggagtctatgatccttttaatgcattgtgtgtgttcatgcatgtgtgcgtgcatgcatgtgcacgtgtgtgcatgtctgcacatgtgtgcacatgtgtgatcgtgcgtgcctgtgtgtgcgggtatatgtacgtgtgtgtgcatgtgtgttgcctctgtgtgcacatctgaacaagcccacaaggttctaggcaggatggcttctcacgtagccctatctatagcaatgataactgtgcagatacttgatatttagctttactggcacctgtttgcagggtgttagagctcctaacagcacagttaaggatctgtccaagtttccattgtcctttgaacaactggactccagagtgtgggtgtgaaaattagactgtgatgttagcctgccaagctgcacatccgagttataattctacaacatttaaggtgaagccaccattttaaaaatcaggagttggcaactgcacacaggaaaagttgcctaatttccacctctatagtcattttcaagaacaaattaaactttgtattttcaaaatttaaaaaattctaaatttaaaacctatgtgtatacctcttgctttctctagcccaacacctgatatggtcaggatactcagtaaatatttgagaaataaatgaatgaatattttggctttcttacatggaatcttagtttgctaggaaccttagatcagatgtggcataatggcagtttatgggctgagtctgccttgcagatatgttttatttggcctgaacattgttattaaaatatttggactacgtgtcaatattttaaaatcaagaggtttcacacaaaactgagcagatctaataacaacatccacattcctacatgtcaacagtccgctggagctgggtagtgtggaggcatgaacgctctagtatgccccagtccccaccactcccacgtaactcacagctattatataattttagcctaagatcagagataatctagaatttcctcctccttaaaacctgcgctaaatttcctatcaggtaatgataaaaagatcatccaggtattagtcactgacctcctcagatgagcaaatttccaattgttaaataaggacataaagatatcctcagattcctatatacaaatctcacaacctgtctttggggtaaggatgtttgtgtgacaagtgcatgtgactttcagtgcctctcatgaattgacggctgctttggtggagtcagattgatgcttccctttgaactaactacaaaaaaaaaagcacttgcccagcaaatttatcctgtgcacattttaagattgagatttaaattccttataggttaaatgagttcaatttcccacaggcaccatgaaagtgtacctttaaatgtaatgtataggcttgttatagattcttctttgctattcagtaaagtagaccttcccctccatttaggatcttgattaccatgtgtttagtgaataactatgtgtaattaagatttttctctaggccaggtgcggtggctcatgcctgtaatcccagcactttgggaggccaaggtgggtggatcacgaggtcaggagtttgacaccagcctggccaacacagtgaaaccccatctctactaaaaatacaaaaaaaaaaaaaaattagccgggcatggtggcatgcacctgtaatcccagctactcaggaggctgaggcaggagaatcacttgaacctgggaggtggaggttgcagtgagctgagatagcaccactgyactccagcctggccagcacagccagactccatctcaaaaacaaaacaaaacaaaacaaaacaaacaaacaaacaaaacagatcaacaaagaaaaacttttctctaattttactctactttctccattcacctctcatctccctggttactccaatttttttaatttctctttgtgggatcatagccctacatgttawcacactacctggacacatagcattcatttagcagatgtttattgaatgaataagaaataagagaatgagaggtgcttttctatgcatacatgatcaccaaatactctcctggccagagccaacaacagaatggttgtgggaactcttttcctcacctattgagtagcccgggtgtgagagtcagtattaggttctaataatcatgagagctctatggcgatattttcaggttcatttaacttctccacaagtaatttacataataaggtaaatcacattgtaaaacaggcaccatttgaaatttggccagctctagcctggccagtctcagcatcaccgtgaaccactggcacatgaagagccctcttgcctcagcattccatgaccatttggtgcagttactgcattagccacttttatcattctcccatagatgaacatatgccatttaaaaaaaacagcttttttgagataccattcacatagcatacaatcatccacttaaagtgcaccattcagcccgggtgaggtggctcacgcctgtaatcccagcactttgggaggccgaggcgggcggatcacgaggtcaggagatcgagaccatcctggctaacatggtgaaaccccgtctttactaaaaatacaaaaaattagccgagcatggtggcaggcgcctgtagtcccagctactcaggaggctgaggcaggagaatggcgtgaacctggaggtggggagcggagcttgcagtgaaccgagatcatgccactgcactccagcctgggcaacagagtgagactctgtctcaaaaaaaaaaaaaaaaaaagaaaagaaaaaaagaaaaagaaaacaaaaatgcgccattcattggtttgttcttttagcatattcacagagtcgtataaccatcatgatcaattttagaacattttcatcacctcaaaaagaaacctcatgcccattagctgtcactctccatctcccttcaaccttcccagctgtattaacctgtttaggctgctctaacaaaataccacagactaggtggcttaaacaacagagacttatttttgcacaattccggaggcttagaagtcccagatcagggtcttgaggggttagtttctggtaaagactttcttgctggcttacagacaacagcttctctctgtgtgttctcacggtgactggttggggaaggaggtgttgcagcagctctctggtatctcttcttatagggacaccaatcctatcagatcagggttccacccttatgacctcatttgactttaatgatctccttacaggccctgtctccaattatagtcactctgggggtgagggcttcaacgtatgagttggaggcacacattccagtccataacaccagccctaggcaaccactaatctactttctgtctctacagatttgactgttctgtacgtttcatatattgtatggaattgtataatacatggccttttgtatctggcttcttacacttagtatgatgttttcaagggtcattcacgttgtagtactacgttttttttcacagctgataatattcaattgtatgggtataccacatttgtcttatccattcattagctggtgaacattagacttgttcgtacttttgttattatgaataatgctgttataaatgttcgtgtacaagcatttgggtggacatacatctgctgcatcatatggtaactttatgtttaactttttgagaaattgcacaactattttccaaaagggttgtatcattttacattcctaccagcagtgtatgagagttctagttgctctatattctcatcagtacttgttattatctgtgtttttttattattgccatcctgctggctgtgaaatggtatctcattctggatttgatttgcatttccctaatggataatagtattgagcattttttcatgagctttttggccatttttatataatctttggaaaaatgtctatccagatcacttgcccattttaaaaaatttatttatttttatttttatttttttgagatggagctctgtcacccaggctggagtgcattggcacaatctcagctcactgcaatctctgcctcctaagttcaaaggatcctcccaccttagcctcacgtgtagctgggactgcagatgtgcgccaccatgcccggctaatttttgtatttttagtagagacggggtttcgccatgttggccaggctggtctggaactcctgacctcaggtgatctgcctgcttcagcctcccaaaagtgctgagattacaggcatgggccactgtgcccagccacttgaccatttttattttttattttttattttttatttttttttttgagacagtctcactctgttgatcaggctggagtctagcggcgtgatctcagctcactgcaacctctgcctcctgagttcaaacaaatttcatgtctcagcctcctgagtagctgggattacaggcatgcaccaccacgcccggctaatttttgtatttttagtggagacagggtttcaccatgttggccaggctggtctcaaactcctgacctcaggtgacccacccaccttggcctcccaaagtgctgggattacaggtgtgagtcaccacgcctggcccatttttaaattgggttatttgtcatatattattgagttgtaagagatttttatgtattctagatatgaaactcttatgagatacatgatttacaaatatttcctcccaatctgtggtttgtcttctcactagtgtccttcgcagcacaaatgtttttaattttaatgaagtccaagtaatctacttttttattttgttgcttattgctttgatatcttatctaagaaaccattgcctaatccagaatcagaaggatttatgcctatgttttcttccaaatgttttatagtgtagttcttatatctaggtctttgattcactttgagtttttatatataatgggagatcacatgctgtttttgaaaacgagttaaagtggtaaacaatcaggagtttaaaaatatgcatctatctttggttttactgacaatcrtgtgatattttgttaaacataccatttaatagaaagaaaacaaactttaacctctaatgaggctgatattctcaatatttactttaaaaatgtgataagcttagagttattagaaaaggcctttgacatttttgtttttacaaatcaactgctttcaataaagacttgaataaatgaagccatatttttatgttatgtaaataatatttttgaaatacattaaaaaatctgtattatataacatgttataattatatggctttttgtttaatgcagtggctctcaatcaggggcaattttgcccctcaaaggaaatttggtggctgggcatggaggctaatgcctataattccagcactttgggaggccgaggctggtggatcacctgaggtcaggagttcaagaccagcctgaccaacatggtgaaaccccgcctctactagaaatacaaaaattagccgggcatggtggtgggcatctgtagtcccagctactggggaggctgagacagaattgcttgaacccgggaggcagaagttgcagtgagccgrgatcacgccactgcactccagcctgggcaacaaagtgagactccatctcaaaaaaaaaaaaaaaaaaggaagaaaataaaagaaatgtggcaatgtttggagacatttttggttgtcacaactgggggcagtgctactagcatctaggagatagagagcagaaaggctgctaaacaatctccagtgggtagagtggcctccacaacaaggaagtgtccagcccagaatgtcagttgtgctgaggttgagaaactctgctttaactaaatccgtgrcctctaccagatagattcgaaaagagatgagagtttgcaaacccttctcccctcagttacaacccctgaatttcttctatcgcaatacttagcctttctggggccagaacatgccccagcatcttactgccattaaaaccctttatggtaatgaaaatctgtaggccttccctgtggggatccttaagaagcatgagcacttgctttcactgcttaattcattttataattgtgtgttttagttttttgaatttatatttggataatacattccctgttaaacatacatatttgggtaaccaatctcctattaacatatattctacctgattatataacartagaagggatcataagtaataatttttgaccgtttactatgttaggcactgtgctgagcacattttctgcattatctagtttaattttctcaaccactctatgagagagcaactctcattattcacattttacagccatggaaactgaggcacaatgagatttaggggacttgcccaagattgtgtagttgtatcattattactccaagtcagggcttaagcctgatgtagggtcaactgtgaagtgcaggcatgtcacaaagactttggattattcattatgggtagtcacacattgatgtttgcagggcagtgaggtattgtctcactctcttgcatcaccataagctccctgctgtggaagagaaggcgtgggcacacacagctagctacaggaagtcccatcaaacctgggacatgcccacagaagcatggctcacctgggagcatcacctgtcctgcctatcatggtggacaatatctgagaactgctgcttaaggaaaagtgggatgtgtggagcatcacttatgttcctgatgccccccaccccaaagtcagtcaggccttkattttctacctactgtcctctcataaaaagctccaactcccagtgtctcttttgatctgtggcctaaatctctctgcaagtacaccagcaccacctgccaagcccattatctgtctgtccgggctctgtgctgggtgggccctgctcacttacagccctcccagaggcaggatcacaccccggtctcctgatcttacagccactactcttactgaaacagcactgtggtgttatgcatagtacaccttttaaaaaatgatgcattagttaggccagatgtggtggttcatgcctgtaatcccagggcttaggaaggccgaggtgggtggatcatgaggtcaggagttcaagaccagcctagccaatatggtgaaaccctgtctttactaaaaatacaaaaattagccaggtgtggtggcatgcgcctgtagtcccagctactcgggaggctgaggcagaagaattgcttgaaccygggaggcggaggttgcattgagccgagatcacaccactgcactccagccttggtgacagagaaagactctgtctcaaaaaaaaaaagtaaaaaaaattaaaaagattccttaaacagtagtattccctcccaagctgtatccctctatgtgccaggcatacagtgatcttcatatccctgataacagtcccctcacagaggcagctttcagaaaaggatatggagtttgtgacagtgactgaagatatgcattttaatggtacaaagattgaaaktggggctgggaacggtaatcccagcactttgggaggccaaggcaggcagatcacttgagtttgggagttcgagatcagcctggccaatatggtgaaacactgtctctattaaaaatacaaaaaattagccgggcgtggtgtcaggcacctgtaatcccagccactcaggaggctgaggcaggagaatcgcttgaacctgggaggcagaggttgcagtgagccgagattgcgccactgcattccagcctgggtgcaacagagcgagagtccatctcaaaaaaaaaaaaaaaaaggttggaggtggaatgactcttcagtttagtcagtttgagggtgcatatcttttgggtgatgttctgcccataccagccacccatgtattccyctagctctgcaaatgcagggaacagggagcacacaacgattagaaatggtcatcctcctctcgtaaatctgaagaagaacgctggtttttrttctagatctgtcctgaaattccttgggcaaatcwttccttgctctgtgcctcagttcccctaatgggagagtgtgtgcactgatgatctctaagcatccttgcagctataaacttctttgactccctaaggtactgggggctgagttaaagtgaagcccatgaggataactccaatccccccaataggaatctgctttagcagtaagcccacacctagaagcctgcttatgtttgaagaagagaagggaacaattggttgatgttatgtttcttgagatacccatctccaggggygacgttcaaaatatttaaccaccagtgtgttgtgagcacagacccgtcaggaggttagaaggcagcgggtagggccagcagggactgtggccagagagcatgccccgtcctcctcttagctctgcagggcactgctcacctcgctgctttcctgggcctttctccagctttttttttggtctgcctcttcctgcctgattctccatccagggccccagcttaacccycttttggcttcttctctctccggagccacctgatactcaactcaactcctgtgaatatctttatgcatccaaacaacaactcaatcatattcatcactcagcagatgctctttcagtgccctctgtgctcagactggagtcggctgccttgacccctcacctcctctccttcaaaaatgttagaggcagggatgggctggaggattgagacctgrgtcctagcctctctctgccccttgtctgcctttgaccttggacaagtccctccctgtcctggggtttcagattccttacttgtaaaacgaggaacaccatggattccatgagctctgaggtcccttctgttcgatgatgagtttctggagaagtgcaagtcttcagcagctgaccactctctctttctctctctctctttctctctctcctgcccccccacaacctccaatgtagaatgcactgctgcctgcaggcctgaggcagaaggatcagaccaccaaggcgcccacgggcccctttaaaagagaggagctcttggatcacttggaaaagcaagcaaaggagtttaaggaccgagaagatctggtcccctacacaggggaaaaacgaggtactgaacaatgttactgttataatatgccactccccatgcaccattgagtgccgactgtatgccaggccctgccaggccctgtgttgggccaaatgtgactgggcctccttgtcctcatccctgcctggccaaaacacccaaacccaacttcaaaagcatctatggatgatgtagatttcatgaagttttgggggtagactgaggaaagactcctatccactcaaatcagcaaaacttttccctaaaccctctttcactaggatgtcctgattatttttttacgcaaacctaaacagttttgagagtaaaagaagaaactgttaataacgacatcaggactttgggagaccgaggcaggcagaccacctgaggtcaggagttcaagaccagcctggccaacatggcaaaaccttgtttctactaaaaatacaraaattagccgagcatggtggcacgagcctgtagtcccagctactcaggaggctgaggcaggaraatcgcgtgaacccaggaggtggaggttgcagtgagccaagatcgcaccactgcactccagcctgggcaacagagtaagactcygtctccaaaaaaaaaaaaaaaaaaaaaaagacatcaggacatgaagcctaagcagggaccatcctatgcaaaccagggactagagatgcactaaccatctccacccagattctctctgctctttctccaaagttcctctctctggcagctgcagcttcccttccttcgtctgtcccattatactctctgctccagcctgaggcaagccatcttgaaggccccaggaaacagagagggcctccctgaccatccattctaagacttcccgttgctctccaaaccctctgcccccctccaatatccccctcatcccattgttccacaggcctccttctgctgttctcaaactttccacctcaggacctttgcacatactccctatgcctggagtgctggtcctgctgcccagctccatgctgtcttcttcatggctggctcctcctgcccggtaagatataatagtcagaaacagcctggagctacatctatttgagttgcaatcctggcactaccacttactagctgtgtgaacatatgtaaatgttttaacctactgtgcctccatttccttctctgtaaaacagggatgatgaaaataccagcctcatgaggttgtaatgaaggttaagtgagttcagatctctgtcaagcgcttagaacagcatctggcaggaaatgaatgctacttaagtattagttgttattgtcctttgggtctcaactgtacagtcttctctttcagggaagccatccctgtctactctgttcaggacaggcagtccctctccaacttcctggcttggttattttccaacacaggagcctgtgtgtgtccttcagagcaactcacatcttatcagcatctctttatttttcatctgtctctctcactagcctgtaaactccctgagggcaaccacttgggctgtttttgctcaagtggtactcccagcatgcagccagtgcgaggcctgccatatagtaggggtgagtagagagttgttggatgaatggatgagctaaaattaaataaatgtttaatggatttgtgcactacttcattagaataccagctacaggaatgtaaagaccatatctgtcttgttcatcattttgttcctggcacctaataaatccgtagcacatagaaggcacctaataaatatttgttgaatgaaagcactaattctaattaattaattgtgtaattaattgtttcttttcagtctcttccattccctccacccctaagaatgcaagcattgtgagccccaggtccacatctgtggctggctyccctgtatcgcagttgtatttgcacaatgcccggcactaagtagctgcttcataaaatgagtacgcacatgggggtagacattgtgcagaggacttcaaaccattccaaatcctggacttggagctcagtccaggtttcactgaaaactggaagtccagggaggyctaaggggcatctagattatagaacttctgaattttgaaaggatcgcgtggtcagagggatcctggagggggtggcaggagagaaggtgaggacgagggcagggagtggggatgggcagcagacctgggtggacacctagcgaggtgagtcattgctggtgtccacttcctcatgtacccacacccctcccaggggaggacctggaggatggtgtgagggatggggaagggagtctgaacggtacagaaatcagtcctgccactcctccagctctggactgggcagagctggggaaagctctctagcctcccagagctggactgtcttcatgaaaaaccaggctgaccaaggagaatagttagcattcattctacttccatacagcaacaagcccaaaaggttcatcatcatcgtcatcatcatcatcatcttggagtatttgaatgctagttgttggagttcttatgacttgaataagtggaggtctcagagccagtggggcaggagaccctccagctctgactggcaggctcagggccattcactccagcctctaccaagcacttcccccacaccaggcctacagtcagcttgggctgctgggaaacagcaccccacaccgcaagacctgatagtatgtgggaagagccataaactggcacaaagccctgaggaatttggaaagggaggccttctcattcaagtgggagagaccagaatatagctccaggcaggatgttttcattagaattagatttggctgcatgtgctggggggawaaataaaagtaacagagacttaatcgaggaatttaattttcttaggcattccagggctagtaaggcatattccttagcatcgtggatcacaaccctttccagcttttcattctgccacccctacaacctgtctttgtcctcatggtctatctggctgctgaagctccagccatcacattcacatgccactagtaagatgaagggaagaagtctaggtacctcttacagtggctcagagtcaccatcctcactggaggaacctgttatggggtataataaaccacaggtcttaaatatttattgaatattcatctcagccattgcattagtcattttaatacttgagttcctttttaggggttttattttccttgtgtgttttcctcttttctggatccctggaatctgatattaacagaggttatgatacatttttttccccaaatgattctgttgtgtgttttgctgatagaggtaattgatatttgctgtaaacagtttacacaataaagctaattgattcacaatcatttcctcactgaaaataagcactgatcccattttagggaatatctttctggacatttctctatgcgcttcccactccctctcaaccttcaccactatgaccctggtattgcacccacaccaacctcctaatcatctccgtacctccacccgccctcccttcagcttatcctccatcaacagctactgtgagctgtgtaggtttttgtaaattgaggtaaaacttatataacataaaattaaccatttaaaaatgaacaatccacaacattgtgcaaccaccacctctatcaaggcccaaaacactttyattgctccaaaataaaaccctgtacctattacagttagttactctcccactccctctgccccagcccctagtaccaccaatctgtatctatggatttacttattttgtatactttctacaaatgaaatcatacaatatgtgactttgtgtgtctggcttctttcactgagcacaatgttttccagactcatccatgttgtagcacgaatcagtgctttattcctttttatacctgaatgatattccacaatttgtgtatccattcatccactggtaaacagtcagttatttccaccttctggctattgtgattaatgctgctttgaacattcttgtagaagtatttgttcgaatacctgtttttaattctttgggagtatatacctatgggtggaattgatgaatgatatagtaattctatgtttaattttttgagtaactgctaaacttcttttccatagcaaccataccactttacactccaatcagcaatgtacgagggctccaattttccacattgttgccaacatgaattttccattttttaaaattgtagccatcctcatgggtgtgaagtggtatctcattgtagttttgatttgcatctccctaacaagccatgatgttgagcatcttttcatgtgcttgttggccatatgtatatcctctttggagaaatgtttattcaagtcttttacccattttaaaattgggttgtttttccttttgttgttgagttgtaaaagttctttctgtattctagatactagaccttatcacatatatggtttttgaatatttttccccttctgtgtattgtcatttcaatttcttgatagtatccttagatgctcaaaacttttaaattctgatgaagtccagttgatctattttttcttttgttgctcgtgtttttgttatcatatctaggactccactgccaattctaaggtcatagagacataaccttatgttttcttctaagaattttatatatatatatatatatatattttttttttttttttttttttttttttagatggagtcttgctctgtctcccaggctggagtacagtgacacaatcttggcccactgcaacctccacctcccgggttcaagtgatgctcctgcctcagcctcctgagtagctgggactacaggcacgcaccatcacgcccggctaatttttgtatttttagtagagatggggttttgccatgttggctaggctggtctcgaactcctgacctcaggggatctgcccatctcacccttccaaagtgctgggattacaggcatgagccactgcgcccagcctgaattttatagtcttaacttatatttaagtcattccattttragttcaactttacatatggtgtgaaataggggtccaacttcattctcttgcatgtggatattcagttgtctcaatatcatttgttgaagcgattactctttccccattgaatgcaccttgcaccctagttgaaaatcaatttgcyatagatgtttgagtttctttctggactctgaattctatttcattgtctatctatctatccttacgccagcactacactgtttagctttttagtaagttttgaaatcaatragtatgagtgctctaactttgctctttttcaagattgttttggcatttgtcgcccgtaattccatatgaatttaaggatcaccttttctgtttctgggaaaaggactgttggaactttgataaggattatattggatctgtagattgcttttggtagcattgccatcttaataatgttaagtgttccaatccaagaacttaaaatattttttcatttatttaggtctttaatttccttcagtaatgttttataattttcattgtacaagtctttcacccctttggttgaatttattcccaagttttattctttggatgtattataaatgaaattgttttcttaatttccttttcaaatttttcattgctgatgtacagaaacactgctaatttttgtatgttgatcttgtaccctgcaatattgctgactttgttagttctaataggtttttttgtgtggaaattcagggttttctatacataagattatgtcttctacaaatagaaacaattttacttcttcctttccagtttggattccactgacttctttttcctgtctatttattctgactgaaacttccagtgcaatgttgaatagcagcagtaaaagtgggcacccttgtcttgttcctgatcttaggggatcatttcctcacttctatcaggtcccaggtcacaagctgtcatctcagtgaggcgtcctctgacttcccaaaacagcggtgcacaccccacccacaacccatcctgtcatcttctaggcccttgtcctgctttgtcttcctccataatgcttaataccattccatatctttatacgtttattatcgctctcctttcactacatcagaagcttttgaggattttactcactgctgtcccctagcccccagaaaggtgcctggcacataggaagcactcaataaatgttgttgagtaaataaatatacatatgcaatttctcataaatggaattaaattgttaatgctactttgtaagcttgcctttttcacacaacatttgtcctaggcattctccttcttagtaagtagcaattgccatcatcctttatactaactgctggaagtccattgtatggatgcaccataatttcttcaccagttcctatgggtgggcatgacagtgactgtcctcatacgtacctctttactccccttattccgttatgaatctgacactttaaaaatatgataatgaggcaaggatgcattatttttctcccttttcatattttatttgtttgtttagaaatgtttatacatttttctctcatttcccaaggtctcagaacctttggttaaggtatcccataccctggcattctattatatttttctttcatatttttttcctacttacagattgtttggtcatgaccaatgcttttgatagagggtagtcagcttggaccaagttataaaatcattcttttcaagtgtgaggggtgctgtgttggagatccctgattcctattctttggagaagttggtccccagagggagaaacctgaagggactctcagcatggagggacccacagggctctacaatsgtccacgcagggctgtgggtccaccagaggctgttccattgcagccactcccgtaacaggtcccctgtgtgtttgcaggaaaggtctgggttcctaagcagaagccactggatcctgtgctggaaagtgtgacgctggaaccggagctggaggaagccttggcaaatgcttcagatgcagaactctgtgacattgcaggtaagaggcgttccaggagctttccacatcctccagaaggatttgacccacatctgcagggagccttgtagggctcatttcagcatgaacaccttctctatttctaacaagaactagaggagaccgagagtgttcaaacaacaatccattctcaaaaascaaaacaaggaaaatagagagaaaaccacgcaaacccaccacaccagggagccatctgctgttgccatgagaccccatgccagagggacgtgggtgtatctcagggagagcccacagacgccctttcccagccattagcgttgaatcctgcccaaaccatttgggaagagaggatagagggaaaacagacagagggcctctggtttctttggcttgggaggctcactaagggcttgatttttacaactttgcactttgcctgcagttggctcagtgagccggctttgaggggtcacccttgtatatcgcatatttgccccatgccctccatcttcatatgtgtttccatatgatcttcaaaaactacccccaaaactccagaaggtggyctgatattcagagccctttgccccactccctgcctcccccgacttctctgctgctcctgtctagtttctgtcccactgctgtggtgttccatccccacaggaaggtcaggctctggccacatccggcaccttgtgcactccctccccacctactgtgctctctgatccagggagtgggtgggtttttattctgcaggcttggagactgctaatcatagcccaggtgatggcaggagggtgggcggggtggggaaaggctcgaggcaggtgggcaggggagagggtagaaggggatgcctgtgactgattggctgtgagagtgaggtagaagagtgaagcagggtaacctcagacactaagtggtgtcggtgccattagtgatggatggcaagggaggagcaggaagaggggagatacagagttcagtttacaacctgtggcacttgaggcacctgtgggccacccaagtagggtcagttgtataggaagttctggagtgctacaggaggttcccattcaagatagagatttgggcatcattagtgttgtcaagctccagaaagaatacatggcccttgtagaagcctttggtggtgggggttgggggcgggggtgcaaatcgtgggaatggggcaaagctggaatgtggatcagttagccacaaataggctgagaaccaaaggccaaatcaagatgggcagaattggatgcaggagccacagagacagagtgagggttcagggctggccaggagactcagaggcatgtaagcccagaggccacggcggaggtgggagggcaccagcaccagcaccagggacttgacaggccacagctgccttctgcgacttgtgagtagtgttgtgcatgactttggtgacattcgttcaggggtgggggagccactgggggatgtgcaggggcagtgagaagactcaactatacacaaggggcactctgggtggtgacaggtgaagccaggtctgggggacctgaggagtgaatgcggaaagccagtgtgtagatcccaagtccagacagccctttcctcaggagacagggaatttgaaggacaaagggcaatggcttgaagggtattgggactgagagagaatggttttccctttcactatgaagtacagaagcagtgagtgcttcacccagctgggaaggtagcacttaactccggaacctagtttgctagggcagggatttattctgtcagaagccacacgagtcacagtagatcctccattgagcccgtatattatacatcacacttcaaccaaaccatctccccgaagtcccttgaggtcgggttaatctgtgaggcagggaggtggctgatgccttggtgcggcatctccacatggactggggctgtttttaccctggactttctcctccaatcacgcttcatgacgtcactcccctcattaggcagctcaaagggattatcaaatgactgccggcgcctgcggttcctgtgccaggtcagagctgcaactctgtgctacgtttctgtgtggctttcttgaaactacttctctttatttttgttggcgtggctatttattgttatctgtaacgacgcaatatgctgccgaagtctgggaaggagaggggagctgtaagtctacaccagtgttaactggctaaccttggatgcctgtcatttgatgttggacatttgaaagatggcagcatctctggggaaggagggactgaacacttttgaccacctaccatgtcccaggttctatgtgagttgctctcaagaccttattgcatttattgaccaaaacaatcctatgaaggaaattttattactgtccccattttatggatggagaaagtaggcaaggtgtggttaaatgccttgcccaaagggtttaaacccaggcaacttcattctagggcctatgtgcagcatcatcacccagtgtcacctgagtgaagccctccagggtaggggaggacacagagcacagagggtaggcaacagagggtgatgggcaaggctggagaagttggctggggacccrgggagggggtcacattagaaaaggctctggatgccacaccaaggagatgaaacttgggactaggggcatgaaggagagctagatggaagcaggagtttgagtggagaggagggggtgttctggaggatgggggaatggaggaggcaggccttcgatgaggccgaggcctgggcagagctgtgrgattgcatctgagatgcagcttcaccaagagcccagctgttcctagtgccggctcagaggccgagcagctgagatggtaccagtctttctagcctgaggcagcagaaaacaggctgggtggctgatgaggagtgctctgccgagagctgacttcagaaactccgcatgagatgaaggctggacttcgaacatggtgttggaggtgctgggcggagcaggcccaccagagagtggtgggtggttggagcctttttcacagagcgggtgactgggaccaagartgtgggtaactcactggaggaagaagagtagggagaggaggacwtggggcgtccaggtcacctgtagttggtatggcctgtctcccaagtggaacatttccatcagctcagctctggcttgctcactcacacacacagtcagtgctgtccatttagtctctggactaggctctggcaaaagaatggtaagaaaacagcccagtttccaccctcacagagtctacgttaaacaaacaccaggtaagtatgaaatgacaaatgagagtgagcgtctgaacagaatcagtacagygtgtgagggaggcacttggggtagggctgggggagaccagggaagagctatggagaagagcctaggagcagaagagtagcagtgagaaagtgcggagaaggtccagggcttgggagcggcaggaggagcggttccgggctggggagggcaggcccctctgaacggagtggcctggcaggcttgctatctgctgatgggaggagcctggagggcaagctcaggtgtgccctcctaactcaggtgtgacaygggtgagatgcatcactcatgtattcacctaactgctcactaagccagtgcacattattgaactcctactgtatactaggatgaacaggagccagtccttgcctttgggaggcccaggaggtgatgaggaggacagacgagaaacatgtattttttttttaaccttaaaatcttttatcacttcaacatgtagatttcaacattaaaagcgtccctgctgggcaacaagcagagtgcacaggttcctggcagggctaagttcttggcgcatagcctacagggttgtaggtcagaggctgctgggagtcagcaagcacttgtaattcgcagtgcctcccctgcccactcagggaggtgatgctggctggctttagggacccttcaggtggggcagaacccaggaaggaagtggggtagggagactcatcgtttagatgggacagcctcgggccactcacccccaagggcagttggcaacctgggggtcttgcagctatcagagacaggcttagccaggccaccccctggcttctggctacttccgtgtgcttaggcacctgtcctgctaccctgccaatggcagggtgtatcttatccaggagcagctcaactgcatccaagtcctgggctggagccagtttctcccacctgtccctgggatgcaggagaacatcttccagccatctgcccagagccagcccgagcagctggcagcaggaggagccggggatgtgtgctgttatctctctgcgtcctgagtggaattaccaaatgagtgaactctgccaaggcagggagaggaaacagaactcaatgttctttttcagagttcaaaaatagtcctttttgagttttgaggaagatctagacttaaaaaaaaaaaaaaatcaagttccccagtgctaaattcagccttgccaatatctacaaagaatgaagcaacaggcaatgttgatgtgccgttttctcccgtcactcacttctgttgacgtggagtgtggcacaaaaccaagtgagagggaaagttgcgattttgtgcctagggctggcagaaggtaatactagccccaggcattctgcccatcagtggaaatctagctgggcccttcccttccttcctctttccctcctttcttcttttcgtccttcctttttgtaattctaatttcctctgagctgcaaaatggttttatttcttcttagccctgctgttaacatatgtaacctcctagaataaatatatgttatctgtccttaggatgccaaagtcaaagggaagttttagaactttagaactgctagtgacctagtgaatgagaatactaacttaaaagccacaagagtctttgctgtatggttttggcgaaccatttccctcttgagcttgctggaaaagttgggggtggggggtctaccacagctaccctggatgctgtttgtttgtttgtttgtttgtttgtttttagacagagtctcactctgttgcccaggctggagtgcagtggcgtgatctcggctcactgtaacctccacctcccaggttcaagcaattctcctgcctcagcctcccaagtagctgggatcacgggcgtgtgccaccatgccctgctaatttttgtatttttagtagagacgtggtttcaccatgttggccaggctggtcttgaactcctggcctcaagagatccacccacctcggcctcccaaagtgctgggattacaggcatgagccactgtgcccagcccctggatacttactgtaaaagtcaaacaggataaaaacatgagaaattgttgtgtcactaagtcctatgggtaggtaagagatcagtttaaacactccattttacaggtgagaaaactgagcgtccccccagcccccaaaaaggaagtgacctatacagggttacccagaaaattcataccaaggctcagcctgaaatgcaggtctgcttcctcttggtctcccagcagtctcgtgtaacttcaccgcctccatcccttttctagaccatcacaggaagctggcatctgtgtgccaaatgcactttctattttccacctctctccactctaagccacaccagtcagccatatgaggctacatcttttatatgatccccgcaaaacctgtacgaaaccccagcacatcccagaacccccgtgagctgctccgtgggagctggagagcctgccccagaatgggactccttcttggtgatctgattcacctgctgctgactyaggcctcagcttctgttgcccacgtagatgcagcctaaattaaaacccacgagagcttgaaaaaatgcagatgcctctctccccaccagttctcttagtgatgaacaagcaagtctaattttagcagagaagaatcttagaatgtgagaaacagaaaggactttgagatcatctcatcttgtggttttcgactctcactcagcaacagaatcacctgaggaggtttaaaaaaaaaaaaatcggccgggcgtggtggctcaagcctgtatcccagcactttggaagtccaagacaggcgggttacttgagggcaggagttcaagaccagcccgggcaacatggtgaaaccccgtytctactaaaaatacaaaaattagctggacgtggtggcacgtgtctgtaatcccagctacttgggaggctgaggcaggagaatcgcttgagcccgggaggtggaggttgcagcgagccaagatcatgccattgcactccagcctgtgccacagagcgagactccgcctcaaaaatttaaaaaaaaaaaaaaatatatatatatatatatatatatatatatatatatatatatatatatatatatctccagagattctgattggttggtccaggatggagagaggcactgatatggtcttaaagctccctgggtgatccatgtgtgcagccttgaccgagagccactggtcttgtctcaagccctcattggaaagagaggttgaagcctagacaggggaggagaactgcccaaggtcacactgacatcaggggcatggtcagggctggaacttgggtttcctgactcttcattaagggctcccatattgtctctctaacaggaaaccatatctaatcaagtgacttggatattttttaaaaatcaycaccaaatatttgctaaataccgtattcagggagaggtggaagagaaaatatccttctctgacctccagaagcctacagtctagtagcagaagcagacgtgtatctagatatgtctaacaccacatagattctgaggcatacaccaggtgctgtgggagaattagaaagggagaggaggaatccaggaagactccctggargaggaagagttactcctagtcttgaaggatagggccatagagttgttagataaaatacagtatgwtcaattgaattcaaatttcagagaacaacaaatatgtcccaatattgaatggggcgtacttagctaaaaaaaaatttggtgttggccgggcgaggtggctcaygcctgcaatcccagcactttgggaggtcaaggtggtggatcaagaagtcaggagttcaagaccaacctggccaagttggtgaaaccccgtctttactaaaaatacaaaaattagccggacgacaaaaaatacaatattttttgtattgtatatatatatatatataaagtatttatatattgtatatataaaaaatacaaaaattacaggatgacactcctgtaatcccagctactcgggaggctgaggcagagaattccttaaatctgggaggtggagtttactgtgagccgagatctcgccactgcactccagcctgggcaacagagcgagactccatctcaaaaaaaaaaatttgttgtttatctaaaattccaagtcaagtgggtgcagagaatcaccagcagaagggagagtactagcaaaagcaggagcagctatgagcaggggctgtttgtgtagctggagcagagaagctgttgggagggggagtgcaacaacactggtgaggtggggccagcccagggaaggcctgtgaagccaggctctgggtttggatttggctgtacaagccactgtcctcccatctggacagctgcaacagcctcacagctctgcagccacatccatctctcccctctgtagtgagttctcaacacaatagtcagaactcaggtcagaccatctcacttcctgctcaagcctctaatggcttcccaggctgttcctaggaaaagacacccgaactccttactcagcctagaagaccctgtagaatctgaccttgcctaggtgaataaaatctactccagagggttattgggcagatcaaggaggggagtgtcaggcaatggttctcaaccttggctgctcattgaaaccatccagggagctttaaaaatgcaggtgcctgagctccacccccagatattttgggttaattggtctagggtgggactgggcatcaggaatttcaacagatccccaggtgattccagtgtgcagccaaattgggaatgatggatacaaagtgtcttccctggcccagagcatgtgctcagtgagaggggtggtgttgccatgcgtctgattattaccgccacacatccagcttctatcctgtttcccccagcagtgattgtcacagctgtgtcatcactggtgtcctggccttggcctcttcctactctccacctcccaacatgcagcacagagcagctggaaaggtctttcctgaaatgccaacctgaccttcctccctcactggcctgccactctctgaacctcgaggctttcccacctgcattcctctgcctgtaatgttctatagcccttctcttaacttgaccaacacttactcctcctttgcatcccaagttcctcttttatgctgtcttaggactgaactttttcctctaccacactcagcataccctgtgctggtttttcattgtgtgggaacttgcttggctcctctctcccccagcacactttcagctccatgagcggagacccagtctttcttattctccactgtccccaccagagcctagcacacagtgctggggtgggcctcattacatgttgaacaaatgaatggatgaaagaatggctgagcacgggagcaataagatcaggttggcatttccagaaagagctttccagctgctttgtgctgcatgctgggaggtagagggaaggaagaggccaagaccaagacacccgtgatgacacagctgtgacaatacagccaaagaatgatcaggcctccattaggatggagatgatgggatgggagggggacagatctcagagacactgggatggtcaaatgggcttatggggagaaggtaccacattccctgatgttttaccctgagggacaggcaggatgacaagatggaaagagagccttccaaagaaagaggctgtcactggaaagagccattctggtttggccacrttgagctggatgtgccagcaggacatcagggaatcagaggccaggggcagagmagcctgggctggggctggggatttcagagtcacatcaatagaggtgagagtaaaagtaaaataaaattttgaagtwttcatgcaagtgtttcttgccatttctgtgagccagagttcccggggtttggagtgtgggtccctaggaggctcttctgtctgcagaggcacatcatgagcccttcccttgtccctgcagcgatcctgggcatgcacacgctcatgagtaaccagcagtactaccaggccctgagcagcagctccatcatgaacaaggaggggctcaacagtgagtatgcgcccgcccccaggagggacctcatgcttcttgcttcctccactcactgatgttctctggctcattgcagaagttttaacatgttatatagccaaatctgttcatcctttcctttgagtctcctgggatttgtgtcttgtttacaaaggccttctctatcccagtattatagaaatgttctcctatattttcttctaaaagttttagagatttactttttatattcaactttttctttttttagacagggtcttgctctgtcagccaggctggagtgcattggcacaatcttgacacactgcagcctggacctcctgggcttaagcgatcctcccacctctgcctcctgagtagctgaggctacaggtgtatgccagcatgcctggctaattttgtttattttgtatggagatgaggtcacaccattgcccagactggtctcgaactcctggactcaagcaatcctcctgcctcagcctcccaaagtgctgggattacaggcatgagccaccacacctggccttatattcaacttcttaatctacctggagttcatgtttgtgtgtgctgtgggatgagaccaaactttcattttttcgaattaatatccagtggtcccaacaccattccttgcaagatttatcctttccccactagtttggggcctgcctttatcatccacatggatctgtttctaggtgcctcctctgtttcatgagcccttttgtcctttcctgtgccaatattgcattgccttaattactccactgcattgttccaaagctggcattttggccccaaacagaaatgaggctgccaaaaaaaataattattcctccctctggaagattgatgcatttctttcccatccgggcttcatcttagcctcccaagagtccactgaggtcatgagccccgggaaaatgactagccctgccttacagatgtagacccaaggttcagagagtttaagtaattcacccagttcttgcaggacgtcaaaggcagagtccaagtagaaccccagcctcctggctcccttgcggggcttcttctgagtggtgccccctacccccacccagcccctgtgatgtgcagccctcasgtgccccaaccctgcacatgctcccttccacagtatctttgtgttggcagaaagtgagccccttgtttctgtgagccacctccctttcatcggtcactctaggcgtgattaaacccacacaatacaagcctgtgcccgacgaagaaccaaattcaacagacgtagaggaaacgctggaacggataaagaacaacgacccaaaacttgaagaagttaacctcaataatatccgggtaaggtccatttatttcactttacctgtgtgtggctgggggagggggaaccatgtcacccaaatgcaaacggtccagggttggttgtgcagagtaaacagggtcctgtttggattctgggtgtttctgcattgggaatagggacaaaacctttgcaaatgggagcctttaagaggggtgggcagtgtaaacaagtgcatctggcagtcctggtttctttctgaggatgatatcaggcccagatgtttagcacgggccaacccagctttgatctggaaacctgccacgttattcaaaacactgagagattctccgagataaaatcatgagtcagacacacgctgctgcatgggatctcaaggctggaaaagtcyrgtgcccactaggctcgggggtaacacaggccctgggcaggcccctcccctgtgccatcgctgctgctatatcacgttcatattcagccttgttttacagccacagaagggagctgttggccaaaatgtccaaagcgatatcccaagctgtctgcccttttctctgtgcacatttccttatgtgatcccggggcaggggagggacaggtggacaggcagtctcaccctgaacaggccgccgcaggaagaattcagagacaaatgcagctttctacccacctgctgagcccagagaccagtggattagttctgggaggggggtgggggtaagactagaagccagccccccatgcccctgctccactttctttccttctccactttattttaagcagctgccagccccacggcaccatcagattggaaacctgcaccctagtgttcacccccacctggcctccccatgctctgctcccatgggagctaaagtgacgctctgagagattggtaaaaacacagccatgttttctttcatgtgcccagtaggagacattggcacaattcagaatgctgcccactggcagtgaatgctgcctcagggccacatgagggatggaatctccctgtgaggccccagcctcctctgggcctcagtttctcctctgcactgtgagcctgttggaccagatcagtggttttcacctgagaagattaaaaaatatataccaacgcccaggcctgaccctagagattctgattctattgttctgggcyggcccragcatcaccattttgtaaaagttccccaggagtctctgatgtgccgctggagcagagaccccctggggtagatgtctcttaaagagtatcatatgcaacccccttacctrttttccagaaacagggccagagagggcaggaggcttccacagagacacctagcaagtcaggaacattgccgatcattgggaccaaggccaggttccagcccctctcacacccctagtcctagctctttgcacaatactacacgccttaatttttgcctcttctctggcccccaagtgcacaaagaaagaggttacaggtcttatctgaaattttcagggaggattttctaaatctgtttaccagaaagttctccccagatttcagtcgtccgggacaaagcctaaaccttttgcccattcagctttttggccagagacttgccaggaatcagagagtagccaggctaatccacctgcctcagcctgtcccagaggaggcttctrgtcactctctctgttgcctttctttgtgcagaatatccccatccccaccctcaaggcatatgcagaagccctgaaagaaaactcatatgtgaagaagttcagcatcgtggggacacggagtaatgaccccgtggcgtatgtatgtacctttctgttctgttgcattgtggctgggggccttgaaacagaagggttgaaatatgtggcctcaggactrgttgtatcccactaacaaagagctcyatgtggtacagtggaaggcattggaccaggagccatgaggggtgtagagggaacagccatcacctggcaccacctacacgtcatcctggccaatcctcacacccacttctggtctcagatgtgcagttctccccactttgcacttaaaaaatctagggttcggagaggtcaggcaacttgttttgtccagtcacacagcaagtgagaggtggacctgcaaktccagtgcagtcacgtgacccctaaatcttcactyggcacatcatattagaacaagagcctgcccttccctgttcctcagtttttccatctctaaaatcaatggttttggttgggcgcagtggctcacacctgcaattccagcactttgggaggtcaagacgggtggatcacttgaggtcagaagttcgagaccagcctggccaacatggtgaaaccccgtctctactaaaagtataaaaattacmtgggcttggtggtgcatgcctgtaatcccagctactcgggaggctgaagcaggagaagcacytgagcccaggaggcggaggttgtagtgagccgagattgcaccactatactccagcttgggcgacagagcgaggctccatcacaaaataaataaataaataaataaaaatttaaaaaaataaaaatgatggtttcatcagcaggtcccaatraccaattttattttataagtctcaaaagatatttctgatcaaattaaattgtacttactctgaagtagccatcaactcttctttttaaacatccagcacatatgtattgagagtctctctgtgcccaacgctgaattaggttctgggaatacaattgtgaccagtctcagcttccactttcataaagattctggtccatttggccaagcagacaactaaagggtaacagtacagtgcaattactgcaaagctagattcctgcaagaagggcagaagctagtttatcagggctagtaattaaccatttagtagcaatcgatttttttctgattcttaaaataggtaagacagtgttctttcatatttttgaaataatagaaatagctcacagtctctcattgctgtcagtggggaacctctggattgatgacctctgacctcagatctccatggttccttgcccataggaacacagctggcaaagccacatgccctgtatgctactatgtcatgggtcagaaaccaagcacatccattctggccctcagctcaggtccacaaatgttttttgggcatggactctgccagaccaacagctgatatcagcctatgcacaccagtatgcccgtgtcaaacactgagatgcttctgggccagttggtaaatcaggctgccagagctctgtcagggcccccaccgcctgccctagcttttctcctggccccggttcctccactgggacccagcatacaaggagttaacacctggcaagacagggcctccaggacctgctcagccaccagcatgtccagttggatcagcctagcaggttgcctactggttgttattttgattttttttattagatttgattaagccaggccaggcctttcctgggagcaggaaggttctggtggaagacacagagaggactctggctgggtcctttccctcaggagggccagccaagtcagagacagacgccatcatagagaaagctgacatgccatcccgggggcacactgaagtgaagggcactgaggagggggcgatgatttcaaaacagagggcttcctgggagctagcctctcagcaggtctcagcaaggcaggggcgacggggtaggtattcctggctcggagcatcattttaggcagcagggcccaccgatcagtatgtcctatcagctgctggtgtctttttccctccatgacgcatcgtttccaccaactgctaattatctcatttccttcagaggctctgattgtcatctacaccccctggctgagttcctctgaaacgtgctaggggccacctaagctcctcttctccagtttgccctggtcacttgcccagtgggtggtttcccaggcttccctcttctgctctgtagtgctcagatgaagaaaaccatgtctccatggaatttccacagggcaataaagagacaagtggggagtatgtacaggaggttgaggctccactggtcactcagtgaacaatgcctgagggcctattatatgctgggtactgtggccaacatgggatagataggatgcattttcagcccaccaggagtatatagtctaatagcagagacaacaccagtatgaaaacaactctgaacagaggaatccaaggtccacaatgagggaagtatggctccattctatgaggatttgagagggtaggctacagctagctggggaatgtcagcaagagttcttggagaaagagacattgagaatgccctcgaaagatgggtagagcttggacagggaagcagaaagggaagggaattccaggtgggagggaaagaaagggcagagacaaagtgggaaagcaccgagcaggcatggggagctgcgagtagccccactgaagaggagcagtgagagttgattctggacaggggagtagacccaggtcatagaagctttgcatgtaggctaagcagcatagaattctcctgtgggggatcaggagccatggcgggttgcaggagaggagagacacagtcagagttgtgcttggtgaaggacatggtggagatcatcctcctgttcccctaggtgtcttaggatctacccagaggggcctccagccttgctcggggtgactcatgggtatccttgctttctcttgtgcttcaaggcccttgctgagatgctcaaggagaacaaggtgttgaagacactgaatgtggaatccaacttcatttctggagctgggattctgcgcctggtagaagccctcccatacaacacttctctggtggaaatgaaaattgacaaccaggtgagatgggcaacggtctcctcaggtctgttactacatgcagctcgctggcctgcagtgtttcccatgctgctggatggagctgagaatgctgatgatagaagctcagagcccagctttgagggacctccaaggtccctaaagttcacaccctctaccacgctcaccttccttcttcatcgcttccactacgtgctcttccagttctgattgagtccctctcatgatgggggacacactccttaccaacatcatcacttccattcttaggcaatgagaacattcttccttatatccggtagaagtcagctccccgtaagtcctgtttgttgggcttagctctgttctctgcttcactcaggacatctgttgcacagatctcatggaccactaagctctccttctccaggttaaaattyccagttttcttcattcacccccattcaatgcggcttttgaatttcctcaccattcacattactctctaggcaattctagtttgtctttattcttatggagttactgtttctctgtaacttctgtgggtcaatcattttatctgcggggcaactctttcagctctgactttctaagaggatgctaataacaacatcttacatgttacatgtgttgagagtgtactgtggaccaggctctgagatacacatcttacatccatcatctttgatcttcacaacaaccctacagaatgtgggtatcatcagtctcagttttcagaaaatagtccagacaggccaaagataagcccctttttcagggccatagggtcagcatttaggaagcaggatttgaatccaggtctctttgactctaaaactcacacttattccactgcagcatgttgcttttgatgttaaaatgctttcttttttatgaatggggactcagtttttttttttccactacatgaaaatttttgctgaatggttgtataaatgtatgcatgggaaaaagattggaatgaaatattacaaaattctaaacagtggttatacctgagtgagactatcacaagtttttaacttttttattgtaraacatggcaaacatacagaaaagtgcataaaacttaaatgcacagcttaaggaatcataacaggcatgtaacccctgtccaggtcaagaaacgaaaacattaccaacctccagaagactttgtcccttcccaaccataaccctttcaaaaccattcacaacttgctccccactctcatgcctccatgcctttccctcctcatggaatgtcctcccctgcctctaccctcttctctgccttctgggtttagttgaagtttcactttatcttagtggtgttctagagacagcttgaaccagcttgcaagatctgattgtggatatctcttcctgagaccagcgatggcacattggtgccttgaattgctcatggtaggtgggagtatttacactatggaaattggcaaattggcacaccatgcatcagggctttttttttttctttgagagccaggttactactgtcttctcccactagtctgccatagctcctccaaacctctgcccaaagagagttagatacctcttcctctgggctcccctagcaccttggcttcccttgagcttcccagaagctggtgctatgtctgaggcatctccttatctcagtgcccagctcaggacctggcccttcaggagtgcctgrtaagtaagtttgccctggatggtcgtgcatattgttcacagcacaatgaggtagcagagagcaaaattcaacccagaatccactctccaagctgtgtgcctcagtatggggctttgttcacccagagagggcacttttttctaatttatataaagcagtcacatgagctggcagcagccgtgtcacgtgcatttcctgcattggactccttgcatctctcgcatgccggtggtcttgctgctgcctcgctcattctcaggccctccccacccctaccccttctgcgccctcccttagccattgctgactgtgctccactggaggcaagaggggcagagcagatggaacaaaggcatgcagcaggcttggcagtggccctgggccaggccctgggattggctactcatgtgaatcccagcctggcctggcaggaagtcagggtctacccagagtcagctgaaacttaactcccagggcagaatgtcagcaaaagaggactgggagcaggtcactgtggtggcagctgccagggagttgccccttccctccacacactatccccccagagtccaagatggagcccatgctaaccattgcccttaccttagctgaatacmctggttcaaaaacatttacttccctgagcctcmgtttcctggcttgtaaaatgaggattataagaatctctgctcctaaggagataacagatgtaaactctgaagttgttaacttttagaatcactgggaaggygaactaggggattcacatgctattctaagagttaatttcctgagcaggtatcatgtgccaaaaccatactgggtactttgtgtctattatctaatttaatgttcacaaagactctgtaagtggcattacaacccatccctgtatcacagatgaggaaacggagtgccaggcaggctatgcaacctgcccaaggccacacaagaagcaagaggggcaagattcaaacccaggtctgtgtgactccagagtccatgtataatgctatgcctgtctgggttcttgaagcagctgtggtttcatgtgatgtcagcctggcttttctcatctgtcctctggcctggggcctgagcactggtcagcaccacccgccatccagtgagcctcttytttggttcatcttgacattttgatgaatgctggctgcttgccaggactgtgctgggctgtgtgcaggactgaggctccaggtccaccctccagaagtttcctcactggatgggaggaaagatggttgcagaaatgaccatcataccaggtgctccagcakccagacagtgggctgtgaggtccatcagagggagcagtcttagtcaggaatagcaatcagggagggttgcttggaggaggcagattttgagataaacccgtagatgctgggtagaccctgacttcccacccacagggtgaaaagtatctcaggtgacatggaggccatggcatcccaggtgcagagaggagtggggaaagccatggagcccatccacacaggctcacggtacccccagaggaaagccagaaagggggttaggagtcrgagagctttgaatgggtaggtttagggaaagtgggctgtgctgtgctctgggaagatggttctggctggatgggaggggactgggggcaaggagagggtatcagggcccaggagatcagccaggagctatggcctccaggaccagggggctgtggggaggcgctcctgcctaactggagttgggtccggcaggggaagggctgaaggcaggtctcagggagggggctctgctgactcaggctcaggaggaggccacctgtgcctccccttcaggtgccccrgccccaggctggggggaggcagggcagtgtgacacagaggaggtggcgagtggcatttgatttattcctttattcctcattcctggttagtcaccgaggtccttggagacgggagctttttcctcagtcctgtgcttataacctgtggcagcaagtctctgtccttctttctccttatacggccagggaaagggacttggggagttctgcccagggtgacacggagctggctcaggacacagtttgggaaccaggactttgaagctgtttgttgactcaaatagtctctctatctccaagcaatgttctgttgccacctgtggttgcgccaagaccatggtgaattgggaaagggcagagcagaccccagagccagaaggcactgagacaacatctagcccagtcctcctttcacaagcggggaaactgaggatgagagaagggatgggactagcctgaggccacagsccaggttagtggcagagctcggttggagctgcagtatcctggctgcactgatggatggatgggagaaaccctgtgggccccgagggagcctgcaggcccggcccaggccaagcaggccatctccacacacggcttctgtgctgctctcaccaaactctccaaactccccacagagctgctcttccccaggacccccagggcaccagggaccctgctccccaggccagacaaggcctggggtgagtcccacaaatgagaatatgtataatgtctggggtagtggccagattccccactttttattccaatatttgacartgaggatgtgcttaatattttgaagagaagttaaagtagatggattgtgctgtcttgttttcccagattggatgatttgtgtctggctttttttactcaacgttgcgattgtatcagttttttgtagctgtgtaacaaattatccccaaatatagcaacttaaacagcctcagaatcctggcataaaacaataaacatgtattaactcaccatttctgagggccaggaatccaggagcagtgtggctggctgacttcgcccagagtgcatgatctgaggtggagaaactgcttccaccatggctccctcacagcgtgggcaggagacctcagcaccttaccgtgtgcacccggcctagggctgttggagtgtcctcacaatatggcagctaacttctcccagagtgagtgagccaagtcagagaaaaaagaaagcctcagatgccttttatgacccagcctcggaagttacacaaagtcatttccaccatattctgtttattaaaagtgagtcacaaagcacaacccacactcaaggggagagaaatcagacaccactttttggaggggggaggatcaaagaattttgcagatattaagtcatcacagtaagaattatctatattattttgtgtcacaggagttgaccagaaagacctctgtaactgagaggtgacagcatgctggcagccctcacagccctccctygctctcggcgcctcctcagccttggcgcccactctggccgcgcttgtggagcccttcagcccgccgctgcactgtgggagcccctttctgggctgggcaaggccagagccggctccctcagcttgcggggaggtgtggagggagaggcgccggcgggaaccagggctgtgcgcggcgcttgcgggccagcgcgtgttccgggtgggcgtgctctcggcgggccccgcactcggagcggccggccgaccccgccggctccgggcagtgaggggcttagcacctgggccagcagctgctgtgctcgacttctcgccgggccttagctgcctccccacggggcagggctcgggacctgcagcccgccatgcytgagcttcccccacgccgtggtctcctgagcggcccgaacctccccgacaagcgccgccccctgctccacggcgcccagtcccatcaaccacccaagggctgaggagtgcgggcgcasggcgcgggactggcaggcagctccacctgcggccccggtgcaggatccactgggtgaagccagctgggctcctgagtctggtggggacttggagaatctttatgtctggctaagggatggcaaatccaccaatcagcactctgtatctagctcaaggtttgtaaacacaccaatcagcaccctgtgtctagctcagggtttgcaaatgcaccaattgacacctgtatctagctactctggtggggacatggagaacttttgtgtccacactctgtatctagctaatctagtggggaggtggagaacttttgtgtctagctcagggattgtaaacgcaccagtcagcaccctgtcaaaacagaccaaccagctctctataaaatggaccagtcggctctctgtaaaatggaccaatcagcaggatatgggtggggccagataagagaataaaagcaggctgccgrataacgcagtggcaacccgctcgggtccacttccgcactgtggaaactttgttctttctctgtttgccataaatcttgccactgctcactctttgggtccacactgcctttatgagttgtaacactcaccgcgaaggtctgcagcttcactcctgaagccatcgagaccacgaacccactgggaggaacaaacaactccagaggctccgccttaagagctgtaacactcaccgcgaaggcctrmagcttcactcctgatccaggagaccacaaacccaccggaaggaagaaactcctaacacatccgaacatcagaaggaacaaactccggacacaccgcctttaagaactataacactcacctcgagggtccgcggcttcattcttgcagtcagtgagaccaagaacccaccaattccggacacataactagcaaagctacctcaggatggagcaggtatctcaaagggggaggagttcccatcctgggggtgtgtaaacagctgggagatggagggaattttaatgtcagttagggtctgggactctggagttggataacctaattcccaggcctcctttctgttgtgttttgaagtattcccagttgtccatatcatctgggaatggccagaattggcyccgtcaaatgtccaaagtgagattcttgatgttcctgttgcgtctggccagaaagggagcctcagagccaccggctccaggatacaccttgtaacacctaaggtgttggttggtaattttgttcaagagcaaatctgatctctttctcatctgatgggtaatgctctgacatggtaaaggtgtgaggacacacagctgtcacacactgctgaagggcatgccgacttttacatccttttgtcagagcagtctcaattttaatttgaaagcgcctatctttcaacctagcagttttgatttccgtaggaagcctgaggaataccccctccctcccctgccactgccacgttgttcgtaacacgaaaaaacagaagtaacctaaatatccatctacaccagggcgtcccgtgaagccaatagaaggaataaggtcattctctacatactgactctgaaagagctctgcaaaatattaaatraaaaaggtgggctaggcatgacagctcatgcctgtaatcccagcactttgggaggccaaggagggagctcactagagaccaggagttcaagaccagcctggtcaacatagcaagaccccatctctgtaaaaaaaagtaaaggaaattagccagacatggtggcacgtgcctgtagtcctagctacttgggaggctgagcaggaggatcacttgagcccaggagtcagaagctgtagtgagctatgattgcactgctttgtgctgctgcactctagcctgggcaacagagtgagacacagtctccaaaaaaataaataaataaatattaaaataaaatgaaaaaggcaagttgcagaacagtaagtatagtatgaattcatttaaacaagaaacaagtaccacaaaacaaaacaaatccctgtacatttctgtcatatacttcatgcatagaaacacaactcattggccatgatggttactttttttttttttctttttttgagacggagtcttgctctgttgcccaggctggagtgcagtggcacgatctcggctcactgcaagctccgcctcccaggttcacgccattctcctacctcagcctcccgagtagctgggactacaggtgcccgccaccacgtccagctaatttttttttttgtattttttagtagagaccgggtttcaccatgttagccaggatggtctcgatctcctgaccttgtgatccgcccacctyggcctcccaaattgctgggattacaggcgtgagccatcgcgcctggcccatggtggttacttctayggaagggggtgggactgggaataaatcgggtgagggagactctttccttttactcaatctgtgttaatatcatatgaattgttaataatgtggttatatttattcacaagtggttttttacttctcaagcaaatctgaaggagtatgagagttctttcccaaccatcctgtccctggctctgctgcccagagactgttgccagtccgggcatgaccaaccccttggtctctccccctttacacactttcaggcacaggcagctcactaccttaccaggcagttcctcagcgtgtggacacttctaatggtcagaggcattcctccatgctgagccaaacaccatctgcgtgtagttcctctcgtcagtcctacttctgccttctggtcattctcagaggcacttaagtgaggtggaaaccagcacagactctagagctcgctgcctgtattcaaatcctggtcctgcaactgacccatgctaggatttgggaaaaatttcttaatacttctgtgcttcaattttttttgcctataaaatgaaaataatgaggatgggcatagtggctcatgcctgtaacccagcactttgggaggctgaggtgggtggatcacttgaggtcaggagttcaagaccagcctggccaacatggtaaaaccccatctctactaaaaatacaaaaattagctgggcgtggtggtgctactcaggaggctgaggcaggagcatcgcttgaacccagaaggcagaggttgcagcaagccaagatcgtgctatgcactccagtctgggcgacagaacaagactccatctcaaaaaataacataaaataaaataaaatgaaaataacgatagtagttttccttagattgacaggaaaaattccttagattgataggaaaaaatgaattagcttttgtaaaatgtttatgacattgtttagcatgcagtaatcactaaataagttacttgaaaaataagtcagagaactggtttttagtcgtggctccccagccactggttctctcttctataaaatgaatgagtccttttagtctcagggtccccggagtcagagaaagatgcaggtatgaagcttctttgacatctctttttttggagacagagtctcactctgtcaccaggctggagtacagtggcatgatctcagctcactgcaaactccgcctccctggttcaagcaattctcctgcctcagcttcccaagtaactgggactacaggtgcrctccaccatgcccagataatttttgtatttttagtagagatggggtttaccatgttggccaggatggtctcgatctcctgacctcgtgatccgcccgcctcggcctcccaaagtgctgggattacaggcgtgagccaccgtgcccggccgaagcttctttgacatcttaaggcttactgtaaggtgtatgcacgtgttctattttactccttaatgtaaaaagaatgggtttgctctgagatgaacactcctggaagatcatgattatctaatggaatcctgtaccttgtcgcacatgcccagacacatctgtgtgtatctagggtactggacactaatgtgagaactgggcctagaggaacctggggcagtcctttcagccccaggtcaaggtcaagccttggctctgtcatgaataagccgagggagcatggtccaacttccatctacacatggattcagtatactcatctctaagatgcagatgctggctcctgcctgccctgctcacctcccagggatgtagacaggtcgaatgggggcaatgcatgtyaaggggctttgtactctgcacgaagcatcagctttgcagaggcagtcctcgaagtccctggtagccccttcactcaggggagaccagtactttctgagactagcccatcctgagttttagcagggcatttgcagcaagagacctcaaggagaggccagggttcctgctaaytggggagggtgggtggaggagctgccagttccttcttggggcctcagatggttgctgtgccatctccaggccaaaacggccagattccagggctgtgctgagtcctccaaggaccgacctgacctcttcccagcattctcaggagccttgccagaggggccggtggaatttcaccagtgtccctctgcctgccgtggccagctttctgagcccagtctgaacccagatgagctctggtgaactcagaatacctggggggagttctcaatcaagagtctcagctgcaattcgtgcttgtccatttggatgctgggctgacgtcgcctctatccctcccaagcatgttcctgtttcctccattcaattcaattctgcacacctcgaccgagagaaactgggtactatgtcctacccgagagctcatggtctacagcagcactgttcaatagaacttcctgtgatgatggaactgttccatatctgcattaaccaacatggtagtctccagccagtggctatttgtttgctggtttttgtagtgacgagttttctctatgttgcctgcccaggttggtctcaaactcctggtctcaagtgatcctcctgcctcagcttcccagagtgctgggattataggtgtgagccactgtkcccggctaccagtggctatcaagcactagaaatgtggctaataggactgaggaaatgaactatacatcgttttcattttaattatttagatgtatagagcaacatgtggctagtagctactgtagctactgtattggacaataccgttctaattggtgagacagctatagaggcaggtgacccaagtaaggcagatggactctgccaggtgtagggagggacatccaatgtgcacttgagtgtggaatggggagagatcatttcctggggtcaggatcaggaaaagcctcttggggagggggaatttgcagtgcatattaaggcaatagggatatacttacagggaggctaaaagcattccacatggaggcacatgagctttttggagtagatctctgtctgcaccaggtaccattatcagactgccagagataaacaggccgagtaaggaaggagagagagaaggaaagcaaagagtcatttgtgagccttgagtaccaggctgaggagatggggctgtgtcctgttggcttagtgagggaatgagctgagatcatgcaagtggggcacgaggyagggcctgggacacagtaaattgcagcagttcttggcagtggggagccattagaggtggttgtgtatttctgtttggtttctatttctggtttttaaattattattattaaacttttaaaatttggggataattgcagactagtatgcagttgtaagaaataatacagaggagccgagtgcagtggctcacacctgtaatcccagcactttgggaggccaagacgggtggatcacttgaggccgagttcgagaccagcctggccaacatagtgaaatcccatctctactaaaaacacaaaaaattagctgagtgtggtggcacatgcttgtagtcccagctacttgggaggctgagtcaggagaatcacttgaacctgggaggcagaggctgcagtgagccgagattgcaccactacactccagcctgggcaacagagtgagactctgtctcagaaaagaaagaaagagaggaaggaaggagggaaggaagggagggagggagggaacagagagatcccttgtactctatgcagtttaggtgggaactgtagttttgtatcacagcaaggatastaacatttataaggtcaagatacgaaatatttccatcacagggatctctcatattgcccttttgtagccaagttcacttgtctcttccttctgcctccttaaccccaggcaaccactaacctgttttccattttaatattttgtcatttaaagaatgttatatatataatgttatctaaatgaaaatcatatattatgtaaccattttggactggcttttttttttcacttggcataattcttttttattttattttattttattttatttcttttttctttttttttattatactttaagttttagggtacatgtgcacattgtgcaggttagttacatatgtatacatgtgccatgctggtgcgctgcacccactaactcgtcatctagcattaggtatatctcccgatgctatcccgcccccctccccccaccccacaacagtccccagagtgtgatgttccccttcctgtgtccatgtgatctcattgttcaattcccacctatgagtgagaatatgcggtgtttggttttttgttcttgcgatagtttactgagaatgatgatttccaatttcatccatgtccctacaaaggacatgaactcatcattttttatggctgcatagtattccatggtgtatatgtgccacattttcttaatccagtctgtcatagatggacattcgggttggttccaagtctttgckattgtgaataatgccgcaataaacatacgtgtgcaggtgtctttatagcagcatgatttatagtcctttgggtatatacccagtgatgggatggctgggtcaaatggtatttccagttctagatccctgaggaatcgccacactgacttccacaatggttgaactagtttacagtcccaccaacagtgtaaaagtgttcctatttctccacatcctctccagcacctgttgtttcctgactttttaatgatcgccagtctaactggtgtgagatggtatctcattgtggttttgatttgcatttctctgatggccagtgatgatgagcattttttcatgtgttttttggctacataaatgtcttcttttgagaagtgtctgttcatgtccttcgcccactttttgatggggttgtttgttttttttcttgtaaatttgtttgagttcattgtagattctggatattagccctttgtcagatgagtaggttgcgaaaattttctcccattttgtaggttgcctgttcactctgatggtagtttcttttgctgtgcagaagctctttagtttaattagatcccatttgtcaattttgtcttttgttgccattgcttttggtgttttagacatgatgtccttgcccatgcctatgtcctgaatggtaatttagcctaggttttcttctagggtttttatggttttaggtctaacgtttaagtctttaatccatcttgaattgatttttgtagaaggtgtaaggaagggatccagtttcagctttctacatatggctagccagttttcccagcaccatttattaaatagggaatcctttccccattgcttgtttttctcaggtttgtcaaagatcagatagttgtagatatgtggcgttatttctgagggctctgttctgttccattgatctatatctctgttttggtaccagtaccatgctgttttggttactgtagccttatagtatagtttgaagtcaggtagtgtgatgcctccagctttgttcttttggcttaggattgacttggcgatgcaggctcttttttggttccatatgaactttaaagtagttttttccaattctgtgaagaaagtcattggtagcttgttggggatggcattgaatctgtaaattaccttgggcagtatggccattttcacgatattgattcttcctacccatgagcatggaatgttcttcccatttgtttgtatcctcttttatttccttgagcagtggtttgtagttctccttgaagaggtccttcacatcccttgtaagttggattcctaggtattttattctctttgaagcaattgtgaatgggagttcactcatgatttggctctctgtttgtctgttattggtgtataagaatgcttgtgatttttgtacattgattttgtatcctgagactttgctgaagttgcttatcagcttaaggagattttgggctgagacaatggggttttctagaaatacaatcatgtcgtctgcaaacagggacaatttgacttcttcttttcctaattgaataccctttatttccttctcctgtctaattgccctggccagaacttccaacactatgttgaataggagtggtgagagagggcatccctgtcttgtgccagttttcaaagggaatgcttccagtttttgcccattcagtatgatattggctgtgggtttgtcataggtagctcttattattttgaaatatgtcccatcaatacctaatttattgagagtttttagcatgaagggttgttgaattttgtcaaaggctttttctgcatctattgagataatcatgtggtttttgtctttggctctgtttatatgctggattacatttattgatttgtgtatattgaaccagccttgcatcccagggatgaagcccacttgatcatggtggataagctttttgatgtgctgctggattcgttttgccagtattttattgaggatttttgcatcaatgttcatcaaggatattggtcgaaaattctctttttttgttgtgtctctgcctggctttggtatcagaatgatgctggcctcataaaatgagttagggaggattccgtctttttctgttgattggaatagtttcagaaggaatggtaccagttcctccttgtacctctggtagaattcggctgtgaatccatctggtcctggactctttttggttggtaagctattgattattgccacaatttcagctcctgttattggtctattcagagattcaacttcttcctggtttagtcttgggagagtgtatgtgtccaggaatttatccatttcttctagattttctagtttatttgcgtagaggtgtttgtagtattctctgatggtagtttgtatttctgtgggatcggtggtgatatcccctttatcattttttattgcgtctatttgattcttctctctttttttctttattagtcttgctagcggtctatcaattttgttgatccttttaaaaaaccagctcctggattcattaattttttgaagggttttttttgtctctatttccttcagttctgctctgatcttagttatttcttgccttctgctagcttttgaatgtgtttgctcttgcttttctagttcttttaattgtgatgttagggtgtcaattttggatctttcctgctttctcttgtgggcatttagtgctataaatttccctctacacactgctttgaatgcgtcccagagattctggtatcttgtgtctttgttctcgttgtttcaaagaacaactttatttctgccttcatttcgttatgtacccagtagtcattcaggagcaggttgttcagtttccatgcagttgagcagttttgagtgagattcttaatcctgagttctagtttgattgcactgtggtctgagagatagtttgttataatttctgttcttttacatttgctgaggagagctttacttcccagtatgtggtcaattttggaataggtgtggtgtggtgctgaaaaaaatgtatattctgttgatttggggtggagagttctgtagatgtctattaggtccgcctggtgcagagctgagttcaattcctgggtatccttgttgactttctgtctcgttgatctgtctaatgttgacagtggggtgttaaagtctcctattattaatgtgtgggagtctaagtctctctgtaggtcactcaggacttgctttatgaatctgggtgctcctgtattgggtgcatatatatttaggatagttagctcttcttgttgaattgatccctttaccattatgtaatggccttctttgtctcttttgagctttgttggtttaaagtctgttttatcagagactaggattgcaacaacccctgcctttttttgttttccatttgcttggtagatcttcctccatccttttattttgagcctatgtgtgtctctgcaagtgagatgggtttcctgaatacagcacactgataggtcttgactctttatccaatttgccagtctgtgtcttttaattagagcatttagtccatttacatttaaagttaatattgttatgtgtgaatttgatcctgtcatgatgatgttagctggttattttgctcgttagttgatgcagtttcttcctagtcttgatggtctttacattttggcatgattttgcagcggctggtaccagttgttcctttccatgtttagtgcttccttcaggagctcttgtaaggcaggcctggtggtgacaaaatctctcagcatttgcttgtctgtaaaggattttatttctccttcacttatgaagcttagtttggctggatatgaaattctgggttgaaaattcttttctttaagaatgttgaatattggcccccactctcttctggcttgtagggtttctgccgagagatcccgctgttagtctgatgggcttccctttgtgggtaacctgacctttctctctggctgcccttaacattttttccttcatttcaactttggtgaatctgacaattatgtgtcttggagttgctcttctcgaggagtatctttgtggcattctctgtatttcctgaatctgaatgttggcctgccttgctagattggagaagttctcctggataatatcctgcagagtgttttccaacttggttccattctccccgtcactttcaggtacaccaatcagacgtagatttggtcttttcacatagtcccatatttcttggaggctttgctcatttctttttattcttttttctctaaacttcccttcttgcttcatttcattcatttcatcttccattgctgataccctttcttccagttgatcgcatcggctcctgaggcttctgcattcttcacgtagttctcgagccttggttttcagctccatcagctcctttaagcacttctctgtattggttattctagttatacattcttctaaatttttttcaaaattttcaacttctttgcctttggtctgaatgtcctcccgtagctcagagtaatttgatcgtctgaagccttcttctctcagctcgtgaaagtcattctccatccagctttgttccgttgctggtgaggaactgcgttcctttggaggaggagaggtgctctgctttttagagtttccagtttttctgttctgttttttccccatctttgtggttttatctacttttggtctttgatgacggtgatgtacagatgggtttttggtgtggatgtcctttctgtttgttagttttccttctaacagagaggaccctcagctgcaggtctgttggaaaaccctgctgtgtgacgtgtcagtgtgcccctgctgaggggtgcctcccagttaggctgcccgggggtcaggggtcagggacccacttgaggaggcagtctgcccgttctcagatctccagctgcgtgctgggagaaccactgctctcttcaaagctgtcagacagggacatttaagtctgcagaggttactgctgtctttttgtttgtctgtgccctgcccccagaggtggagcctacagaggcaggcaggcctccttgagctgtggtgggctccacccagttcgagcttcccggctgctttgtttacctaatcaagcctgggcaatggcgggcgcccctcccccagcctcgctgccgccttgcagtttgatctcagactgctgtgctagcaatcagcgagactctgtgggcgtaggaccctccgagccaggtgcgggatataatctcgtggtgcgccattttttaagcccgtcggaaaagcgcagtattcgggtgggagtgacccgattttccaggtgccgtccgtcacccctttctttgactcagaaagggaactccctgaccccttgcgcttcccaggtgaggcaatgcctcgccctgcttcggctcgcgcacggtgcacgcacccactgacccgcgcccactgtctggcactccctagtaagatgaacctggtacctcagatggaaatgcagaaatcacccgtcttctgcgttgctcacgctgggagctgtagaccggagctgttcctattcggccatcttggctcctccccaccacttggcataattctatggagattcatccaagttgttgcatgtaccaatcgtttgctctttttcactggtgagtagtattccatggtgtggatgtaccagggtttgtttgaccactcacctgttgaagggcgtctgggttgtttccaggtttgtctattacatataaagctgctataaacattcatgtacagattttatgtaaacatatgttttaatttctctgggataaatacctgggagtccaattgcatttttaaaaaactcaactcttgtgcacagtgtgccattttctagacccaccagtagtttatgagtgagccagtttctctacattctcaccaacgtttggtgttgttgctaatttttattttagagattttgataggtatgtagtgatatctcattgtgattttgatttgcatttctgtgataggtcatgatgttgaacatcttgtcatgtgattatctgcaatatgtacatcctcttcagtgaatgtctcttcatatcctttccccgttttctaattgtttgttttttttttactgtggagtttttttctaattgacacgtacttcacacaccacacaattcatccttttaaaattcagtgggttttgatgtattcataaggctctgcaaccatcaccactatctaattctagaaaatttttatcactcaaaaaagaaactctgtacccattagctctcattctgcttttatcccctcccccagcccctggcaaccactaacctcctttccatcgctatggatttgcctcatctagacatttcatatcaatggaatcatacaatatatggcctttgtgtctggcttctttcatttagcataatgttttccagggtcattcgtgttgtataatagcacatatcagaactttattccctttctgactgaataatactccactgtaaggatctaccacgttgtgtgtatccattcatcagatgatggacatttgggttgtttcttcttttggctattctgaataatgctgttatgagcattcatgaacaagttttttgtgtggacttaygtttttatttattttccacccaagagtggaattgctgggtcatatggtagctctatgtttaactttttcaggaactgacaaactgtctttcaaaggagctgcaccattttatattcccaccagcaatgtatgagggtgccactttctccacattcttgtcaacacttgttactgtctgtcttttctattatagtcatcttggtatgtgtgaagtggaatctcattgtggtttgatttgcattttctgaattattaatgatgagcactttttcatatatttatttgccatttttatctttacagaagtgtctattcaaatcctttgctcatttataaattgtgtttttactgttgagttctaatagttctttatatattcatatttaaatcctatatctaccaaatatttttacaaatatcaatacaaaatatttttcccattctttgtgttgtcttttcactttcttgtgtctgttgaagcacaaaagttttaaattttgatgaagtgtaacatctattgatctatggcattgattcttttaatcaatttggtaatattgcaatattaacaatattaagtcttctgatccatgaagacttaagatccatgggatgttttttatatttatttaggtcttatttaatgtatttcagtgttgttttgtagttttcaatatataagtctttacttcttttgttagaaataaatctaacaaaagaagttagaattagtattttattctttttggccaagcgcagtggctcacgcctatgatcccagaactttggccaaggcaggtggatcacctgagttcaggagtttgaaagcagcctggccaacatggcaaaaccctgtctctactaaaaatacaaaaattagccacgtatggtggcatgcgcctgtaatcccagctactcaggaggctgaggcaggagaattgcttgaacccaggaggcagaggttgtggtgagccaagattgcaccactgcactccagcctgaacaacaagagtgagactctgtctcaaaaaaaaaaaaaaaaaagaagaagaattaatattttttatattattataaatttaattattctctcaggttcattttcagattgcttattgctagtgtatagaagtacaactgatttttgtgtattgatcttatattctgtaattttgccaaactcactaatttttttttttttttttttgagacagagtctcattctgttgccaggctggagtgcagtggcgcgatctctgctcactgcaacctctgcctcccgggttctcctgcctcagcctcccgagtatctgggactacaggtgtgcgccaccacgcccagctactttttgtattttttttttttttagtagagacagtgtttcaccacgttggccaggatagtctggatttcttgacctcgtgatccacccgcctcggcctcccaaagtgctgggattacaggcgtgagccactgtgcccggccggaactcactaattttgtgtaggggtgtgtgtgtattcttagaattttctatatacaacattatatcatctgcaaatacagatagttttactttgtcctttgcagtctggaagcattttatttatttttcttgcttaattatcctgtctagacccccccagtaaaatgttggtgagagcaaacatccttatcttgttcctaatcttggagggaaagctttcagtctttaactattaagtatgatgttagctttctgtcttttacctcctgtttaagattatatttatgttttattattttattatatatggtaatagaaaatccaaacaatacaataagatataaagaaggaaacaaaaactttctccccaaatcccaccattatcaatatacttaaaagttttttttctgcattatgtatatatatggaaaatatagacaactttacatacaaatcgtctattttgtgaccagggttttttttctttttttttctttccattcaatattggttcatggccatctttacatgctatggccaaggatttgcaccatcattttagagctgcccacattctatttagtatggttgaactatcatttatctgagcaactctctatgaattctttttttttcaatttttatttattttttgttttttggagacagagtctcgctctgtcgcctgggctggagggcagtggcacaatttcggctcgctgcaaactctgcctcccgggttcaagccattctcctgcctcagcctcccaagtagctgggactacaggtgcccgccatcacacctggctattttttttgtatttttagtagagacagggtttcaccatgttgcccagggtggtctcgaactccttagctcaggcagactgcccacctccgcctcccaaagtgctaggataacaggcatgagccaccacgcctggcctcttaagaaattgtttcccttttcctggcactattataactgagactgtgatgaacatcctcatcatattcttcccaacattgttgggtctttctgtttttttttttctgattttttttctttatatctttgtcagatgatcactatagatttgggggcagggaaccattaataatatgatcagaattgggctttagaaagctaactttggcattgtcaacttaccatgtgatcttgggaaaaccttttttccttctctgggcctcaattttttcatttataatttgaagagactaaattactggttatcagacttgggtgcatattgaaatctcctgagaagtttttaaaaacacagccatcrgagtcccactccccagagattctgattcaggtagtttggggtatagcccggacagcagggttttaaaagtctccttaggactagatgattgaatgtcctccttcaaatactcttctgtcgtggagctcttacttgggcacctgctcagagagaggctgttgtaaagcagtgaaaagatctgttcttggcatccagcagacctgaatttgaatcccagctcatttgctcctggccgtgtgacctttcaacttctctaaacttccatttccctactcttggagaggaggctaaaatcccctcccactactcaagagtttctgcaggtagaggtggtttaggcactgtacacatggaatgagtggtgattttattttttattttttattttttcttgactaaagagccagcccctgggcaacaaagtggaaatggagattgtgagcatgttggaaaaaaacgcaacacttctcaaattyggctaccactttacccagcaaggaccccggcttcgggcatccaacgcaatgatgaacaacaatgaccttggtgagtagaaatatgcttcctgccctgcccgcagtcctgttattccctccacctgtgctggggatgtcagggaaaattctgtakatgcctctccgagtcttcttgagccttgattttcacattgatcgcgtcttccttgttttctgtgtttgtacctcatctccaccctggactacgagctccttgacttcaggagctaaggctgagtcctctcctcctcaaagcacagctcagcacaggctgggcccagagcacacttaagtgtgtttgcagaaggaactgaaatttgggagggcacaagtctcgccgggagtattttcctcttctgaatacccttttctgaactcatagcgtcctctccaggtcacacagtctagatttagccccaaatcccaaaactaccttccaataggactaccaaaatctgagcctaggagacttcacattgattttaaggtaaaagttgaaaatgtcaacttcatagtaaagtaaaagtagggtatattaatgtaatctcaattaaaggcatagtttgtttttttctaaaaggaaaaattattatgaaggagacattatcaggwaattttaaaaaataaaaaaattaagaaaatgaaaatatcacaatattttttgataaataaacacttatatacctatatgaacaaataggtatataagtcaactgaatgaagtttgagcaatcatgatcttacttgcagatgccggttgttcacaagctctgtgtagttattgcttatgtatattcctgctggctgccaaaaaagaatttgatatagcattcaacaaagggagcatgactgacaaggctataggaaaacaagagggggaaaaaaaacaagaaaagcagtaggtctatatcattaacatgaatgatgattatattgagccctgagtttcctagaaccaagacagcaggaagccaagccaagttacattattcttatcacagaagggaaggaagcataatgagtttgaaaaaaaaaaagaaaagcctctttctgggactacattgtgaaatgaacttgtgttttaaaggacagcatcttcagtgagtttctcatcagattcaaacctgctctacacaatggtttccaaccctcgataaaatgcaaagagcctaatatgaatgctccactcaaagtatgtcacttcctggtgatttatctgaggccaggtcactacctggaagccctcgaagaacagagatgagtgtgtaggagtgaatgctcaaggcaggtgtgcacagaccccacatgcacagataaccacaggattacacacacacacacactttagatcgagttattaaattccacaaacatataccaaaattctataggttcctgcttgtaaggatgtcacagcccaggagctattcattcattgctcactgcaaatgccactattttctagagcctcgggtttagaaaagcccattttttaaaatgtgtgcagagtcttggtttatcagaagtatccttacttgaaataaaataagaacaaacacaaataagaatcataattattacatcatctcacagatgtcatagctaaactgaatggttggagaaggccagcagctgtgatctggctgcagtaccagcacggagaagccttgcgtttctattctatatgcaataatctcatatttgtttccccctcagttaagtttcttctgtgccccttggctcctatctctgggctaacccagtttttgtcctccaatggcatgatggtatggaggtcttgtttctggggatagaggctctagatgagcagaggtcacaggtgctgcagggggataccagcatcatctaggagttggacaaaatggcctttgaaaactctcccagtcctgtgaatctgagagtccaaaattcaggcctgactcccatcaccaagaactttcagaggccattgtaagaatgtaggatggtagaaccagaaggacttagagcttatccctccagttcccttagaaagaaactggagcctggggtgggggtagggggtctaggcagcagctcagtcaggtcacaccagctgttagtgacagcaagcattttctgggcaanttttgtgtgcctaggactgtgctaggtgatatcagaggtagcagaaaggctacctctgactgaagaagctttataaccttttaggggaaaaaaaagactcaaagscatgcctaaaaattcaagaatgcctacaaattctatctaaacaaagtgaggaaatgatttattgagacagaggccagttaggcaaagcatgctggttggggatggggctttagccagccttgaaaggaagagataggttgatggaggaggtctagaggcatccctctgggggttctaggagtattaggaagtagtgctgggggtacaaaggagagacagaaggatctaaaaggattggaggaactgttaaaaggagttagacctaggaggaaaaatgagttcacaaagtaggaagggaagggcattccaagcagagggaacagcatgagcaaaggcaggacagttgaaagtatatgggatgttcacaaggaatggggctgggtaggtgtttgggtggctrcagcccaaggcctttaatgtcaagctcaggggcctggcgatggaagcaggtgggaagcagagaccgtggcagtttcctggacggtgatgccaggtgataaaattgggcctctgggttaccccagggaactgtgggcagctgctcccttggggtttcctacagaaggaattagagatgaatcatctcagtgattacagggaacagagtgctacttggtgatgtaggatctctagctttaaaatgaaatttgcgcccatctgctaatttttgtaagagaaatgtttgttatggcagtgcctcagcttcctcctgactttacaacagattatttgcatcctacrttaatgccgcagtgaagcagacagacttcatgttttccaactgaatatttgtatcgtaaaagcctcctgccagctcctcctygggactgaggctgttagcaggcctggcagcagggagcgcagattgggaagggagcaggcctctcaggcctcctgctcattctcacctgcctctgctgsctctttgcccatggctggggcctctgcagtacttgggctcctccttgggggacattgagtccccaaggctatgaggacagcgactggctctgcagacaggcggtatgcccaggatgcatcctgaccagtgcgtcttcggtcctccccaccctgggcaccaagctctaaacagagcgttctgtgagtgcagggtgccagggaggagccgagctgtggatcccatctgcgttttcccacagcaatacctcagatgactgtcatctccacactatttatagcaaagagccaggccaagcatggcactcaggtcctctaaatctgccactgcagctctctccacttagcaaaatctgaattgcagcctgtgagttaagacagttgtgtgggttggggtatcgtgtggagggagagtaacrtgtttaaaagcagaaaacatcccttcctgggagtcaccattttacagtattctcagggaagacctttgcagcaagcagcccagacatagcacactgcaaagcaatttctaaaaaaaatgtattttattgtcaattgacaatttgtaattgtatatatttatgtgatacaaagtgctgttatgatttatgaatacaatgtggaaaaattaaattaagtgaattagcatatcatcacctcaaatactttttgtggtgagaacgtttattttttagcaattttgaaatgtataatacactattattagctatattcaccatgctgtgtaacagagctttataaaacaccttattcctcttgtccaactgagatttttgtatcctgtggccattatctccccattycccacccacagcttctgtaatgacagttttactccctgcttctatgaggtcaattgttttagattccacatataatttgtctttttgtggctggcttatttcacttagtataatgttctccaattccactcatgtggttgcaaatgaacaaatttccttttttttttttttttttttaaagaaaaggctgaatcgtactcyattgtgcatatatcccccagtttctttatccattcttgttgatagacacttaggttgattccttattttgggtattgtgaatgatgctgcaatgaacatggagtgaaacatcttttcaactgattttaatattttgggtaaatatccagaagtgggactgctggatcccaaatcagtttcatcatagtcccccaaacctatctcagaaaaggcagccaggtacggtggctcacacctgtaatcccagcactttgggaggccgaggcaggcggatcacctgaggtcaggagtttgagaccagcctggccaacatggtgaaaccctgtctctactaaaaatacaaaaaattagccgggcatggtggcaggcacctgtaatcccagctccttgggaggctgaggcaggaggatcgcttgaacccgggaggcagaaattgcagtgagccaagaccacaccattgcacttcagtgtgggcaacaagaaaactccatcaaaaaaaaaagaagaagaaaaaaagaaaaggctactcctttcctcacagccacccaagccagaaatctgggcctgttcctagatgctgcctccaccccagccagccagtcacctccttgccaatcccagtgtcctgccgtgtatgttgagccctcgtcacagtyatctcctccaacatcctcaggcccccagctcctccagggcaggcacccctggcactcatcccaagtctccttccgaagcttgccttgtcacccctccacttagaaccctcacttgcctcccattgctctcagtcaggccccttgaaatgactcccaagtctcttaataatagctgactcttacatggcacttactgtgtgttagagactgttctgaatacttcccatctcactagctcatgtagtcctccccacaaccaggtgagacaggtgctattgttatccacactttacaagaaggaaacagaagtctagggaagtaggtaattaacattacccacaatccgtgggcaggaccgggatttgaattggcaatgtggctccagtgcctgggtgctccacattgggagatggtcccatcaggaggtcgtctcttgacatctccaacaagccatccctttgccatgttactaccattccaggtagcctgagtgcccccaagtgaccaaggaaaagcttacccttagagggtctttactcccaatgccccccaccttcycatcctctacctttttgttgtttaaaattcagctgacctgttagttgccacctgggaaggtctgaccacttcattctttatgcctctcatacctcagagagctgccagggcatctctaatacttcatatttctcaaacagtagttctcaaacattgtatatcttggttcctgttatactgtgtctttacttctgattcttgtgcttggcacacagcactcagtacatgctgccgaatatttaaatgaatagaaagtgctttccaaaaacatgatggaaatgttcaaatttggcaagaagtggcagaggagttcaagcagcagatggaggttggtccggacgactggagagcccttctggcattcacaataaaaggagtctctggctcttgcaataagcagtgaagagttttttaaagaaagtaaagaccagacagaattgaaggaggatattgggagacccagcttttactcccagttttgtgacttattcgtaacttggaataagttacttccctctcctggtctcaacttccttcatcattaaaaagggaaaaaaataatacctgaataaatggatgcctttcccttctctccatccagtccctgaaaaagccagtgccagggggccgggtggggtggctcacgcctgtaatcccagcactttgggaagccgaggcaggcagatcatgaggtcaggagatcaagaccatcctggccaacatggtgaaacactgtctctactaaaaatacaaaaaattagctgggcatggcagtgcatgcctgtagtcccagctacttgggaggctgaggcaggacaattgcttgaactcgggaggcggagactgcagtgagccaagatcgggccactgcactccagcctggcaacagagcaagactccgtctcaaaaaaaaaaaaaaaaaaaaaaaaataggcaagccagtgccaggggaaccatgcacacacacacacagatccggcccagtggacacaatgagggcaagtaatggaaaataacccccccaccaagccatagggtcctttctgttccctcaaccatgggccagggacttggatttcagtcctggctctgctgccagctctcagggactggggctcttttcttctgcagggagaaggagctaatcctccctgtgagaatcagatgcgatatggatatggaaaccctacccacacaaggctcaagtctactgagggaggcactggactgaggctcaagatgagtcaaaagtcttggttctagctgggtgcggtggctcatgcctgtaatcccagcactttgagaggctgaggcgtgggggatcacttgaggtcaggaattcgagaccagcctagccaacatggtgaacccccatctctactaaaaacacaaaaattagccgggtgtggcagcgggcacctgtaatgctagctactcaggaggctgaagcaggagaattgcttgaacctgggaggcgaggttgcagtgggccaagattgcgccactgcactccagtctgtgtgacagagcgaaactccatctcaaaaaaaaaaaaaaaaaaaaaggcttggtcctgtctggtactagctttattgctttaagcaagaaatataccctctctgccatactttcctcatccataaaatgggaatggtaactaacattccagcagcgttggaggggctccgatgaggcaatgaggatggccctggtgggcatgcctgcacagctactatggagatgcttaaaagtctggttcatgtaaactctttggtcacgttgagcaaacctcttgtgctctttgggttttggtttttgtcccctcacatctacccccaagaagttggacattctgatcatctaaggaactgggctggccccacctcccttgtgggtctgctttgtatggccagtgtcatgcacaagctgatttggtttttgttgcagctcgtattcatcgatctggtggctgcaggtctaccgcctcagcttgggaacctgaagacatctaagtatagacggactttttttccctccaccatagcttcctgtctctgccaacaccagcaggcctctcgactgccacctactggctctacagacttctttgacctttctcttgtggctcatagagcttgctgcttggtcttatctgcagacactacaattaatttcaaaacactctcccttgttacaacaaacagagcccctcctgcccctccctgcatcctcatcatcctttaagctaacgtctccagcctgcaacctcctggctagtgctttcctcttcatggcatttaactactttgtcacttgaacagtgttgagcataactgtcttgcccccggggaaaatggcaaggttaaacataaggggatacagatactgcagggtaatctttcgggtggaaactctcgtttatataggcaggaggtaggccaggagctcccagacatagctgggggaaatgtttccacctggttaagaccctaatctcattaagaagactgactaaacttttaactcttatctgaacaccggagtaaagatcttcaactggagcttctgtaagcaaagaaaatagccgacttataacgtgggactgtgtggtcagccacttagcagatatctatgaatgaatctccactaccacagaccchcatcaatgaacactgacagactggagggctgttgtacaactcacacatactgtcctttcaaaacaacagacttcagactctgttaacaaaccaattagtgcgaggtttcacagtgctttctcagcaacagtgctggyccctggtctacagggaaaagtgccttatatcttatctccattcctttccagtgaggaagaggaggcttgcggacctgactgggcccatcattcccaagtgccggagtggtgtctagtgtgtggcggtggagtccatgcctttgaactggatgtgttctattgatgacctgtgctctgcaggggaaaccagaaggcaaaatgctggcagcatgaaacccttttgtggttcagttctttatgcactaaggttttaggttgactagtggttgtagttgaaaattttataaaataccgttaatgtgaagtttttctttagtcacagaagttgaatctggttattatttaaaaactagaagcccccaaaccagcagatcttactgaagatgatgttccagcagcagcgacttagccccaggagcccagtttcaatggccttgctgtgtggtgtttcaagtgcatttaaaatgtgtgacacagaaacggcacactcttccacatgcttttgaagtattataaaamactttattacaaatttgtcttagctattagcaaataaaactgattatcattctttattaaccctccttggaattttgaaaacctcgattaaagttgccaaattgattactggatccagaacacaattttcccctcagaacagatagacagactgaagccactgaactctgccaggagtcaacatgagattccttttgctggatatgcagaaatgayaggaaaaaaaccaatggtgaaatttcaagtttcaaaaaccaacctttcattaccaatcccaggcaacaaacatgtccctgagtgttctttaagaacatttgggatttatgtacaatttaatactggagttagaactttttccttattgaatgccaaccttatgatggatgtgaaaatctacggccaaatacttttgaaaacacctttctatattgcacagtgggcaaatggcttatgtgaggtaagacactagagggataaatttccagatcaacatggctatggtatttagtaatggcccagcttagagacttcagctactgatctcatcacttattagacaaattgctgctgaccttacgcctgtatattaagcctccgcaggatgccggacaatggtgaagaaactccagatatcaaggaattgggaaatcctggccaaaccaccccaagatgattacactgaaatgtagtattagtactgctgccagatctctttttaacatcatgtgcgtctcttgggatccagcaaaagtgttaagccacaatgcccttgtgccttttaatataccacagtgccagttaaactaatatttttgtttgttgcttttgggagttattttcattagtgatttcagcaaatctcatgataaaggacaaggtcaagaactccagagcactgagcagagaggctggtgatgaaaaggtgaaggcctgcgcactgaactgtaaggcagtgggcagtacagggtaactggaggcggggccagggcctcagcgctatggaagagtgtccactgaggctgcacatggcccaggagtggcaccatgttgcagggacaaccatccccatttggcttctccttaaaacacaattgcagctgcattctgcatcgctgaaaactgcaatataatattaaatctgttggtctatgcatggctgcgtatgtgtttcttggaacctgtgtgacagggayatgtgcctggcacactggccagaagactgggcagccaccatggcagtgctggatgacctcagtaagaatgtgtcatgtattccaggtgctgatctaaaaactgtggctcaaatgtcaccgagcttatatgaagctcccagagagaacatttaaaagctcagagagtaagtgctggggaaagcagagctatcagaggaaatctctcatagaaacgaaaccaaaccaacagaaaatgaagaaggccacatctttaaggccacctctgcctctatcagatgagctgctggtctagatcaggggctggcaaacttttctgtaaaaggccagacagtaaaaatttccgattttgcaggccacatagtgtctgttgcaactattcaactctgccatagatcatgtgtaaaggaatgggtgtggctgttcaataaactatacagttgacccttgaacaatatgggtttgaactgcatggctgcacttatatatggatttttttcaaccatacaggttgaaaatacagtattggcagggggcgaaacctgcgtacatggagggctgatttatcacatacgtgggttctgtagggcccactgtgggacttgagtatgcattgggtttttgtatactcaggcgttctggaactatcctccatgtataccaaaggatggttatttctacaaaagcaggaggtaagcccaatgcacagcttgcagattcccctcaggcgagagacagaggttaagggtagatggcagatgacctaagtggcttgttttaggaggccactcccagggccacasctttcatgtgtttgccaccagggtagaaggtctgctgacaagggcaatgactactaacagccccagctgcatggmacagaaagggcatatgctgtggccaccaggctcaggctctatccctcagcagctttgggatcccatgcagctcacctattttctgtgctctagcatcatccaaatcagaatgtctcaggtaagtggtagacaacgtgactcctcccctcccgctgtgaagtgtagacggctgccacggtggcagcggccagaactgaagttcccgatttctctgtttctgcagtcttgccatgctttctctgtatagtcaccccaaacctacttttaccgagggcctgggaaaatgccaaaggtgctgctcacataagcactggcccatcctcatcagcatcaggccctggctctgggctcacaggctgtcgcacatgctgcaagagttccctaggtatgcgtggccgtcgggctgtgcactcgcattcctctttaaagctgtcttgcatagggcctgaaactttcctgctccccttgtcttgacatgtgacacaacaggctgtgaatccttgtccttgacaggcagggcaggtcaaaacgagctggcggcactggggagtagagcagagtttatactggtcccagcgggctccacagtatgaacactctggggaggaaggaaaagccatcattataaacacatrcattcacacacacgtggacaggcattgctccctttgctgactagaatctcgtagatcctgtggaacccggggaaggtttccaaatagtaagtcttctgtcttctagcaacaacaactaaccaccacccccaccacccagcttatttttttgtgggggtgacttctggtaactgtctgcttccagtatttactgactttttttttctttttcccatctagagaacaggtggtaactagatggtaatgaaagtttctctctctcaccagctattccaaagctggccaactacctcccaacccccttgttaagtggtcttttcctctttgattgttcccttttccagkggggacaacacacctaaatacaggcgataacccacctacagkgaacatgcgcagtccacacccctctccccgaggcctgtgtctctcctgctgttgctagggcacttgaccatctgattcctaaaactcacaccatcttcttcacctgtttttccctgatgacctcctgttactattgataacatcattcttcctcacttttccttaccttgcttatctaagctacctctgagccttccctctctccttcatactcacacgcaggtacccatcgagtccagccaatataacctctgtaaaatcaaatctactctttctacttgtttagaatttatactccatctagctccaaaacagatcgaagtagtgatcaataagagacaactcaaaaccactaaaatgaaaataagaccaagaaagtaggagaggacaatcaaacgcaaatcttactcaaatgtgcatgccacctgggtccacagagagctatgagttcctaaaatcatgtgtgctacggatttacttggtagtctggtgaagactatagatcctggcctagaaaaacttttttgagacagggtcttgctgtgtcacccaggctggagtacagtggcatgatttaaactcactgcaacctcaacctcccgggctcaagcaatcctcctgcctcagcctcctgagtatctggtacacaccaccatgctcagctaatttaaaaaagtttttgtagagacatagtgagctatgttgcccagactggtctcaaactccagggctcaagtgatcctcctaccttggcctccaaaagtgatgggattacaggcatgagcctctgtgcctgacctagaaaaatatttttaaatgcataaaatatgtaagattacaaaggaaaccaactatacagaaatacaaaatatcaaagtctttttcaaaatctgtaatatataataagacgtgccatttattaacacattatatatcaactcttagtggtgggcctaataactattttcattttgaagcagtgatgagtataaatactattttgagatatctgaggcaactagaacatgatatgaaagtattgtgaatcctactgaagacaaagtcacaggtacattaatacaactggtactttgttgcctacattcataactaaaggaaatgcttcattttagtgaggtgttattgaaaacaaagatacaattatttttccatccaaattcacagaatccctgaaatctatgtaccaattccaggttaagagccctgaattagcccagtagtacagctcttggcaggtagacaggcaggcagggcaggtgagatgatccccatgttaatgggcttgtccagctagcaatggtgaagccaggatcccaacccaggcctcctgactcctgggctagggttctctcagctccacagctgggaaaatggtggcacaatgtacttattttccctgcttattcagtgctcagtaatgagcactggcctgtcttccctgtgtcatttttctagaatagtgaactgacaatgtgcttcatttcagtttgggctctgagcctgtgctgacctacctgacaccacatcactgttgtaggacagagcatagcgttcatcaaaaacaaacaacttccctttgtaaaagccatcaggaaactcttccaggtacttgtggatgccacccttgagctggaacacctccttgcacactccctaggtgtggaaaaacaacaggaaatctgaagagccagcagagacctgttaagatgctcacggaagaacggcgcatggcgaggagtgctgacgtagaggactcatggccgctgctatcagtcaggggctcctggctcccactgcgggacactgaggaattgctgaccaaggggtcaaggcaccaactggccagatcttgcctcctagggggatgggtgatgacagcaggcagggccttcaccctctagatcctgggaagcccaactatttttgctgccccctaaatataggaagacacctgttgggacatgtaatgttactgaatttgctcttctcaggatcaagcaaaaggatcaggaaaagggagatgttaactaatctctcccttttacatctgatgagtctctatgactgttaagtgtttttcatatcttgagattaaagaccctcagattttgtacttacgaactccatgctggagccatacgaggggtgaaggcatgctttggctgcctgggggtggggagtactgggggcagcggacagctccacgtaagctgctggtggagctgcctccttcactgccatgcccacagtgccccggggtggtggctcaccttggctttgaggtaggctgaaccccgctcacagcggatgcccccggtacagtacatcagcactctcttctctctgaaaagttctagatttttgtcaacgtagctagggaagtaactgaatttcctgatgtctggggctaagcagccttggaatcgtccctgtaacataggagcaacaaaaggaaaattatcagaaaaacatacctggtaggaacaaaggttctttttgtacccaacaaaccctacttagcaaagaagcccctgccagttgctaatctcatccccactctgacctttcaacttcaagatctcaacttaaaaccgaggctgtgggctgtgggtcaccttcccagggtcctcaggggaactggagaggctgcccaaaggcaactttgcaagatccttgatacatgtcaaaggcaggctcatgggagtcacaaagtatattatgtgcctggatgcctttaattcatattttcttagactctctcaccagatttctgagttttaggacttgggttttctctgaagctgccagtactgggaggagatccatgtggccacaggtgggcacacacaaggtccccttgggaaatataccacactgtgggaatggggagatctaccaattcagagaactcagttctggcttttacttactattttgctttcatagaagtttctgcaatcaagaaggatagtatcactttgttcttgatttgcctgagataaaaacttttctacttctttatgaaattcacctggggataaatggattcctaaaaccaaaccaaaaaaattatattaaaacaaagacaaaaaaaccaaaacccaatcatgactcacccagcctgacttacgtgttgctttgtttctttccacccaaatctcttctcttcataattacaactgtctgaaaagaacactacttgatgatcatgatgaaataacttagtaattccagtaattccaggtatcctcaatctccctcctcctaaaatgagggcaatggagacctggtagtttagaaataactagtcaaagaattttgcatcctcatacttggcctaaccctagtgataaaaaccaggcaactgggatctaaattgccatgtgaatttgctggtccattgtatggtcactggtaggtcaggaaatggccactgctctattgtcactgtacatggaggagctgggcaagtacgtggctgactacaggctttgtaaactgttctatattaaggtcgaacccacgttgaaggctaagaacccacaggcaggtgtgagcaaaaagttatggaataaagttggaatagatacatttttaatgcaaaggagcaagaagaatgtgtctaagtgtgtgtgcatgagtaaaagagaaaagggcaagaggggtggacaacagaaacgacatatgagaaagaaagtaaaggagagaaaaagacaggaaagctagaagatgggtaagtattaaaatacaaggggaagcctggggaacatagcgagactctgtctctaaaaaaaatttaaaaaattagctggccatggtagtgtgtgcctgtagtctcagctactttggaggctgatgcaggaggaccccttgagcccaagagatcaaggcctcagtgagctatgatcacaccactgtactccagcctgggcaatagagcaagaccctgtctcaaaaaatatatatacaaagggactaataggagagaacctcagtctcctggggctctttgccttgtaactctctaggatagaaatattcccctatctttgagggtccagaaatctcagtagattgtgaggaacttttggtgaatctgcattatgaggtagccatgcctcatgggcaggggctctggtgactcagttacctaccactcatgataaagctttacagcaccaaaggagcctcattcccctcagagaggaaccccaacaaccaatgaaactactccacaccaaggagagatgagggcccagagccaggccaaggaatctggattgctacctgcctgagttatggttgtaatgagaatgtagtaaggccagattctatataaggtactgtcacacaattacatggatacaaaaagagtggggtgaaaagggagattcaaacatgggacgtaggccaggcatggtggctcacacctgtaatcctaatgctttgggaagctgaggcaggcggatcacctgaggtcaggagttcaagaccagcctggctaacatggtgaaaccccgtctctactaaaaatacaaaaattagccaggtgtggtggcacattcctttagctcccagctactcagtaggctgaggcaggagaactacacaaaactgggaggcagaggttgtagtgagcattccagcctgggcaacagagtgagactccgtctcaaaaaaaggccaggcgtgggtgaggcagctctcgcctataatcccagcactttgggaagctgaggcaggtgaatcacttgaggccaggagttgcagatcaaactggtcaacatggcgaaaccccgtctactaaaaatacaaaaaaaattagctgggcgtggtggcgcatgcctgtagtcccagctactcgggaggctgaggcaggagaatctcttgaacccaggaggcagaggttgcagtgagctgagattgcgccactgcaccccaacctgagcaacagagtgagactccatctcaaacaaacaaacatgggatgaaaagcatggaaatgtgctaagacttctacctgcaggaagccacaggaaaccaaacctgttccctgctgctatgattgcagttgttctactggccctgagaacgattgtttggacagtgaccagcatggatgtgtttaaaagacatctctttaccaggtgcggtggctgatgcctataattccagcactttgtgaggctgaggtgggcagatcacttgaggtcaggagtttgagaccagcctggccagtgtggcgaaaccccatctctactaaaaatacaaaaattacccgggtgtggtggcgcacacttgtaatcccagcaacttgggaagctgaggcaggagaatcgcttgaaccccgggggaaaaggttacagtgagctgaaatcacgccactgcactccagcccaggcaacagagcaagactgtctcaaaaaaagaaaaagaggtccctttaaacttccttcaagtgaaaacaagacagcactgcctagagcccactctctgcctgcaatgtcctgcagtgcccaggaaaagctgtttgtagtcatactgcctcctgctaagatgggaacagtaagcagacaacagctctttctggccctcatctccccatgcatgagtctctttcccagatgcctgtatcctaatcccgtttccccctggcttcactcttagacttctttcaaaactttacatattacaaaatgaacaccatggagtcaaccagacctttgtgcttcctgatcaaagaagacaacagtgcttatgtagtcttggtggcgggagaaaaagaaatcaaattggaatctgatcaagtctctagtcctggttgttaatacagtagctactagccacatgtggctgacaagcacttgtgctataataggggtgacatacatactgaatctcaaggacttagcatgaaaaaaagtaaactaataattttttatattgattacatgttgaaataatatttttgatatactgcattaagaaaaccatattatttaaattaatctcatctattttttacttttaaagacatggctactagaaaatgtaaaattgtgtagctcacattatacttctattagcactactctaaatctaatgatcaacttataggaaataaagaggacagagaaatatatcttgggaatacaattattattgtccagattatgggaaactctaaaggtcaaatgatccagttccttcaaaaataaa

SEQ ID NO: 6853 - DNA, 37443 bp, Homo sapiens
aagtgctaaagaaaaatagatcttgccttttaaaagattagtttgttataaaggaggtatggttgtgagcaaaaatactcaagagacccttacaaagcaacctaagaatctcttatgaactccaagctgcatgctatttcacattttaatgtctctggatgcatttaaaatcaattgaatgtcatagtttacttagtagcatttgttttttttcttggtggcacataaaataacagggcctgtcttataatcaatagcatcttagagtcaaggaactatgaaataattaaatggcaatttactttatagcaatgaacaaatatttgtcaaagggcaaatattttttgtctggagttaataaagttaatatcttttaccacaaagctagaggtcaacagtaccactattattgattgccactacctggctccggctcaacttccccttgctcaggaggaaagcacagcaggcaatccctcagctctggtttagggcagctgccacaaattagtctgacaattaggttaacaatttcaaatgacaatgcaaccaatgggtaaaacatgcataaagaatcctcataaaggccaggcaggttggcttaatttaaccactttgggaggcggatggaggaggatcaactgaggcaggagtttgagaccagcatgggtaacatagtgagattcccttctctgcaaaaatgtattaaaaattcactggcagtagtggtgcacacctgtagtcccaggtagtcaggaggctgaggtggcaggatcacttgagcccaggagttctaggctgcagtgagccatgatcgcaccactgctccccagcctgggtgacagagcaagatcctctctcaaaaaaagaaaaataggctgggcaaagtggctcacacctgtaatcccagcacttcgacaggccaagttggacgaattgcttgagcccaggagtttgagaccagcctgggcaacatggagaaaccttgtctctacaaaaaatagaaaaattaggtgtgcacctgcagtcccagctacttgggaggctaaggtgggatgagcacttgagccagggagtttgaagctgcagtgagccaagctcatgccactgcactccagcctgggcaacagagtgagatcctgtatcaaaaaaaagaaaagagaatcctcaagtaggcagaatattagaacaaatgagatgacaagagagttcagacaggaccacacagtgttcatggacacagtgtttgagggacactttcagagaagtcagtttcaaggagtgagtccatgggggaagctggacattcagaaagtatttggaaagcagtgccatatgtagatgtagatacaggttggaaaagccagggtgacagagtacaaagcatatggacgctgacaacacagacatgagttcaaatcctcaccaagccacacattagttgttgcctgggaaagttacttaattgttttaagcctcagtttcctcctttttattatttttagttttttcagctacaaatagactttatttgatgtaatgtaataaaacattttcaagtttaacaatatgtatctgaccataaacaatcacttaaattatgaatataagtatacgcggtcacattagcaaatctgcagttcaggaatttgtacaaactttgtctgaaaggacagtgccttcttcccctttcaggaaaggcagcccttccccatgtgtggtaagaagcaatgtcaatgggagttggaagaagtccataatccatgtcgaaattccactttatcctgagaggacagcttgctttattgtagaaaaataatattctctttcagttctctcttatcaaatgaaggattgcattcattttgccccttgtaggtataggtactcttcttttctcatctactgtctttctgtctccttagctcatacttattacacagttcgtttaaaatatatatatctgcaaggagacattttctgttcccttacctgcccttcatgtctaccactttttggtgggtaggggtgggagtcaggggacagaactgctttggcacagagttgatttaagatacagagaacaggctgggcacagtggctcacacctgtaatctcagcactttgggagtccaaggcaggtggatcaactgagatcaggagtttgagaccagcctggccaacatggtgaaactccttctctactaaaaatacgaaaattagccaggtgtggtggcaggtgcctgtaatctcagctacttgggaggcagaggcaggagaattgcttaaacccaggaggcagaggttgcagtgagccgagatcgcaccactgcactccagcctgggagacaggatgggtgagacactgcctcaaaataaaaaataaaaataaatacagagaacaaatttctagaaggaacagactggtgttctggagcatttcccaggagtggtccaggtgacctccacttcacacaatttggtttaacacaatgctgctcaacaagaatgaacacgtttatgcccccatctccagaagcatcacaacctttcatggaaaacccattattcccacactatttccatataacatacagttatggaccatcccatgggatggtccatggccccactgcacccttgtgaaaaatgagagtcaaaaacatgccaataatcatgttaatgacaatacaggtgggtaccactcgcacttcactgagataaaaatcctcatggaaggcatccccctcacgtctcaggacccttcagagcacaagaaaaagctttgttcaggttgtatgctgctctccatcctgagacctgttcctgagccacaccataacaataagtgaattaacaaagaagtacatttgtggggaagttacagggaccctgcagaaaagccaaactatttgacagaagcttgaaacaaacactgctctgggaaatcatttgtattagctgatgactgggctctgttttctaaaatggacatgcaacatattcgatactatgcttaccacagtttgcttggtaaacccttctgtcatacaacaaaatacattctttctcatgaatgattgctgaatattcaccacgagacctagactcggaagcatggaaagtgtgcattggaactttctcccacttgcatggatttggacatgtgctaagaacctgaaactgcttcctttctggaactcaattctgtcaatgtgcttactgctgagatgatctgctatcttaaactgagaacacacaataacactgatccacagaaaaaaggagaggtcaccatctccctcataagatatgttgtacatcaggtcatgctgtttgtcacgttttagccatcctaagaaaggacagaagctgcattccattctgcagtcttggcaaatgactttcttctgtttccacctctattttgccttgtttatttcatctccattatccctctttcagtcatgaatcatgacttttttttctacagtagtcagagttttgtaggacaaactcaggtctctctggcctctcagcaagcttcagggcttcatgcatgcctgcagctgagagtgtctggttgatattctggtactggcactggagccggctgcaataggtggtcctcaggtcccagttgaagaaggcataaataaaagggttaatgagagagtttgcatagcccagccatggaaatatcctctccacccacagtgggatgcagctgcaggcagtgccatagacagaagggtctggctgtcaggaggaaaaagggcggccagcacatggtggaggcccagacgatgatccccaaggtagtcgctgctttctgtttccgcttaaagatggagatattttttcctttcatgcttgaggagtctcgaaagttttgcacactcttccacctcctggaacttcactgtgccattcagggtgactactgctgtctggctccactcgagggaagccaggtaacctgtgttaggccgcgcttttcctggcggccttgtaaatctgttagtacatgaaaagcatgacgcacatggggattaggatgccaatgcggtggagtaaatcgtgtagccaaagtcttgactgaccaagcacaccttatcatcgtttacattctgagcccgaccaaaaatggtaggtaaagtgacaaaggcggaaagaaggcagacagaaagaatcatcttcgtcatgcatttccccttctgcctcatagggtacgtgagaggcttcatgatcccaaggtacctgtcgatgctgatcacgtacaaggtcaagatccaggccgtgcagcacatgacattcacggagaagacgttacagaaaaagtgtccaaagatccacttgcccccgatgaggtcggtgacactgatgaagggcatgaccgccatggccaccgagaggttggccagcgccatggacacgatgaggtagttggagggctggcggagcttcttgacgaagcacacggagataccaccaggcagttgcccgcgatcgcagagagatgagcgtcaggacagagccgatcacaactttctcggccctttcttgatttgctccccgcggccggaggcattgcccggggttgcgtcccaggtgggcgccgggctggccgtcacctcgggggccccgctcagcagatgcggcgtcccggagaccgcgaccggttcggcgccaccgtcggggctcaggtcgggcagcctgccccccacctccggcaggaggaaagagcagaggcgcccgtagaggtccgggtggccgctgctgttaacatccatcactgcgccgccgtgtggcgctgcccaagaagccgccccacccccctccccacccccgcggccgccacaggctccggctttcggccccggggcttcaactcgccggttcccctccgcccggcccagcttgaggcctgcaccggccgctgggcagcgccaggctcggcctcggggccccgcctgtcccagatccccggccgctgcgtgaaacgcgagagcgctgccgagcggggactccctgagggagggacctcggaccccgacggacgcccgggacgcgcgggctctcgggcgctccggcggggctcggcccgcggctccacagcccgctgcacccgcgcggctcggagcaatggaggatcaggcagcggcagaagcttccgtttcctcctttttaaatggctccaaaatatttcttgtcggtggtgtggagtagagatttattggtaaaatacttgacagaaagcaggcactcagctgagtaaatggtgacaaaattggtgagaagatttttgaacaggagtgaacgagaaaagccatgcttagaaaagtcacctggaaactgtgatttagagggatggtaggaaagagtggcagcaggaaagtggtttggatgctctttcaatggtctagaagaggtcatggggcgggggtagagggacggctaccaagacagggagcctggccgccgctgtaccagcgggatcgagccttcgggtagaggaccggagaagcgtgagcaacccggggctcggaggttggagcccaggcacctgagagaggacgttccccaccaccgctgcctaaagccactccaggcgagaatcgctttccagggccccagcggataggttagactcagaataagagaaggggtctgcggagggggacggcctgaggcccgcggccgggttccctccccagacacccgcggaaagcccgaaaggaggcggaacacggcccagcggctcgccacggcgggcccatcccttgcttagccgcctcgcaccctcgcctcaccgcactgctgcactgctgcactgctgcactgctgcactgctggactgctgccctgctgcccgccctcatcgcctcgccgcctcgccgccccgccctctctctccgccccttcacctcgccgtcccgcccccttgcctcaccgccgggctgaattgccgccccgccctctagccacgccctctggcccctgcctctagccccgcctctcgcctcgccgcctcgccgtcccgccgccttgccgccctgccaccctgccgccctgccgccctgccgccctgccgccctgccgccctgccgccctgccgccggtggtcgctgcccgtggtgctccgtcgcccccgccacctcacgtcctcccgtgcgtcgggagcgtctcggctacaacatgttgggcatgatcaagaactcgctgttcggaagcgtagagacgtggccttggcaggtcctaagcaaaggggacaaggtaggcccgcagggctgccgaggacctgaaggattgctgcctcccacccccaccctcgtcggggctgcagcgggtgctgaggggcaggtggggcaggaatgtgctatcgaaggtgcgttctggtgtctgtcgcgagtgcggctctccaccgcccagcatttggactgggaaggaaaggagtgagaggtccccctgcagccggtggtgagaggaggggggtaaacaggagagactgatccaaggagagaatcccaacttggggagttgggcactgcctgttgaatgcattctttcgtttaaaatattccaaacattccgaacagtttgatttgttgagagacactcggttgcagaaatgagtgtcgcaagaaactcccaagtactagagaactgcggatagtagccccctttatccgcgatttcagttacctgtggtcagctcttgtccataactattaaatggaaaattccagaaatacagaagtcctaagttttaagtttccggccattctgcgtagcaggatgaaatcttgattcctgggaccggaatgcccctttgtccaaggtcagcctcctatctctagtacccgcccttagtcacttagtagctagcttggtgatcggatcgaccgtggcggtattcaagtaacccttattttacttagtaatggccccaaagtgcaagcttagcaatgctggcatattgttataattgctgttattttattattgttgttcatctcttactgtgcctaattgataaagttaaactatatcataggtatgtatgtataggaaaaaacgtagtagatacagggttcagttttgtccaccgtttcaggtatccactggggggcttggaaggtatctactatagataagggggactactgtgtaaaagaacaagatctgtgcagaatagatataaatgcgctacgcagggagcacagaggcagtcaattctgccagggggctatgatggggmcytcagtggagtgtcctgagctggggcctcagggatgtgtaggagtgcacacaacagagaagagcatgcacaaaggcccagagctgtaccattgcttttggccagttagatcctctggagttgggtacctagaatacagaatgagtgagaagagcataattgctgtcttcccccaaatttatatcagtgctaacatgggctaactggactgcacccctgaaaacaaggagagtgctgctagattataatctcctggtggacaggtagtttaaacagtgcagctgtatacagagctcccaatacgatgcctcatttgtgaaaggactgtattgcctgggggccaagttctgatacctagtacaatgatcttcatatcacgaaagccctcaattagactctaatctgaactctttgacaaccaaagacctttcacctgttcttatctccgtttccccagctctatgtagaatgaacagtttagccctgatcagaggtcccacatttgaatacctgcagcaaccaggcaggtaatggaaatggatgaagctggctgttttaggctataaggcatagtggggactgaggcaaatcagagagtgaactcaggtccccatctctaaacggcagttccagccacttgttgctatgcagtgatatatgaaacagtgttgccaaattcttaaggaaaaccatacatccagattcttagcgaaatcacccaatttaaaawtaattcgacaaaaactgttttttgagtgctatgtgccaggcactcttctaggcaatgggataaaagattaaaaccagcaaaattctctgccctcatggaacttatgttttattggctaatgaacaaataaaatgtatcatggatcagatagtgatcagtgctgtgaagaaaagcaagcagggaaggggagtgaggaatagggagtattaggagtgaggctgtgattttgagtagggaaactgacatagttgtgcataggctggacacaaatgcaataaggatgccagttattaatatcagtcctgctgtgagcatccaaaggacccacccaagccaacacagagagctgtctatccgcctccctgggcaatgaaaaaggcacctgataaggtctgcagcatcactggcctccccatcaagtagttgccctactcagaaccacagcctttctcctaacagccctgatgaaggttcctgtgattctaacactttaagaatccatgtgttcttgcttttgtcatggaatggggctcactttgtctttttggattaatgatgatggcccacacaggcrgagaggggtctgggctggttcgtggcctgtgccctcagattccttcctcacccattccctgctctgctgtcttcctgtggartggaagctgacccattcggcctgtttcccaggccagatgtcagccggcgcccagctacgtttgctcagtgggagtctctactgggagataaaaagggagaaaccagagtatttctcctccttctccaccccatcagatccatactactaggagcttctctgtggctttggcttccgctacacaggccaccatgattctagcttctacccagtaacctaggtatctgaacttaggtaacaggtaattctccctctgtgtctcctagggtgcttactaacctctaggttgcctctctgtcccctgctggcatctcagcccctctgttatctgtgcaaccaatcccttgcatcgaagtgcttctgctctaaatactctagtagtttctgtttcctgtttgactcttattgatacagtgtcacttgccgttaatttggggcctctgggataaggagaactccctaataagcatcttctctcagtgtttgatgggaatatggggccatatgggatattggtaccaggctaaagcaaatcatttaacccaaatgaacctgtttctacagctrtaaaatgagtataaaaatatcttttccatctatttccagagttactataagtattaaattctttaaaaccatgaaaacattttgtaaagtagtatacataccctacaaatatagtaatagcattatatcagtgctcatctcagcttcattctttctagctgtgtggtcacaggccaacttagcccctctgaagctaattgtggaagaaaataatagttcatatattaatagattgttttgaagttcaaatgagataaccaattataaaactgttcaatgttagtacttggttggagatggtaatggttagctttactgtagttttacagtaaagtttgggtaaattacttaacatcccgtgagcccttgaattcctcaactctaagatgagaataacaatgccaatgtgaaattaattaattatgcatagatacttgtaaaccttttttttttaaatatacaaacataaaggtattatttttgaagagaacctctccctgaaattatattttatcctggaaacagcctgggtcagaaactattgtccactctcctgggcaaatgatggcataccatattccccacatagcatgggcttcaggctcaccagatgttggggactgattccaagtacttggcagggaggccagtgctgccgcagaccttatcaggtgccttcttaattgctcagggagggaggagggtagacagctctctgtgttggattgggtgggcctttggatgctcacagcagaactgatattagtaactgacatccttaatcagatttgtgtccggcctgtgcacacaggttaggacctgatagcctggctttgagtcctggctccactattcacccgctgcagtttgggcatgttacttaacctcttgttccccagtttcatctgaaaatgaagattaaagccctaacttcttcacagggttattggagaaattgaatgaatgaatccacgtaaagcatttaaaataacaccagacaaatagaaagtactctgttaggttaattgttatgatcagtattttcttgtaatgagaaagcaggtttccaacattagcatgtatacccactacatgaagtggcaagaaaaaaactgacctttcaaaggacttacaaatcccatagccagaggcattcttgttaaacctttgtctgggacttgaacttgaccaaggttcccactgaatgttgaaaattggtttttgtagccacaggccaaaatctccatctaggaactgattgggagcatagactaatggagatggggtgaaggagggctactattgtgttccatgtcacaagcaaatgcactaaagatgttaaattttaagaatcaagactgtattaacttagctgccttattctctacagcagtagagaattctggttaaatacatttaaatagagctccctggagaactagaatagttttacaaatccatctcttaagcctgaattttcacagtggtcccgtggttcaaatgagtggttatggatacagatgctatgaaaacaagtgatccctgcrctagaactggtttaatacattgtggcccagcttttctccaggagatcctattagacgaggtcctcatctctctgcccatctattatggctcttgtattccttgtcattagagtaaaactaggttttactctgcatatctcctttctcacaaatatttgtagagtgcctacaatatgcaaggcgtggtacatctaggtacagagagatacagcggtgaacaagagaaacagtccttaccctgtggggcttgtgggtggaggtgggagtttaacacatcatttaattgtaattacaataagtattgtgttatgaaggtacagcgtgggtaagaatatcacagggaacctattttaagtcaggatcctctctgaggaagtaacttttaggttggagcctgttagatgaatagggagacaccaggcaaaggcaggaggagaatgctccagggagagggagcagcagacacagaggccctggcgtggaaatgaccatggcatcaaaggaaacagcagaaagctgcagagcaggtgctgtgagtgtggctggcaacgtaggtagaagctcagtggtgcctgcatcatcaagggcaggttaagaacttgatgaatgaatgcctttaggcagcagattawttaacacagttagattggtgtagagtgccctatatatgctctctggacaatcccaacctcattcacagctctagtctccccttatgctaatgactcccaaatttacgcctctatgccagtcccctgctgagctccagacctgtgtgcccaactacccaatggacagtttgctcatctgtatcaggaggagatgaactgatggacacatgagaccccttccagctctagagttatctgactttaggggttcctagaaaggagggatcactcaggaggaggaggtggtgaagttgagccaagccttgaaggatgataggtgtatcatgggggacttggctctccaagtcaagctggagtcccttcttggcagcctttctttccttgctgtggactttgtgcctggagaacaggccaagagcacaggttgctcgtgccattttatagatctcttttctgctgcagagaccctccattcaagacccagacatacttgcaaaatcctatgtttaggtcacaaatgtcagttgaactaatttagagtagatgaactggcttgctatcaaatcaccatcactggactaatggttacaaaatccaactcccacaacagcctctgagttcttctgagatctggcccctgccagaacaccttttttgtgtcctgcttgacagtctttgctccagccacaactatttgtaatatttgtactcacagtcatcatactgttcttgacccctcctcgtttactcttatggtacccactacctggaatatcctccccaaatgatcagagcatttactgcattgtacaataatttgtgtaatactcctcaccatcctcctgattatccctatcatattaatctccaaatctgtaccacctggcaaagkttttcgacaatgtttattccatgaattaataaagtagtgactgaacgtccrgttgggtgatctgtgaccacctcaaagtcagcttgacctccccaaacatgttatcacatacacccatgccccataaactaacctaagtggtcctttcctgtgttcccatactgccctggcactccttgccccctaaaaatatcattagatgataacmttctgttttcctggcatcttcccttatagcacctgtaacaatgttcagcacrtggtagatactcagtagttgttggttaaatgaataaaagaagaaaaagaccaaaggaaagagccagttagctctttctccagtgagatcttgtttttggtcttcccatttgtaaaagaagtaactgcgtaaaatgacttctgatacctctattctgaatttgatatgggcatacaactgtccgcccaaagtatctaacacagtggctaaagagagaggttacagactgggcaacattgyaagaccccatctgaaagagagagagagagagagagagagagagagaggaaaagaaaaaaaaaaaaagcaaagacactttggaaggytgacataggtggatcgcatgagctcagaagtttgagaccagcttgggcaacgtggtgaaaccctgtctctacaaaagaagacagagaaaacaaaatacaaaaaaaattagctgggcatggtggcacacacctgtagtcccagctacttaggaggatgaggtgggaggatcacgtgagcccaggaggctgaagttacagtgagccaagattgtaccactgcactccagcttgagcaaccatgagaccctgtaagaaagagaaagaaagagagagagagagaggaaggaaggaaggaaggaagggagggagggagggagggagggggaaacgaaagaaaaaaagaaagacagagagaggaaagaaaggaggataaagaaaagaaacagaggtttaaatgctcacttcaccccccatagctttagagaascttgcaacgagtattagactggagtagactagagtttgggaactggaatttttgtttcagtttcaccattcagtagttacatcactttgagcaacttagtctctctggttcttcattttctccttgataaaattagttagattaggtaaactttaaaaccattttaggttctgaacttctgtgattcacaggatagtgtttctggaatttaaaacattacaagtgccaagggtaggtgcgctctcaaatgaaaggggagttctggaattctctgcagcaacagaaagagcaaaacaccctaagtttacttaacagtttgctactgaaggctctttggaagtrtcagattcaccagatggagggcttcacagcagcctcagaatgattcagcacggtgccccacagtcaaggctgacttgctgcctcatgattcctggtctggcgcaatttcctctaccccatgtgaagggggatttaagtacaaacttggcactcagkgttaaaattacaatattaaggccgggcacagtggcatacctgtaatcccagcactttgggaggccgaggtgggcagaacacctgaggtcaggagttcgagaccagtctgtccaatgtggcaaaaccccatctctactaaaaacacaaaaattagctgggagtggtggcgttcgcctgtagtctcagctacttgtgaggctgaggcagaagaatcacttgaacctgggrggtgaaggttgctsttagcagagatcacaccactgcactccagcccgggtgacagagcaagactctgtctcaaaaataaaataaatattaaatatgctcattgagactacacttgccactcacagccgtacagtcctgccttcctccagagacaccttctgtccccctgggagtcacaccctcttccctagttgtgaatcttcagtctaggatattatatgaaaacctatttgaccagtctagggcagccaggttccctaccatgtgtctgtttttcataatcattgttaggagacacagcaccttaatcaaataaatatctgttgcacttctcacatgtaaagctctgtggtatagtttctgcccataaaggctttattgcagattgttaaaactataataatgtttcattaccagatggtaaaattaacatagaccaactttccttcttctaatgggatggaataaaattcactccagtagagtagaagagaagaaaacaggataggggaaggaacaaaaaaaaagccaggatgcatctcatccataagggtaaagcattactttgtgaaactttaactatgtgtatattcatgataagacaggctgtaaaaaatgctttccttcttgtggattgtgattttttttcaaaatgtgaagaacactgccttacagtatgtccaggaatacaaaattaaattatatgagcaatcacgtggcaaggagcaggagatgtactgaaggagagctgtgggggtccataatgagtaaacaccagggaaaggatagtccaaggacagggcctcaatgcagaaagtggtgatggggagatgaaagaaggatttgtgtgaaaagagacagtggagctgagcattaagcagattgggaggctgtgatttagtgagacaagagttagggagaggatatgctgtgtctgggagcacggtgtgaacagagctacagtcagcccttcctgtctgtgggttctggatccacgattcaaccaaccacagatggaaaatattcaaaaaataataatagcaatacagcaataaaaaatacataaatcaacagcagaggccaggcgtggtgtaactgcccagtgggttcaccttgcctgctgcctagatagaaccaatttatcaagacaggggaattgtaatggagaaagagtaattcatgcagagccagctctgcgggagaccagaggtttgttattactcaaatcagtctccctgagcattcagggatgagagtttttaaagataatttggcaggtagtggcttggggagtggggagtgctgattggtcaggttggagatggaatcatggggggtgccaagttaggtttttcttgctgtcttctgttcctcggtgcaatggcagaactggttgggccagattactggtctgagtggtgtcagctgatccatcgagtacagggtctggaaaatatctcacgcactgatcttaggttttacaatagtgatgttatccccaggagcaatttgaggaggttcagactcttggagccagaggctgcatgacctctaaattgtaatttctaatcttgtagctaatttgttagtcctgcaaagtcagactggaccccaggcaagaagggggtcttattgggaaagggctgttaccaattttctttcagagtcaagccacgaactgaattccttcctacawttagttcggcctaagcccaggaatcccacaaggacagcttaagggttagaaacaagatagagtcaatgaagtctgatttctttcactgtcataatttcctcagttataatttttgcaaaggcagtttcaattgtggctcatgcctataatgccaacactgggaagccaagacaggaggattgcttgagcccaggagtttgagaccagcctgtacaacatagggagactytaccaaaaaaaaaaaaaatttttttttttaattagcagggcatggtggtatgcacctgcggtcccacttactcaggaagcctaagtaggaggatcgcttgagctcaggaggtcgaggctagtgagccatgatcataccactgcacaccagcctgggtgacagagtgaaacactgtctcaaaaataaataaataaataaaatayatgtgtgtgtgtttgtgtgtgtgtgtgtgtgtgtgtgcacagagagtagcaactatttgcttggcttttacattgtattaagtattataagtaatgtagagatgatttaaagtatgtatgaggatgtgtgtgggttatatgcaaaatactacaccattttatatcagggacttgagcatccatggattttggtatccatagaggtcctggatccagtcccccaaggaggccaagggaaaaatgaactctgattccttgaattgcagtcctcctactagaatgagcctaattttgggagcttcacagttttgttggattgtcatcgttgtattttttgtttcctcccttctaagtttatctgtatttttttctgaatctcctgtttgtttaactttatcttccaacctgtttactgaatttttcttctctgttatcagatttttaatttctgagagctcttttgctctctgaatgttccatttttgtagcattctggttttcaggatgcaatatcttctcttatctccccaagaatataatgtataagattttcctgctttggatattgtctctacaagaatcccagaatctatttctcatggcccttcatactcaggcctgtcccttctgctctatggccatacccaccaaggaaagttttttagccctctgttactacttctagagacatcacaagttgctactttgtacctcttaaacactgtaccttctctctctctaggaagaagttgcctatgaagaaagggcctgtgaaggcggcamatttgccacagtagaagtgacagataagcctgtggatgaggctctacgggaagcaatgcccaaggtcgcaaagtatgcggggggcaccaatgacaagggtgagtacccctgcaggatgtggctctggtctcgggsaccagctttgcaaggtctcacttcatcagtggtaaatgcaagtgaggggctacaaggcacctgtagtgacctgtttcaatgacctgtgaacctcctgcactgtgtgaacaagcagtttattgcaggaatgtggggaaaccactctgatatcagcccagtctgtccctcacttgaaggcatccctgctcaatatctccaagttcctgcttcactcccaggtgtgggaccatakgctctattttttttttaaccctgcagtgcttattatgtctttggattggttgactaggtggcgtgtgcccacagtaagctgagctacagcacaasgcaaggccagcatcaggctggagatccccagagtcagcccctggtagctcagattctgctgggtcctgaggctcagtgagcagtgrggttccagaccctgtctggcaaatgaagggtctgagaattcttgggccatcctgctcttaaaaacttggcagttcatgctggccacctctctacttttaaaatgataagcctgaagtctcatgaaaggtgtacctgttagatgtaaaccatatttaaaaatgagtttgactcgtgagaagccctctaatttgggtagcattttggaatcactgcaaaacaaaaatgggtcagaaagcaagaggaaaaaaaagagatgtgtttaatttttaggatatttctcaagctgataatttagagagctaaaaacrtgtgttagccttagtaacatttactaggagctgctctgtctattgagtaaccattcttttattcctttacttacttaaaaaacttgctttaaaaaaaaaatttactaggactaaagtagtcaggctttggaagatacgttaacctgtaggaggtcaggaagaaatcttttccttcttaacactgtcttaacatttttttaaatgaaaatatgtatragaattataaaactcactaaagaaaacctttaaaataacaaaacagtattccctaattcccccattcaatacaatcaatgttgtcttttgaatgtattttttagggctttttaatgtaatcttagtgttcctataattacatatcctgcttctgttagttattatttcataattattttccactagtaccagagtcttcttaagcataattcctagctacattatattgtatcatgtgtctgtaatttacacagacatattcctgttttgaacagaatttataattctgctgtaatgaatatcttactacctatagccttttccatattttagattgatgttttaaataggcagtaattaaatactggctaggmatggtggctcacacctgtaatcccagcactttgggaggccaagatgggcaaatcacttgaggtaggagtttaagacgagcctggccaacatggcaaaaccccatctctactaaaaatacaaaaataagctgggtgtggtggcgcacacctgtaatcccatctactcagaaggctgaggcacaagaatcgcttgaacccaggaacccaggaggcagagtttrcagtaagccgagatcatgccactgcactccagcctgggcaacagagcaagactgtcrgaagaaagaaagaaagagagagagagagagagagagaaagagagagagagagagagagaaagagactgataatctacagtcttgatatatattgccaaatcattttttagagttgtaccactatactcctaccaacagcgtatacaaataacaggtgttcatgtatttctgtatttttaacacttgaaatgttcattgttaatttcaagaacaaaaacataccactttgaaagacgaatggaactaatgtgtcttccacagccctgagcaagctctgtctctgatccctgcctcactctgtgcttttgtgttttcaggaattgggatggggatgacagtccctatttcctttgctgtgttccccaatgaagatggctctctgcagaagaaattaaaagtctggttccggattccaaaccaatttcaaagcgacccaccagctcccagtgacaaaagcgttaagattgaggaacgggaaggcatcactgtctattccatgtaaggagacaatccttcaggcatccatgggtggcgcttgattcccgtaccactccttgcatcacctctggcaagcattcgcgtcaaatttttatggttgctgaattaatttaagtaggaaatgctgaatcctaacagtttctcattttaatttcttcaggctgcagcacacacacatttgcattttatcagaataaatgccttggccagttgccaaattgatgggacgagcttaagctttgcttaagcttacagtgaatgtctacattagccatagcagggttctaggagactcagcaaatatcttaagtcaagccatggtctggattcgtggacacatgggaagcataaagggctgaggaatacctgatttctaccccacactccctttgaatgccagagagcagggagcatttgctagagctgggcttccatcctccttgttgttcctggatggtagtcctttgagcagagcacacatctattctcttgtcatcctggtcctgtttccaggacttcatgtggggtcattttcccttgactgtagagaatagcaggtgcaaatggttactagtttctatcccttgtgctccaaactgccctcagaaaccaagtcttctagatcattgatgactcctcacatttgttaaaacactcccatgtgacaggcaccaaaccaggctcagggaaagaccaggatcttcaccagaagtaatcataggtggtttggctccgctcaggagcaacctcatgaaaaattcacatacatataatattgcactggactgagtattggtccacttcagggacctccaaacttggctgccctgctgcaaccctgaacctgatggtgggaccattttccccggagctgtgtcaatgttctgagaatgtgagtttcaccgctgtgtgtagtcctaggccaggtgactgcagggccctccagaggacagtgaatgtaatgcagctgggagctagcaccggagcctcagctcctgtgcttgtcctgcagtcctcattcagacttcccagcttcccttcagagggtgtggagaaagcaaattaacttaacaatatcttttcctagggtggagatgcaccttgggtgcagcatttaaggaagcactcactctcacagctgtccaagtgcaggatggggactgagagtgagcgcctccttaaatcttgtgccctgggttagatgtctscttgtcttttccattctatttcctgtgtttgggaagcagcaggtataataaaatgaacttgtattttatttgaattccagctctactgcttactagcagaatgatgcttgggaagttagccactttaagacttagcttttgcatttgttaagtgctgataatataacctcctatatatgatgtgtgtgtgtgtgcatgtaatgtaaccttataggattattgttaaatatctttcagtatttactaagatactatttatgtattacctaatgtttatgacctgaagcaggttttggcaattaccccttctgtctgttcattcttatttcataaggaatgagatagacatgattgaatcagttcacattaagacttcaagcagatggggctagtttctgatcrtttgttttaccagaccctgagtaatgagtggatataatttttttttcttttgtctttaactttttagtatgggaattttcaaacttatagaaaggtagaagcatataagatcatgaaatcatatgtgcccatcccctacctacagcaacgatcagctcaaggccaattctgtgtcatgtgtatcttcacagcattcacccagccctaccctggattatttttaggcaaattccagacattatattatttcattcataaatatttcargtaattactgaagatttttttaaaatataatcacaataccttttttctgaaatttcaatagtacttcattaatttataatataaaatattcaatgctcagatttcccccattactttttttttttttccaacggagtctctctctgttgcccaggctggagtgcagtggtgcgatcttggctcactgcaacctctgctgcctgggttcaagcaattctcctgcctcagcctcccaagtagctgggagtacaggaacctgccactgtgcctaatatttgtagttttttagtagagacagggtttcaccatcttggccaggctggtcttgaactcctgaccttgtgatccacctgcctcggcctcccaaagtgctgggattacaggcgtgagccaccacrcctggccatcatttgttttaatattttgttagaatctggatccaagtcagattttgtagtactttctttttgttgttgttgttaagagacaaggccttgctctgttgcccaggctgcagtgcagtggtgtgatcatagctcactgcagcctcaaactcctgggctcaggtaatcctcccacctcagcctctcaagtagctggtactacagttgcacacaaccacacctggctgatggtacatttttaagcttttattaatctgtgaatttctttaccaacacaactttacattcttcctttccatctgtggatcatttgtcttcttattatctgtactggattttgctgattatatttccgtgacattttaccacatccctctgagccccgtattgcctgtaaattagtagttgaaactaaagactagatcagattcaagtttttgaagttttggtgagaatatttcctacgtggtggtgtttacttccttcaggggcccacagtgtctgattgtccctgattgagtgatgttggtgaccatagttcatcattgcctagatgtcttgttccattagaggccataaaacgataatgttctctgtttctccttcttctttwattacctgcaatatttcagtaaagagaaacttcccctcgtttactatttggcttcctttatttcatatagaaaaagccagatacatgcttacttgataccttctctttatttaccagttttcagaatgataatttcattctgtaacatcctcaaggtaaagtggtctgcatcttcgttttttgagtgtaattataaacatatgaatttaaacatatttgatacgtttcagtttgttacagatattattcttattgatgctctaattgccccactgttggccagcgggagcctcttcaagttggtttgttggtccttttgacacagctccagtagtcgttgatggctccctggcttgctggtataatgagatgttttgagcacatcttagcatttcttgccctagagctagaattagccatttctctaaggaacgctggtttcttatggtgggaaggggtatamgggtactatcaaaggcaggtcggtgaccatttccttttaattctctgaaatctaaacagctgaaagtgccaaatgtggtgtctagcctggctccatggaatttttracacggasttctcacacagcatatgatcattcctcaactcgccacttgatgtcactgcatagtcaaatgagcattcaaaattaccctgcagtggtttgtgttatttctgattctgttgaaagcaatgttaatgaratggtagaaggcaaatgtactacttcaaatgcaaaagtactctatcaaataatgcagtgagtgcattcaatgacaaaattaattctaaaatgaaagcctggcgtccttcattcagtcttccttctttatgaccttgtgaagagatgtttacaaagggattatacatttattagcatcgttaattaccggtgcttttagatgaatagaatgctgtgaaaaaaaatagcactatcagaatatgtttagtattcacaagaggcaatagaattatcctcacacttagaccagcagcaacattccagactactgtcctttctctatgcacttaagttagagtttggccttttcagctcatttcagcaccaggttctcaatagggaccaacagcaggagaagtttgatggtcttaatgaaactttcacggtttaaatgaaatgtctagatataaaggaaaaagttggaaaccaggagtttattttcagggtaacctatgctccaacccagttcatcattcagtggccataggacctttggtatattgccagcctcactgtacctcagtttcctcatctgtaagatgggcatgagtacctagcttttatggtgttgtgaggataaaatatgataatacctgtaaatacctactcaatcctagacatgaggtagacactcagtaaatgttagcctattctcctcctcctaacttcacctccctttgagaatttgatcaagttttattagaattaacaataaaaaagtcaaagttactgcagatacacttgggttagaacctcagctccaataattatgaattttgtaacttgcagcaagttgtttaatctttctgagcctcagttttctcatctataaaataagatttctaaggcatgattgcaaaggccggtttcattgtgcatttgaaagaactttgtcagctgtcagcacctaggttgctgatgtcatttttccctctaaatgaccaggccccaatggaggccattggcagcttgggaagttccgcctagagaaagagaagtttggaagaaagagctcaactgctaaactcttagggggttcccacattaccacttaggagatttacagaccagtgtttgcccatgttcctagataattcaaccctgtttgtaaccacaggaagttgggaccaagggttttcagtcttagcaccctgctttgccccctcactttgattaaaaggggccttgtccagccgttctattgaaaatagcaccctgtccttttctgtcctcttatccagctttattttgctttgcttcacttataatcaattgcattatatatctctatctgctcatttatttattgccctctccccactagaatgcaagcttcccaagggcagggcctttggctagaatataacaagtgttcaataagaagctgttgaattggccatcacagtggctgacatctgtaattctagtactttgggaggccaaggcaggtggatcacctgagcttagsagttcgagaccagcctgggcaacataatgagaccccgtctctaaataaaaaacaaaaacaagttggtgaatggatacatgaacaaaagagcttcatccttgcctctcctgtgcttctctctctctgctctgtcccataaagatcttggtccccatcatagcttcagctgtcaccagtgtgttggtaactttccagcctaacctctgtctgtctcccctgaatgtcttgccatcccatcagactcagcatggagcctgagacaatgtgatttacccactcgttcattccttcattcaaaagatagtggatttcttgttcacttactctgtaccaggaactattttaggtgtctaacagtaaaatrgacgtcatgaggtaatgtccttgcccctggaagaattcaagtgccatctggatagatgggtgacacttatgccatgtgacatttgcactaggtgggaagtttggtttgatttgacaaacatttattaaatatctctaatatttaagccacctcatgtccaaaagccttgccaatgataagattctgtgtctcagcctaattaatcaccattttctctccccctgatagctgtcagttatcccgtaagtcttttataaactcccaccaggcaagggcttcaggctgtttctctgtagatgatgcccgggtcaacacgtctcatgctgccttctctcctaagcaccagccttatatttccagctcccaggaggcatcaccacctcaagtatctcccaaatcagcatgtccaaaacacaacgcagatttccacgcaaaatcagatccctttctgtgttctctgtcttagtgatggtcccctccctcctcctacccaccctgttccaatgtcattctgactccttcacttctgcatctaattattggctcatcctggtcagctcccagctgtcccttccttcccttccatctacacaggtcttcatcatctcttgcacaaatgattgccatggtattggcttccagctctcccatttctgacccttctaaagtgtccttttatcaccacctgcctaaggcacaggactgatcacatcgcctgtctttgctyagaaactgagcctccccagaggctgctcagctctggttgggggcctcaggcccatccaaccagatgttggggtttgaacaaaagcccagttagtaatgagatgcttcatttccactaggagagggtggatcaactttgggtgccaaatgtttgaccaggcagtaaagcctagtaaaaatgccctgtgatggcactgaccaccctccacacatagcaccactcccatgtcaacctgatctcagagcgtcccacccaccaccacccaacatgcctcccaccccagacacaacatccacttccagacctttgctcatatgtccccagctcctctcaaccctccacagcctctgtttgttggaagctctgtgaggacagaaggttgtcatactattcattgccagcatcaagaagagatattgtatttccaaacaaggtcacatacacaaaaaaagtagagatgctcaataaatgcttaatatcacctctttcttaataccttcccttcatgttctaagtcagaacccatcattcgctattcctcacccccagaacattctrgatgtaccttccaccttcattccagcatttccttccagccagcataatctttgcatgtgtttctctcctgaccacacttagagctctcgagggtagaaagacatctttatcatccttacagctcttatggtgtctggcttgcattttgtgctcagtgatgttcaactcaataagcacaggtccagcctggttgaatgaaacrcttattgtgtgaagcctctcttcctgttgcagtgaggctgtcagttcctggtctgatacttcttttgcctagcacagggctgcatgcatagcagaccgtacaccagtgtgtgctgatccattgatgttaaagtttcgaagttgaatggtcaagctcagagtcattyttcctccctgcatgcctgcaccagacactccctaaaaaataacacattatgattttttgcttccttggacgaaagccccrcttccctccactagccttcactattgcttgtgtcatctttcccctttctaactcttccagaccttttgagtcagctcctrttgtgtttctggaatcaggggtgtgtgtatgtttgagattcctcagttcccatggtaaccaaattctttattcagaatactgagctctgacattgggtgagataaaacactgccctggaggagagcttctttcaagatgaggcgtttrtagataaagacgtattcacaggcttacaaagataatgtatagacttcacrtttctttcttttaggggctcaaagcactttatgagcatttcttaactcaccttcaagtgcgcgcaggaattcggagagcagtgggcccactgttattgtgctccatgtccagattggaagctgaggcacgaaccaatgaggcaaagtgtctgtgaacacaagcagagtcagccagagctaggctcccttcatacaccaggggattccgggtagggttcagtttctggcttgtttgtgcagttctgtgatgggagtcagtgtggttggttaaattagcagagaggagaactcatgtatctgttcccatagcccacccagtttgtttgttttccagtaaaaggattctacgatgaagcaatagggaaaattttatctgcattaccagcatttcagtctgcctgggaataaatgtaaagaattgggggttttcccggagtgaattttaggactccctgagtgatgacattctccatctcactctctgctgggtttccttctgcttctcagccccttctcactgtcctttgaccggtcctctttcttcacccaccatttagatattaggattctaaggagcaagcttctggcctgctgtttgcacaacatctctaccacatgtcacttcttaccatgattatagccagtacctacccactgggcactcccaagtttctgtcactagatccttctccttcccaaattggtatctctgactccagttctgtcccaagtctaaggagatttttacatggtcagacacacatttagataataattgttgcatgaatgtatttcacagagggcccttaatattcatatgccccccaaactaaatcatgaacacccctacagctgcccctcctgcctaatgttactcttcagcctttaatccctattctggytagcggcatcttcttctacccagaggcttaactggaagccctggagaatcctctcttccttcctctctcttacctccctccacatacaggtacctctcaaatctgcctttctcccaccttcatcatctcacacttggctgttcctgggctccggtggccccacatctctcaaccccttgccatttcccctgtcyctccactgccagcagagggatccttccaaagcacaattggatcgtgccagtcctctactttaaaaccctttccaggccgggcgtggtggctcacacctgtaatcccagcactttaggaggctgaggcgggtggatcacctgaggtcaggagtttgagaccagcctggccaatacggcaaaaccccatctgtactaaaaatacaaaaattagctgggcgtgtgcctgtagtcccagctactcgggaagctaaggcaggagaatcacttgaacctgggaggcagaggttgcaatgagccgagattgcgccactgcacttcagcctgggtaatagagtgagactctgtctcaaaaaaaaaaaaaaaaaaaaaaaaaaaaaccctttcgtaggtctacctgtgcatataggatgaggttcaaactctttagcatggcattcaaggccttcgcatctggctgcagkggatccacttctcctgtttcagttcccaccactgtcccctcagatgtttattatgtgaatgagtgagtgaaacttatgtaaccacttcactcactaggtcctaagtgctgtcatctttagctctgtcaggctgaagacatcactttcattgtttagcccagaattgttcatttaaccaaggggtccaacatattcaggcactgtgttaggtgctcagtgtacatcagtgaccaaaaaataacaaaaatcctgccattgtgcagcctatattctatcagaggacacaaaccataaacaataaacttaatgagtaaattatatagtatgttaaaaggtgataagtgctgttaaaaaagaaagaaagaaaaagtaaaacataggaagaagattgggatggggttaaagaatggggtttacaaggtaacaaagcattttaagaataggcctaattgagaaagtgagaattgttcattgagccagttcataatattactatggttttttttagttgtattttgtgtttttgttttggagacaggatctcactatgttgtccaggctggaatgcagtggctattcacagatgtgatcatagcacagtgcagcctcaactcctggccttgatcagtcctcctgcctcagcctcccaagtagctgggaccacaggcatgcaccacaacactcagctacatggtatttcgttagattaccatcatgtccctcaccctggagtcagggaattaaaaggctcttctgagcaaactgccaagtaacaataatagctactgtttgttgtgagcttactacgtgacaggctctgcgctgagcagtttgcatagtcttttctcctttaatctttacagtagccttcgaagattgatgttatcactatccctattttaccagtgaaaaacctgaagatttgagaaattttagaattagcttaagacctagaaagggcagcactaggatttgagcacacactagccattttgcctctaactgatgaaggaagacatttgaggascactcctttggagctttccaaaatcagtatttaaagagccaacattgtcccttttcctagagaacagttcagtgtcacagcacaagtagggggtgcagagagcactcaacacctgcttccacctccagcacttgattcatttcagacaaatggttcyccaactaaagacatggttcataaaaaactccagtgtcttacaggctcttattgcctgaaaaaagtctttcctggatgttcattgtctgtctactaaccmagtttcctctcatttgaacctcaatgaagctagagcccaactttcttcatctcccttataatctcttcaatatatttgaagaatcaagcctctgctattcaaaattggtctcagtttcatccatgttctgtagctgttgtctagacattggaacaaccaatccattacagaaaacatcctgggtgttcacatcagtgatgctgcaatccacatgctgaatgcttgtccagcatgactaaccacttgtaaaagagcaaagcatgattcagaggactccaccaaaaataatgcattatttggcctaatcttggcctggtgcaaattcagacttttgagtcatacagctcattagaaatcgggatgtacttgactctaataaaaattttagtgcaacccagatttagagtggtatatttaggctaggctacaagacaaattttggaacagaagcacatgacgtaagggagagaataataatcttgaaaagaaaggctttattgcttctctgtccccaatttctgccatcaaaagaaataccagatttaggaacagtctctttccttactagaaaaagaaggctttcatgatttgagcagaagaaaggatttatgagaagtgatttctttatttggggcatgtttaaagcttgtgtggggccctcccaagtcttccttgggtctttgcctttgttagctctgagatttttacttttttagttttggtttttggtttgtttttttttttkttttttttttgacacagggtcttgtgttgcccaggctagcctagctctgtttttaaatgaagctgctacaagtcactgctgtgatgaactcagtcactagagctgctctgctgtggaaggggcattagccaccatactcactgcagctctgcccgaagtcccctgtagacttcctccttccagaggtggtgacagagcagcagaaaagaggtacagccgggcagtagagggagccagagaaaagggtgaaggcttggcctttgggaaagcaaacctgctgtccccttgggtatttcaggaaagaaagggaggctcacgtttatactcagctactgtttcaggccccgcattagagtttttcacgtccattactgcttttaacactcaaaactctagaggaaaaagaaaatatatctcctttttcagatgaggaaactgaggctcagagaggtaaaatcaacccatctaggaagtggtgactcagtccccagtcttaccactctagcatgcttgtcataataaacatggtgagtgacttttttctaaagatcccccctctctcagaggtcatgtcctttcgtaaccagcccttgctcttgaacccccaggcagtttggtggttatgccaaggaagcagactacgtagcacaagccacccgtctgcgtgctgccctggagggcacagccacctaccggggggacatctacttctgcacgggttatgaccctcccatgaagccctacggacggcgcaatgasatctggctgttgaagacatgagtgacccactgaaccaagaacttactggaagtgtgcctctgtgtctccttcytcgggggtaaggaggggacagtgcttcccaagttccagctgcaagtccaacttaaccaactttccttcaaagtcagttactgccaattttctgaaaaaagcatgttccatatactaagtctcttttctcacrgtaggaaataatacagccaagatatgcagcatccttctcattgatgtagaaaattctgcgatagaccagaaaaatcctggcagcttttctccaggcatctgggtcactaaaaactgattttctaaaattattggatttgtattttgttattaagggggaaaatgtgatttgtgcctgatctttcatctgtgattcttataagagctttgtcttcagaaaaactaaaaataaaaggcattgacttaaacagctgagacaaatcataagtgtaattatttccaaggttctacagtcctgaaggtaatataggtatgagtactattgatggtgtttaccattgcaggaaccctatatttagagctcccaagtccttccgaatataaacgcaaagataccaggacacacaccatccctaaactagacatttcccatgactgttatgtagcactctgtgattataagttgaggattttgtttgcagctgtggtctgcgaagggttccaggagtcacaagagcagaccaagaagaaaaatcattgcactatggtgcacagactaccctggagacaggagattttccaggaggattggtttagggggatgagatgagaagcagctggggtccagtttcattaactgaagaggataggaaggaaagaaaaggtgcagtttggcctgcagagaaggacacagatgcaaggctgtgagcaggaagccggatggcagctgagctggagcagagcccgtgagtgagcaggggaggatgaagctctcagtgggccccagggcatgtaggaggtactctgatcctcatagtgcatcagggccccacgctctcagcagccctccctacgacagctggacaggttttcagggagaaacccaccttagcacccacccacaccccatttgctgtttctataggaaacagaaaaatgagctttaatcctcaccatgaagagttcttactggacataaagtggggtttcctaaggagaggaacaagagctatatgtcatcatctttcctggagtcctttcagcagtcttctgagggatgggccatgaccatttctgaagatccagggtgaaaaccgtcagccacccagccttgactatcagacaccatgccaagcactttgcatgcactgccccacttattccatgggcaactctgtgagaaaggtactgctgttcccacacacaggtgaggaagctgaggattccacaggctcccacacttgagaagccttggagccaagacaaaagtgcagccacacaggccttattacatgtcaaggagtttaagttttgttttaagaaaactgaaaagtgcatgggcagctttgagcaggaacgtgatactgtcatgttttagaaagaaagttctgtctacagtatggaaaataaactgaaaaaaggatatgactggagacagagagaccagtcacaagactaagagaaagatgatggaggtcaaaactagatcatggcagtggggatggagagaagtagacagtttggagcaagagaagaggttaacaggacttggtggctgactggtgaatgagataaggaaaaggtttgaagaggagcagagcattgctccaaactatgccactgtggcaaattggttattttgagctgaaggcaatggagaaatggcagatacaggaagtgctgtctgccctccccttttctacctaaaagcagtatgtaaatttcccctgagaaaggtgctctcattctactaggaagaggagaacatgcttatcaccagggatggggagtcaatgccaagatgagtctgtacaaaccttattaaaattgcccttctcttccatcagtttccccgatatgtttcctagtcactttcccatcccccttccagcccaaacccctttttcctttgtcatgtctccacaatgtattgttctttgttaaaatggtatataattctcaaatctaactgctttagagttttcacttttttctgtgaagtcctccatgccacatagaaatattaacatcagataaaaatctatattttttcctattaatattttttccctgttaatctgtccgcaaaggttatttaggcctgcagagcatccaagtgaggctatctagtggacagttgaaagtgtgggtctgatgctacaaatagaagcctaacgtggagatgtgtttggacatcacaaatatctagatggagtaggtgaattatgaactctcccaaggaaaggccaggagtaagaagagaagaaaatctaggtaaggactcaggaaccctaatatttacagacaagcagaagaaaagagccgacaaatattgtttaaaagtggctagttatataggagaaatgccagagaataaaaaaggaagaaggtaatcagtgtgtatcaaaccactacatcagtaagtgctactgacccaagtcctaaatcatcttgaagccatctctgctggtaccatcttaggatgtatcaccatcattcttgcctgaagtcctgcaacagccttctaattggtctccacatttctgctcctgcccccttggacacattttctacacaacttccaaatggatctttgctttaaaattcttattttgcacttagactaaaattcaaactccattttatgacctgcaaggcgttgtgtgatttggccccttctgactacttctttctttccaatctctcccttaatacccttctgccacagtggactttgaacacacacagcccttttttgccctagggcccttgcactagctgttttgtctgcctaaaacccttttcacttccttttcaaatggccaggttttctcatcctacagatcctaactacctcctcttcaaagaggccttcaatggcccctctagctaaaatagagtcagcctcccctatagttctccatcataccattatatttttgcttttttcataatacaaaccactgtataattattttcctttttctctcagatccccaggtagccatggtcttggggaaaactgtgtcctccggagtgatcagagcccagtgctggacatcatggaatgtaattttttaacttattcatttcctctttttttttttttttttttttttttggctctcacacaagactgtaagtttgataaggaggagccccatacctgctttgttctccattgtatgcccagcacctagctcagggatctatcatttaagaatgcatgaaactgtaacagaaaaccaacagtagcttaagccaagaaggttttcttttcccacatagcaagaaatccagagacaggttcagtactcaatgctgatgtctctgcacttgcctttctctctccctcagggctgcaagatggctgatgcagctcctgccatctcatccatgtttaaggcaggaaattagggagatgaggacaggctgtatcagttgcatctgtcccattttatgaagaaacagaagctttcccaaaagtttccccatcagagttctacttttatctcatgggccaaaactaacatacagggccatccatagctgcaagagagagtgtgtgttgggttttgtagcctctatagtgaggagcagcaaggaagaagaatatttagaatggctctgaggtagctgatcaacagtgtcttttgcaaggagactatgtaaagatgcgtatacctgaggtcaagagtttgggaagatgggaaacagctggagagatgggttgaggccagattgcagaggatcatagtcttcaattctatattctcacttcttttttttttttttttttttttttttcttttcttgagagaatctcactgtgttacccaggctggagtgcagtggcgtgatctcagctcactgcagcctctgtctcctgggttcaagtgattctcctgcctctgcctcctaagtagctgggattacaggtatgtgccaccatggccagctaatttttgtatttttagtagagacgggggtttcaccatgttggccaggctggtctcgaactcctggcctcaagtgatccacccgcctcagcctcccaaagtgctggaattacaggcatgagccaccacacccggcctattctcacttctgaaccaagcatatgagctagtgctcaggagcagtagcggcctcccctcatgatgtctcctgcttcccccatctctcctctctcccactttgaaaacccaaaacagtggagcatggtcaagatgaggaagggaggaagcatcttcagtcccctacccacagcgaagccatagcaagtgactggatgatagtgatagagtgaattaagagaaaaagggattaggagctaggaaaatgaaggaagtttatccttgttctggacttaagaatgaaaaacagaaccaatgagactaggatttctaattgtccatctgtggattagtaaagcaatcttttttcctgattcccagtcatcctcttgtcagtatctttcccaaaatacactgatggaaaaaccctctggccccatctcactcctctctagggcctggattagagcatacagctaatattttagattgtaaattggaaagcagtaaccaggagaatacagatattaataaaatctaaactgtactctaggtttaatgctcaggaccacagccttaaggctgctgcctcggccaggcgcgttggctcacacctgtaatcccagcactttgtggggcagaggcgggtggattgcttgcggtcaggacttcaagagtcacctggccaacatggtgaaatgctgtctctactaaaaatacaaacattagccaagtgtggtggcatgtgcctgtagtcccagctactcaggagtctgaggcacaagaatcatttgaactcaggaggtggaggttgcagtaagccaagatcgcaccactgcactccagcctgggtgacaaagcgagactgtctcaaaaaaaataaataataaataaataaataaataaagctgctgcctctgcagattagcatatataaggatgttttccctcctccagaagccatcttcccgaggcatgaatattccttgtatgttttgtgagcctcacccagtaaaatttgttctggatgtcccacagcacaacaccacattctcatgctcatgtgagtgtttaagggccctgggtgactgtatataaatacagtggaaggcctggctgagctcagggagttagttggtcatcacttgtttaagaaagacctccttaattacatttggcttctccactcctgagtaatgttactttgatcttgagcacagtaattaaagtttcatagcatgccgcattggtgggtatatagttgattgaatgccatggatcttgcctttgaatttatatttctaactagctctagcctttttccttagaagtaattttgtttctatagcaacattattctagaggaattggggacagacccaaacaatatccgcaaattcagaatcaagaatcaaaccatgtaaggtggaaatgccagaatgggctgaaggtatggcaaaaatttgtgtaggcaatgaagagctattgcataatcaaacttcgggtaaaaagacctcctctctccttggcaatgaattaattagaccctcatcaaaaagtctttttttttttttttttttttgagatggagtctcactgagtcgcccaggctggagtgcagtggtgcgatctcggttcactgcaacctccacctcgtcggttcaaacaattctcctgcctcagcctcccgagtagctgggactacaggcgtgcaccaccacacccagctaatttttttgtatttttagtagagatggggtttcactatgttggccaggctggtcttgagctcctgacctcaagtgatctgcccacctcggcctcccaaagtgctgggattacaggcatgagccaccacgcccagccaaaaaagtcgtttcaagagtgggctcaaaccccagcctcttctcatatcctgcctcttgctcccttttgggttccttaccctccagcagcactggaattattgctggttcccctggcagcctccccaccgcccctccttcatgccttcactcacactgctcccatacctacaatccccaatccctttagagtccagctcaaacgtctttgaattcttccttggtctcttcaggaacactcctttttctctatgatttataatccccaccccacacccatagcataaaggatgtgtgcaccatagatgctcagttgtat

SEQ ID NO: 6854 - DNA, 74665 bp, Homo sapiens
tatactcactctttgttgagtatcccacaattaccattgttcctggcccagacttccatccggcctcccacattattctggataccacacctgacccccatgactgtctctctttgatccacccgatattcactccatttgcccatgtttccttctttcctgttcctcaccctgatcacacttggtttactgatggcagttccaccaggcctaatcgccactcaccagcaaaggcaggctatgctatagtatcttccacatctatcattgaggctactgatcttccccgctccactacctctcagcaagctgaactcattgtcttaacttgagctctcactcttgcaaagggactacgcatcaatatttatactgactctaaatatgccttccatatcctgcaccaccatgctgttacataggcagaaaggtttcctcgctacgcaaaggtcctccatcattaatgcctctttaataaaaactcttctcaaggctgctttacttccaaaggaaggtacagaggatcagaagggcagcagggggcatgggcaatgctggtgatagatggcctagatgaagtgaaaaatatgatagaaagctcttatcttccagggagaagctgtgacacaaggagcaaatgggtgaagcagcactcctttggaatgcttcccacattttcaggtcactagaagtagtcttgagagtcactagttacctaggcaggttgcccatcatcgaagtctttatacacaggagaggctttatgtctagtgggcagttggatctgctggatcagagcctggaccacaaaggtgcctgctacccctgagcttttttcctggaagtagttgtcccacactcttacctatcttgaaatgctaaccacctttctttgaaaagcctaggggtcaggacataggggtaaagtgtacagcctagatgactcacacccttgctatgccccagtgtaggatcaagtggctttcttatgccaggagctgatcctctatgggccacacacacacacagcctgcctcattatagtacaggcagagctgcttatactgataggcaagatgttggaaaaaacagcagctgcttccctgccaggtaagagacaagaaagaaatatattccatttttcttaaggactagagcacagaatctccatatacaactgcacttagaacaaggagcagaacaccctggagggagtccctgtgaatttcttgggctggcagaagcagaaagacatcaggccaggggttttttatgtttgggcaccagtagctctgtgctcatctctgttgtttgacgacatgagttcctcaccatttcactggtgccctatagtgatgcattgcctagaggtgagaaatggagcaaggcagtggcatccatctcattagagcagataactaccctcgtacctctccaatccatcctccacccaggagccagaaagatgttttaaaacgcaatatgatcctatcattcttcagtgatttcccagagctcaaaagtgtccataagacctagaaggcactgcacaatctggctcttacaccacctgtacagttcactctcccgctattcctcccatcatcaagtcacattggcccattctgctctttcccgtttcacagcctattgtccccttttctggaaagctcttctctctttgcctggctaatgcatactcatccctcaggtcttcctgagaaaggtttttctgacttctcaggccatattacaccccctgttttatcctctgattacatggagttattttccttcattgcactaacaccattctagttatataaccatgtgtgtgattgtgtgattactgtcttagtcccacaagactataaacttcatgagagcagacaatgtacctgttttgtttactactttattcccagtgccaagtacagtacttgacatagtatgtgctcaacacattctcttggaaggaagtcaaagaaggaggaagagtaggagggaaggaggaagggaagaggaaaggatgaggaaggaagcagggaggtaggcagaagaggaggaatggaggccttattggtgctgggaaaatattagatttcctttctctagtaggaaagctgaaagggttaagagtggccacttaactgagccacacagaccccaggatttaaaggcagaagttgaacatcagaattttgtccatgagacaatgctgagttcaaaccacagaagcaggtccaaatgagtcatcagagcaaagggagtctgaggtgagttttaggtacaccagagcaaaaggagaatgaaaaaagcaggaaagatgagggcaaataagaaataatctgtacaaattcaataaacaataggaaaaaaccatcagctgggtttatttcttgctgctttctatgcaggggcaaaggaagtctgattaaagggatgtagaccacaaacagttgcaaaaggaagaaaagaaaaaaggaaagaaaagaaaaagaaaggaaggaagaaagaaggaagggagggagggaggaaggaaggaaggaaggaaaagaaaagctggctctgagcagtcagctggctgttctcttccctacatctctatggcatcttattttgaaccaaagttattttgaaccctacatttctatggcatcttattttgaaccaattcaacattttgaaccaaaattattaagttcttaacttacacattgttccatattatctcccgtccttaatcataagctcctagggaacagggaaagtgtctatttcattttctcatttcctacagagtctagcccaatgatttcaaatagtgagtgctcaaaaatatggctaaatactgatatatatttcataagtgctaggagttgttactttaatgaaattatcaactttctgaggaaaaccttttagtcctgagttccttctgaaaatataagagagttggggtaaataatcgctaaggcatttccaaagtgtaagctattggggcaatggcaaggatatgccttatacatatgttttataatctatcatttccagtatattattgggcaaatagcgggaactcaataaaggtttccagtgaattgactccaatatagatgtatttaagttaagacgaaatacatagatgtgtttctgaagcttcatataaattgcctgtgaattgaacatttaaaaatacatgagaaatctattattaaatggtttcctaagatgaaaattttttacaatatttagaatcattttgtaaaataataactcatttagtcaactttcttaagtttcacatatttatatatcaaggatgctgacaataggataaaccagattagtagtttacagttatgagccaattgatttaatattgaccaaattaagttattctgcatagagatgtgtctgtttccctacaatttcccagatgatccatccccacctctctcccttcttcctttccctccccatccctctttctctttctctctctctttctctctctctctgtttcacacacacacagactttcccccttgggtcttatatttcagctttagtaggtctacgctgatttataatactatgcatacaactttcactttcccatattcctttgaacatttctcactgttgacccacatgcctcaccagttttgaaaacaggtatgcttcccacggtgtctggatcatccatagtatctagactcttcaagatgtctgtctttggtggtggctttggtatgagcatgctggaagtagaagcttccccagctgagaaacaatagctttaggtcaccctcaaggtgggattctgggaagggagtgttccttactccctttcattttccctatgactctgagctgtccagggctttctttccaaaaatccagtgaaaaattagagacgcgatgtacctcaaaaagattctattcccttgacatacatgggggaaagcagaacatataactagatactttgaggtggggtggatgagaaggccatttttccttagggcttgatttatctgatagttttggagtgtcagttataatgacaataaagattcccacagatgagcccagactggtcgaagtaattcacataacaacacaataatgacaagctcatgggataaattttgttcccccctcaactctcaagtcctccttatctgcctggcatctatcacaacaaaccaggtcaaaatcttacctggaaaatacacgactcagtgatcaatattttatcaaagtgagaatgtgataaacaaggtcagttgacccctaaaatccgtatttacactagaaagcctcacatcctgtatttagacttcttgtgagagaacccattctctgtcactggagtatgatcaggagacaagggtacctgttctctgaggagtcctgactaactggcgagactgaatcacacacatgaaaaatttcagatgaaactcgtctttatgcatggctgcctcctagaaatagagacagagtttaatccaaacgaacagagctgtgaaataagatgtcagtgactgacatggaccagctacactcatgactacttggccttaggacttgacaatataatataaaagtatcagcacatgaggcaatacaaataatctactttgatgtatttgacaggggaggaaaccctgaactcagcaagctgctgagagtatcagaaaggctgggggcctccagaaactgcccttctttaagtctgagctcagactgtgcctgtggctgtgatctgggtgtaaaggacctattaagggggcatttctctaagacttctacagggcctgggtccagaggcctgccaagctgaggtgcttgacaaaaagcctgaatgaacaaacatatttcttcccattatgttctcttagaaagtatggcagattccaggttaatcaatgtgtcccaggaacaacaaagcccttcaaaggtcacaggtgattcctgggtccttctctatctctacccagaaaagcagatctctagtgggctcccaaaagctttcctcacagctctgcctgtttcaaattcctccagagttctggaaggttctacatcttgccagagtctagcctaatccgtcctcaagttgcttgtttgtttgtttgtttgcttgctgaatggtcaatcaagtatgaggtggtgcagagtacaggattgcaagttaagaaacttgtttcctagtcctagatgggccgtgcacttaaaacctttgggaaatcacttcacttctctgaacctggtaagactaaagtatctccaataacctctacaagcactaacgttctgtgattctcaataaaacacgagatagcctgagatcgatttagatctcaggtccctatctgtcgggggaagccacaggtttccgcagatttagggccaccgcgaaaagctgccatggaaactggaacgcaagcaagcaaaactcgccgggcggaaccagaaggcggcgggtaagggagcagagggaacagagaaaagcataggacgaagggctcactaacagtattccgagtacgagaaagcgaaaaagcccagactgaaaagggtactgagaaattacgactagtcttaaatgctcccttcgcttctcgggcctcgccacaccgcgcaggcgccccactggtccttaactctgttctttgacctcctgccccagccccctcctcttcagccacctagcgactcttccggtgctgtgaaggcggttccggttcgcggcggttcccgggttttgcgttccgcgcccggccggaaaccccttcgcatggcagccggttccggttcggtgagtggcggcgggaagctgggggaggggtgaggatggagggagcctggtccaggagactgtgtcggacccggtcagccggcccgggctggactgggcggaagcggggagcactgtggggccggcgccttttcctctgccccgccccctgggaccacctcccctcccccctgctgtccggtggccgcgctgtggccgccggtggccgttaggctacctgaggccgttccttctggtctctctctcctgggccgcggagagaccgtctccctgccgttacagcaggccccatcccagcgcccagccgtacttggggaaaggccggttgcgattccggggctttcccgccagagctgggtsttctctggggagagctgttttcaccgggaagctcggctttctgtggtacyggcttcatctcccgccttccttgagacccgagtgatatttcttgactacttctgcgtctcacgtaaacatttctccaactctcctactctgtggtatctccctgagatgtgatatcgctagtgccaccatcagaaagaaacgtctggaccctcctgctcaggttatgaaaatccccttaactgccacaatttgcttacctggcwcatcgcctcctggtaattcccttgaaccgtctctttcttggtgtaccctaacgtgatctctggatmtatgcctcgtttctctttccttgagcttgrtgatttctgtttatcggtgcctgtgcagtatttccactatcttgttagcagtaacttgcttctttatcactttcaagtcagccttgttaaagtcattttacttcatatttggtacacttattatatttggagtggtggtgattcttgtaatattcatataaagccttttatctactaccaactatttgactgagggtctttgttataattggttattctggatgtattagatctcatcatctcctaaatctttattcttcataaaaataatttgtgttaaggactcatgttgaaatacagattaccctgactttgaaattacagttaaagcgcaactttaagcatctctataagcatgatcccttaacctacttccagtttacactctaccaccctttatttttcctctctagtcccttttaggaaggcttattcatttttaactgacttcaattaattatcccaactgcaaagatggtcttcatgtcactcatctaatgagttgtctagagggagtggatgggtacaaaaacaggttctgctacttctggctaagggaatgcagttgttgacttgcattgcggctttggaactcttgtccttttcttcccaacttctacatcttctatcagttgtaccagctctactgtcttgcggtacstgtttatggatmtggctttccctactrgacagtgagctgctcagtggcagggaccctttcttaatgcacgtagtcggtgcacagtaaatgaatgtgtatgaaagaatttgaacacttagggtttacggcgttagagtgttaaggtatttaaggtgttagagtgattgggagagattacatgtaaaaatagaaggaaagaacctcaaacacatgacgatatagtacaaactattgtacacataattgtttttcagaacttggaaaagggtgatttcacatggttgctttcacacccttcttatatcataaattgttctaaccacatcttggtcctggataaagctaacattgcgtctctctctctctctctctctctctctctctctatatatatttttttcttctttttttagacagagtctcgctctgtcacccaggctggagtgcaatggcttggtcttgtctcactgcaacctccgcctcccgggttcaagcgattctcctgcctcagcctcccgagtagctgggattatgggtgcctgccaccatacctggctaatttttgtatttttcgtagagacagggtttcaccatgttagccaggccggtcttgaactgctgacctcgtgatctgcccacctcggcctcccaaagttctgggattacaggtgtgagccaccgtgcccagcctcaatatatattttctagtaacttccttgcagccctagacattgtctttcataatcccctttttgcatatatgtaaggttataagtgtttcaccgcagttgtcaagactgtgatcttttttgttctttcaggtttcccattatcttgtgttccactactaacctgacttcatctgaatgtctgtaacagcttatgttctttcagtaaattacatgaccagtgtatactaggaaatgaattattagaatcatttttttaaaaagaaaacatttttacagttgcttgaatttggtggcatcagaggttccagatccaacattttcatggagaatcttggggtaaaatattccttctcccaatgtaactgcaagtggctaaaagaatgtaccataagcacactgaagtagctggatgtatttgtagtaaaatataaatgtggggttttaattatttaaaattataaatcagtgtggattccccagggttagtgagggattacttttaaattgccagtgtgtattaatctttgaggttgtgttaaaggatttgaagttgtataatgtttgaaatgtgcatttgccctggagtcaggatacatggattcttgtcttctttttgccccatctgtgtgatttcagggaagtcacttaacctctctggatataatcggtaaaattctttgaatttctagcttccttttctcttcacatctatcccaacaaaatgcaaggaaattgacatgggattattctgttgggcaccaagcttttaagttggcattcttcttaataataattttaaaaaggctagtaatgacaattatgaagcaactttaaaatgtcaaaaaagtgttgctaatatattagttgataagattttttcccccttaatctggaacccaagggagtctactctattaaagaagaaagaaggggaaagaataacctgaagaatttttagtaaagaagccttttaagttgagcatttggaaatatatttgaagcataaatctaaggcttaaattctttagggatccttcctggcaagactaggtaatcagataattactctgcttagtctatagctatgccaagaaaacttttttttttttttttttttgagacggagtctcgccctgtcgcccaggctggagtgcagtggccagtggcgtggtctcgtacgccaagaaaactttaagctgccttcctttgtgtgactttcattattgtgaccacaaagaatgcctattatcatcatccagcctcatgaatacattgaagccctagtattgctatgtggttgatgaagtgcttaatattttttaaaaatatggttataagattataaatatatataggtgtgactattaccatccctagtagcctcctcctcttggaaatctaccaagaccatatgtgccgaggatatgtttattaacctagttccaagcagtttggttgtgtttttgtgtttggtttttttttttttttttttttttgagacagagtcttgctctgtcgcccagctggagtgcagtggcatgatctcggcttactgcaacctctgcttcctgggttcaagcaattcttctgtctcagcctcctgaatagctgggattacaggcacgtatcaccacacctggctaattgttgtatttttagtagagatgggttttcaccatgttggccaggctggcctccaagtcttgacctccttggccaagtgatctgccctcctcggcctcccaaagtgttgggattacaggcgtgagccactgcacccggccagcagtttggtttttaacatctttattttgtggaaaaagtggatacatcagaggagacagtaatttttatataggcaaaggggctttggtttgtagcagtttgattgatgatgttgggggaagtactttgtattactccagagtagttcttgattgtcattagagtatcaggctactgagtaagacatggaagaaaagtcttaataggaccatcacaaagtctgtcacttgtttatgaagtgatttagcatgaggtaatagaacaatggattgggaagaatttctaggttataatttcggtgtagttgctaacattatgactttatgcaaaccactcagtctcttaagggttggcgctcccaatttgcttcttgctttaatattctgtgattctgtgcgtagtctgtaattgctgtttaatgtagtacaggttgcagaaatgtttggaagtacctcaagctagttttagtttttactcttttcccatcaagtcaactctttaccaccttagatttttctccactaagaacacaaacaaatgtcacttctagtggctgcaccttctaaaattaagtgaagtaggtgtttcagtatgtaatttttctgttttgtgtcttcttttataggactttgtatctttgctaaagtcagtgatgtgaaaagacttgaaatgggtaagactaactagctgttgaatccttttagctactttcattggttaagctgtagtgaaagaatgggttttcctaacattttcagtatttgtatctttgtgcttaataataattttaagagaaattttaatcctaattatgtaatactatataccaaacaaaattattattattgctatttttgaaacgtagtcttgctctgtcacccaggctggagtgcagtagcacaatctcagctcactgcaacctctgtctcctgggttcaagcaattctcctgcctcagcctcccaagtagctgggattacaggcatgtgccaccacgtccggctgattttcgtatttttagtagagacggggtttcgccatgttggccaggctggtctcaaacccctgacctcaggtgatcggcccacctcagcctctcaaagtgctgggattacaggcatgagccaccgcacccagcccacataattatcttttggttagaacattgtttatatgctcatttaggagtattatctcattgattgtattgaaaaagttaagtataccctagcaaacatttactgtgtactagaccctgttctaagtatttaaaatatattggttcatttaatccttataaccatcttacaagggtacctaatagtacctaccaagtaggttactgttgttatccctattatatcacaaggaaactgagacacagaagttaagaagctcgcctagagtcatgtactataactggctgagccaggatttaaacctaggcactctggttctagagttttctagagttctcgttctttttttttttttctcttttttcttttgagacggagtctcgctctgtcacccaggctggagtgtagtggtatgatctcagctcactgcaacctctgcctcctgggttcaagcaatccccctgtctcagcctcccaggtagctgggattacaaacatgcgtgcgccgccaagtccggctaatttttgtattttcggtagagatggggtttcgccatgttggccaggctggtcttgaactcctgacctcacgtgatccgcctgccttggcctcccacagtgctgagattacaggggtgagccactgcgcccagccaagagttcttgttccttagtactatgttatactacttctaaatgataaataatttgattaatgtaaatattctatttcatttagctagtgttactgagaattgtggttaggacatttttcactatttcatttgtagtactttatgtctgttaaggggatcaatataaggtcaggactagtagctaatttaggaataagttgaaaaatctatacacttaggtcttataacatcccatatgttccttttacattcacattagctttctctctattctgtgttttccttttccttagtctgccttctccttccctgttcatttgtttccattttctctcattgctgatagcagtgtaagtcgttgaattctgttacgtttattgcttctattctagctcttctrtagtaacaaaggtatcaaaaatggttctgaagtaaaattctgccataatattatagttattgagctgatacctgttaagagcaatatgaataaaattatgcttttaaaaaaatgttcaggcagattattattattattagagacagggtctcactctcttgcctaggctggagtgcagtggtgttatcttggctcactccatcctctgccttgggttcaagcgattctcatgcttcagcctccaagtagctaggattacaggcatgtgccactatgcctggtgtatttttagtagagatggggttttgccatgttagccaggctggtctcaaactcctggcctcaagtaagtgatccgcccacctcagcctcccagagtgctgggatyacaggtgtgagccaccacacctggcaggtggattacttcttaaagcacttctttgtgttaaaacaggaaatgaaccagtgttaacagtgtgtgttactgaatggtgaattttttcccccaatttttttatatttaaaattttttctatagttaaaatatttaaaaagtttcttttgggagcatttttgttttttgtttgtgtttttctttgttgttgttgttgttgttttctgagacagggtctcactctgtcrcccaggctggagtgcagtgactctgtcatggctcactgcagccttgacctccccgggctcagagtatccttccaggtcggcctcctgagtagctgggactacaggcatgcaccaccatgtctggctaatgttttgttttgttttttaatagagacaagattttgccttatttcccaggctggtctcgaactcctgggctcaagccattcgtctgcctcagcctcccaaagtgctagtattacaggtgtgagccaccttgcctggtctcgttatttttaaagctttaaattaagctgtttttatatgtgtacaagttttgaactgtttggtagatggcctcaattaattccaaatgagccaatttctgcacatggacctcttttgacaatgacaatatgagatttttgccattggttagctatgaaagagggattttattttattgcagagttgttcttcaagttcttttttgtctttttttattattattgttagacatagggtctccctctgtcccccaggctggagtgcagtggtgtgatgatagctcactgtaaatttgaactcatgggctcaaaacagtcctcctgcctcagcttcccaagtggttgaggctacagacacgtgccacattggctggctaactttttttttttttttttgagatggagttttgctcttgttgcccaggctggagtgcagtggcacgatcttggcccactgcaacctctgcctcccagggtcaagcaattctcctgcctcagcctcccgagtagctgggattacaggtacccgccaccatgcctggctaatttttgtatttctggtagagacagggtttcaccatgttggccaggctggtcttgaactcctgaccccgtgatccacccgcctcaacctcccaaagtgctgggattacaggtgtgagccaccacacctgacctgctggctaatttttaaatttttttgtagagacagggtcttactatgttgcctagatagatcttgaacttttggcctcaaaaaaatcctcctgcctcagcctctcagagtgctgggattacaggcatgagacaccatgcctgggtgggaattgtttttattaggtgaaaagattggttcataggaaaaacgttattgaagaattatgtgacttgaactaatccagactgtctccccagatgatattgctgataggatgaggatggatgctggagaagtgactttagtgaaccacaactccgtattcaaaacccacctcctgccacaaacaggttttccagaggaccagctttcgctttctgaccagcaggttaggagcaattttcttcctttaattaattaattatttgggctcatcataagttttcatcttatgtagtttaaatgccacactcaaaaatacaagcatagctataaactttttagaatcagtaattttagtgtttggaattctgctctrtatattaaaattaagacaaggacgttaagacaaaataggctatgtatgagttctttgagaacagtacgttttagaaaactcattgttcctctgaattttaaaattacttatatgcagatcagtgttcttttaaactagcacctaaaattgctgagcattaaatgggggagaaatgtgaaaatatacagcagctctaagatgtctgtgctataatgcctgatttctcaaggtctagttcgggaccagcagcatcaacattacttgggagcttgatagaaatgcagactctcaggctttacctcatatcactgaatcagaatttatattttaaaaacatcctcatttgatttatatgcacatgaaagtgtggggagcactattaagcagtctttttcaataggaaagccattagtaatttggatgagatcattctttgatgtgtgaatctttcctaattatagtaggatgtttagcatccatgagccctaggcactaaattcctgtaacatccacctccccccataatcattttaatagttaatatatatccacacatttccagatatgtactcagggtayagcaccacctctgattaagagctatctctgtaaagttatcaaaagaaccaaaaccagattgatttttctcaacctttttaatatgtgttataaatggctttcagacaggatgtactaaatacatatttaccttctagtgaacattctttgaattaaattgtataacaaatattttgcctgtttttttccttgaagcctgaattatttcattagwttgtctatgtgttttcctttcttgttagtatgtagtattaatacgtataatatataaatataattatattgagttctgaaatagtcttagttctgctatagtctttatttagagacggggtctctccatgttgtccattgctagtcttgaagtcctgggttcaagtgattcttctgcctcggctttgcaaagtgctgagattataggcatgagccactgcacctggcttatagtcttgtttaattatatatttttcctagtatatgtttttattttattgttaaaaaagtgacatggccgggcgcggtggctcacgcctgtaatcccagcattttgggaggccgaggtgggcggatcacctgaggtcaggagttcaagaccagcctggccaacatggtgaaaccccgtctctactaaaaatacaaaaattagccaggtgtgatggcgcgtgcctgtaatcccagctactcaggaggctgaggcaggagaatcacttgaactcaggaggcggaggttgcagtgagcagagattgtgccggtgtactccagcctgggcaacaagagtgagactgtctcaaaaaaaaaaaaaatgtgacttaagaaaaatcttctgctttgtttagattttatcttccaggcaaggacatttggaccgatcttttacatgttccacaagaagtgcagcttataatccaagctattactcaggtatgacacattacttggagtcaagggactttataccttttggatttcttgatagcatatcgtttatgtttatcatctccaaaagtaaaaacattgtcaaaaacaagatggtattttcttcactaaaacatcatttgaatggcttttcctgtgtatgtggttgctatgatactttactgattttgtctcatccaaatactggttttctagtgggaaagtgttttgagaatctaactgtccattatgccattgtaaaaagcaatacaactttgtttttgacctttttttgggaatatgtgtatgtgatgtgtgtaaagggtgtttgttttgcgttaatttaaatcacagagcaagtttatttctgttctgcttgaaaccatgaaacctgaaaatttatttcttcctgagcttgtccttctttcagggcaggaaatgttaactacatgtttctgtctagcacctgccacagccatatgcttgcatattcaagggcttttctatttaacttgtgatccatgacagaagtcagcattctctaggctgttcttatcctgtgacctgcctgacttatctatcatctgccctcttactagggtttggacttccaagggtcttctgcccctgccttgagaaactaagagttttgttggttagcctcttggctgtaggactcagaaagattacagtagtcttcccaggtctttttactcctcatgcttcagtctccttgccttaccacaatatgggaataccagttataccattgaarctgcctcaacaggaatttttttttttttttttttttttgacacagagtctccctgtgttgcccaggctgaagtgcagtggtgtgatctcagctcactgcaacctctgcctcctaggttcaagcaattctcctgccttaacctccctagtagctgggattgcagacacccaccaccacgcccggctaaattttgtaattttagtagagacggggtttcaccatgttggccaggctggtccgaactcttaacctcaagtgatccgcctggctccccctcccaaagtgctgggattacaggtgtaagccgctgcacctggctggatttttataaggataaattgggatgataaatatggaatgcagataataattattcttgttatttggcttccttaggattctttgtcagcaagatgagatctcctccctaaaaagacgttagtaggatgctcttttagattcatactatatttaaatgtgatttaggtgggtgatactttatctgccctgggcactggacttccatagtatgtgcataatttgtatagaaaaatcaatcaattttctcaaaacgtaactctactaccattattattgagaaggctttttgatgaacagagtctgaaatctggtttgataggtcaatattaatggtggaggaacagttgaatggttaatgaaattagatcatcagtatttccatttgaactcaggctatgtttgcttataatttcatatgccaatttaccattggatagaatctctgctttaagttaaaaacaattacttaataataaagttatatagaaaattctactcaaagttcccttctcataacccaattctaatgttttatttctaatttatttttaattattattattattattttttgagatggagtctcgctctgtcacccaggctagagtgtaatggcgcgatcttgactcactgcaacctcygcctcctgggttcaagcaattcmcctgcctcagcctcccgagtagctaggattacagctgcctgccaccatgcccggctaatttttgtacttttagtagagatggggtttcgccatgttggccaggttgttctcgaactcctgaccttaggtgattcacctgcctcggcctcccagagtgctgggattacaggcatgagccactgtgcctggcctatttttaatttttttttgagacagagtttcactctgtcacccaggttggagtgtggtgacatgttcatggctcactgcaaccttgacctcctaggctcatgcgattctcctgcttcagtctcccgagtagttgggactacaggtacatgccaccatgcctggctaatgttttgaaaaattatttatagaggtgagggtcttgctgtattgcacagactggtctcaaactcctgggctcaagtgattcttctgcctaggcctcccaaggtgctgagattacaggtgtgagccactgcaccccatctcattcaactcttatttaactcaagtctctgtgatctcttccgattatctgtgtgtacatacctcatacacattgcatgatttgacacatgtaatcttttttaactcagtatttttattttaattttttttgagacagggtctcactctgttgcccaggctggagtgcagtggcacaatgacagctcactgcaacctgcacctcctggctgtgatcctcccacctcagccccctgagtagctgggactaccagtgcatgccagcatgcctagctaatttttgcattttttggtagagacggagtttcgccatgttgtccaggctaatagttatagtttttcatgtgtcaacatgttcttttttttttttttttatcattttctgctcatttctaattcatggaattgatacgcacatccacagtcccttatgtgcaattccaaaatccaaaaacctctgaaaaccaaaattttttttcacatctcatttggcttcaaaacctgacctgaggctgggtgcgatggctcaggcctgtaatctcaacactttgggaggccaaggcgggtggatcaccggaggtcaggcattcgagaccagcctggccaacatggtaaaaccctgtctctactaaaaacacaaaaattagcagggtgtgttggaggacacctgtaatcccagctacttgggaagctgaggcagaagaatcgcttgaacccaggaggtggaggttgcagtgagcggagatcgcgccactgcactccatcctgggcgacacagtgagactccatttccaaaaaaaaaaaaaaaaaaaacctcacctgaattcattccttggcaaaacctacktgaactgacatgaagctgtttatattttttcttttttaaaatctctgtaaaaatgagtattttcacattttgctgtagataacatgtttgattacagagtgctcttacagattatacttgaaagtgttacctaatatgtcaggttatctttctaaaattccaaaaatttaaaatttggatatagaactggactcaagcatttgatttgggataatgggtgtgtgccttcatttgcttcattattttccctatggtttaggtgcacatttacccttaccattttcagctattgttaataacatgacttaaaagcattggtatatagagctttttttctcctaagttttagtaaacccttgatattcacaaagaatatatctaagattatcttaagtcctaatgtaatatttggccagattccttggctttctactcagttacgtaattgttgagaattacatttttcttatgtttatcctcataccacaagttgattcccatatcaacagtcttacactaaaagcttcatctctcacttgagtaccttttttttggagaagaaaataattataacagttactatatatatggtgatgattagagaataacaatagtaaataataaagtcatactgaaatgggatgctaaattacagcttgaagcagaggactcaaatttgtgcctttaacaaatctcatctagtccctgatcaaacaagcttatggcatgtcacagacatcaaaggtccctttctaaaaatcaggaatttaaatctgtgaacgtcagtggtctatatatatttttttcttataatgaagtctttaattaaaacctactttttactatggactttaaaaaaacttcttcctctttccacactcattccaattatgctctctcctttggatatattcttttctgataatccccacatcgattgcagtggtcatcactttgtgccttacctcttgattgggctagacacggaccctcagtttacctgcctttatctgctgatcctgactttattggtatttgtcttctctctcaccctgctgtcccctccttcaccaggatgaaaatgagcagsaaggcccaaactttaggatctaggatctggaacttctcctttattactttattggattgacttctctagatcaagctttttaaaaatctgcctctcaatccacttaagattagagtatttaaaacattgatttttttaaaaaataaaattttaaaaacttttttacagtttactttgttacagcaaaactttacacgcctgtaatcctagcactttgggaggccaaggcgggagtgtcacctgagcccaagagtttgagaccagcccaggcaacgtactgagaccctgtctctacaaaaaataaaaataaattacctggacatggtaacgtgtacatgtagtcccagctactgaggaagctgaggtgggagcatctcttgagcctgggaggtcaaggctgcagtgagccatgatggtgccactgtactccagcatggggacagagggagaccctgtctcaagaaaaaaaaatgtttaaccctaaacagagaaaagtgggatgaaaagaagtgattttgcttgtgcttagaatcattatcaatgtcttctctttggaaaatatgttacattaggttaccagaatgatacttggtaggtaatattatttaaacatcctgctattattttaactaaagttaacaggaacaactggtagtacttactttcatagtaagtagttagctgacacattcttttttttttttttggagacagaatctcgctctgtcgcccaggctggagtgcagtggcacgatcttggctcacagcaacctctgcctcccgggttcaagtgattcttatgcctcagcctccctagtaactgggacgacagacgtgtgccaccacgcctggctaattttttgtatttttagtagagacgggtttcaccatactggctaggctggtgttgaactcctggcctgaggtgatccacctgcctccgcctcccaaagtgttgggattacaggcgtgagctaccacacccagtcttgacacattcttttttaatatgaagtttattatattcataaaagtattgcttgtccctgcagaaaatttgtgtagaaaagtagaaaaatacccatcactctatcattagaacataaccacaattaaatttttggtgtattttctcctagttttgtgtgtatgtatgtacacataataggtaatcttttttgtggtgttcgtaactctgatttctcacagaaatcagtggtgacagactatcatgttaaactctcactatatgtggccaggcacagtggctcacttgtattatctcagtactttgccgttgggagacccaggtggaagtatcacctaaggccaggagttcgattccagcctgggcaacacagtgaaaccctccctctccaaaacaatagaaaaattaggcatgtatgatggtatgcacctgtgatcccagctacttgggagactgaggcaaggagattgcttgagcttaggagttcgaggctgcagtgagctatcattgtgccactacactccagcctgggcaacagagtgagaccctgcctcaaaaacaaacaaacaaaaacagtatctgtagtttcctcttggtctgtctctagctttgtttgatcccatcagcaatagaacaccattcagcaatttcattgggattggaaccacctttttctgtttaaacagactgcctgatcttctgcttttccccttgcattttaaagctgcagtctctgtcacatgccgttgagaatgctactctgacttatccttggtctcaaatttcacacctgttagggtaatttgcatttttgacagaccgatgcctcagatagatatctgtatttagatcatgccctaatcaaattttagccaaaatgtgtgagagacaaatatttctactgttacaactttaaacttaagtataataattttctagttctttactaagactcattttcattagcatcatgtttctrtcctcaaaattatagtaatagatgctaagcatagatactgattacaaaggaacaaagttacaattcattttgaaagtaaattagcttattttaattatcagactaaggtcaccaactgttgaattaacaagtgctaataccagccatgacttcttcttttttcctatttaccctaaatcctgacatcttgattagcttacagaagcacaaaattatattttggaaggctgcctatttggatagagcatgaaaagatacattaaatacttttaatagcataaatttacaatattgcgaaaagttctatagtaatatgttttaaaagaatatcttcaaaataatgtcagcattagaaaaaaattccagaaatagagaattattattcttgtgttttcactggagctccttagagttccataacttaatgtctgaagttattttgagggagctgttttaaattgtccarttctgcagatagggmgaggaggktatagaaattattctaccactcctagctgaaacttcaggaggtttttgatatgccagattgtaatccacaagttagaaaattcaaataataagtaattctcagttaatctgattgtagtagcaaacattggagtaataatatgtttgattatggcattagatgactgaagattattataccagaaccagatatatatgatgggtcattccttgccataagccaaccagaataagcagcaattaggttatctctgctctttgagagagtacctgagtcttgaacatggtaactaaaacgaagaaagtgacactagctgcttagtaatcaataactgttgttcatttgaattacaattctcactggccccccacctgctttcttactggtctggcctaccttctttcaggcccaggcctgggagtgcttgcaagatatagttggggtaaaatgttgacttttggtggacaccacggagtcacattgatgcagataaggcacatggctgtggcaggattcagctccttcatcaattttcaggttagtatggctgaatcaattatagtttgtagaagttcccctactgcagactttactggcagttgagactgggatctttcttccatgagagaaatggtgacatgccacattactttggaatacaatggttggtcatggttgcagtcataaggagaaccacctgtagaatttgtttaatttattcaaacttttatttttttagataatccttcctcagacagttttcttggctcaggcgatttaagaacctttggccagagtgcaaatggccaatggagaaattctaccccatcgtcaagctcatctttacaaaaatcaagaaacagccgaagtctttacctcgaaacccgaaagacctcaaggttcgtattttgtcatcttagttctcaagcccttcctcagacataagagaaagtgactaaaaggtagatagttattacattgggattttaaaagagtaacaccatttttggactttaaaccttaaggatatgaacaaatccattttacattttcaacttctcatttacttagtgctgaattttgatgatagccagatcttactagaagagagaattttaagtaaatcttggtggatatgagaatattgggagccttcaagatcaatatggctcttgcaaatcttaaagtgaaaatcagtcaatctccacaatttgagcaggaaagaaacatattttacagctatcaagtgagcagagacctgacttaaactaaagcagttctctacctcatggcattagtcaagtagaccaagctacttctatatattagaaaataaagagtcacagaccgggcacggtgactcgtgcctgtaatcttagcaatttgggaggctgaagcaggtggatcacctgaggtcaggagttccagactagcctggccaacatggtgaaaccctgtctccactaaaaatacaaaaaaattagccaggcatggtggtgtgtgcctgtagtcccagctacttgagaggctgaggcaggagaatcacttgaacctgggaggcagaggttgcagtgagctgagatcatgctgctatagctccagcctgggtgacagagtgacctcgtctcagaaaaaaaaaaaaagatagtcacagagaactttatgctagttattccaactttataagctctatctaacaaaacttacatggattattaaaggcagatgaaatctggcttagaaacttttccctcagatattttgttatattagtatttattatattagtaaacatttcttttttaaaatagtatttatgactacttaaattctgccctggtatattttaggaatgtgggattatttagtgtactgtttagtcaagtttgagctttrtggtgttgatagaagccaacaagatggcttttattattttatgcacatggactccaggaatgtgtcaatactccctgggatcatgttcctcacttaacttttaaaaaattatacagtaattcactcatacactcacattgtagaaatcaacacattaccagcaaagctgaagatcccttgaccactacccacaatcccaatcccttttccttggtgtgtttccttccaaaccttttcctatacctatttctctcttactctttcttactcatatatagtatgatatatatgttgtgtatactattaaatgtatgatattattttgtcttcattaaagattttctatatgcatcatttagcaggtggcttttttaatgcaataaagccatgctgttattttaaaaaaatgttattayagaagtagtacaaatactttgggaaagtttagaaaatatagttaagaaaaataaaaaataaaaacatcacattgccaccagcctgagatcaactctgtaatatcttagtacatatccttctacatacttttctctactttttttccaaaatgagtttatagtatacatattcttttgtaaattttgttttataccctaagtcatatttaaattttctcagttgacccaaaagtatcttttatagttagtttagttttgcatctggaagttattggctttgtcacttataactagaacagcctttttttgttttgttttgttttgttttgttttgtttttttgttttgttgagacggagccttgctctgtcggccaggctggaatgcagtggtgtgatctcggctcactgcaacctccgcctcccaggttcaagcaattctcctgcctcagccttccgagtagctgggactacaggtgcccgccaccatgtcctgctaatttttgtatttttagtagagacggcatttcgccatattagcaaggctagtctcgaactccagaccttgtgatctgccttccttggcctcccgatcccttcctgggattataggcatgagccaccatgcccagcctcagcctcctttttttaaatgacatgacttttctgtataatgttctactttttggatttggcaggttgcttcctcgtggtatcattattttgtcaaaaaatcacctgtattttttataagctaggttttagatgtgactaaaaggtgtgctgcatttatcacatttgaaaaacaaacagtatcttgttttggttctcctattattcatgatgctagactgacctctggattgaggaactgacagtctggtggttaattgtacagttaggttttttcccgtgtgacttgaatgtaatctaaataatgttactttggcgttatatgaatgatgaatttcacatcagccatcacctaataattaatatcatttgctaatacctgataatagttttattagagttaatgaaataatatttttctaattttatcacttttacacttcttaattggcattctgattgcatttttccttagctggggctattagagtccctgaaatgtgtttcctatgggaaaggcctgatacatgattagatttttctttttcattaccagttttcaaagcaaggtttttgtaaaatagacacttcatatgtttcaaatgaatttgtctgttccttttttagtgtcattatggattcagtattttgtaatccactataattgttatacttttaatgctcacattctcagaaatttggctagtsgaagccctttaagcttgcttctgtctgtttgaccttaactcatgaattttgggtaacacccttgctttctgtcattgcaggatgcccttgtactgtttctttagaagagtaatcttttatgttaaaaaaaacatgcataggcgcacgcatactctgggaaacacaaatacagaagacattgtggagaatccatcatgtctttaccaaacaattgcactgcccttgccatcttttcctagctgcatccactcatcctaagaaaataagcctgttcctaaaattctaagtccttgctcatttccccattctttttttttttttttttttttttttgagagaagcaagaatatgactgtaatttaacatcaacaatgacactgtgtaacagcacagggaagaggtagtggagagagatggtcaggcttcctgttccttaaccagccttgattttaacagcagagccccagcaacctagaagcgcctcacctagcctcttaatggagtgggaaggggcagggacttggaaattagaggctcaaaatgtaaagaaggctgatggcaagcctggggagaggcctgaraatgagggaagggctgagggctgtgaggagtcctcacacaaagaccctagcacaggtcttcggcagtgaacatgcccctggccctccgcagggtggagtccttggcgtcctcatatgggtgctccttggaggggatctccaggacagtagggatagagtgctggtgggtgtccagggcatgctgcaccatctctgcgatgtactggttgatgaggatgatgccagtgtcatcccggtttagaaattgcyggaaagtgtcttcgatctcattgatggtcgtatccttctccaccaccaggaaattggggtggcagttcttgttaagctcccctatgctgcccagcaggaaaccagtcaccgtgtccttgtctctgatcactgcgatgagcttccttctccccgccatccctgcagccaggcagagctcaccccagagcaccagaagccactctcatttccccattcttaacacacgtacaaacccaagaagacttaaagagaattatgcactgtttgattttctttagatcttgtctgatttggattcagaccacatgtaatgattttaaagagttgatttcattgartttagaatattcagctgtgtttctctagtctgagtcttgaagaaaaaagaaaatgtattatgctaagaataagtacctcaaactttccaggtaatgataaatgagaaagagcacatagaaaaaactcaaaattggctgggtgctgtggctcacatgtgtaatcccagcactttgggaagctgaggccggcggattacctgaggtcaggagttcaagatcagcctagctaacatggtgaaaccctgtctctacaaaaatacaaaaatcacctgggtgtggcggcgggtgcctgtaatcccagctattcggsaggctgaggcgggagaatcacttgaacctgggaggtggaggttgctgtgagccaaggtcgtgccactgcctccagtctgagtgacagagcaagattccatctcaaaaaaaaaaaaaaaaaaactcaaaattagtaagccttagatataagacagggtttttgagttcacaatattcttcttgccaatttgccaatttttcccattagatagtataaagagacaaaaaattcttcagaggaagtaaataggccagaaggagaatttaatgacgcagcctaatagttgtttttaatgaaggatgggagccctctgttggtctttaaggaaatttaaaaattcagtttaaaagcttagttgagaggcttcagcctttatgcatttttacatatttaatcttaatttcctccaacaggctgggtacaaggggtacagggaataatagaaaatgtatgtgttgttagcatacctggaacccaggttttttgaagacatctaatctgttatgctttgtcataccacaaaactatatggtttctgaccaaaataaattctagattgtggatctaaaaatgcagttttaagtgtttgataattttgacaatgtaagatcttttaagtggcagaacctgatgcagcatccttatatatcatttattcatttattgtatctttccctcaaatgggaaacctattattttacctgttttgtttggttggttttrtattttgaaagtgaaaataatctctaggttggatttattttacttattatctrttcttatctttcttacaaactctttttttagtggattatcaaacagttttgcgggaaagtcaaaccatcactgccatgtatctgcatatgaaaaatcttttcctattaaacctgttccaagtccatcttggagtggttcatgtcgtcgaagtctyttgagccccaagaaaactcagaggcgacatgttagtacagcagaagaggtaaggaaaacgtgtgacaaaagctactaaaagttaggatctttccctacattgagccatttgctccctattaataattagttgtttaaraaccattctattttatccttcctgtgctttttctgtctgaattactctttttgagtgttatcatctattctaaagagattaaagagrtgttttagcaggacttcattatttgtcttactattatatcttctatgcctgctggacagctgactttacttaatctttaatgttgcctgaatggtttctcatacatcaaastatctctctttgatctttgctagacccttcctaaaccgttgtctcctatggaaaaattgttactcttcctccgtagtttttgataaaattttatttcagtccacgtgacgtggctcatgcctatgatcccagcacagtgggaggccaagacaggtggatcacttgagcccaggagttcgagacgagcctgggcaacatggagaaaccctgtctctacaaaaaatataaaaattagacgggcttggtggctcatatctgtactcctagctactggcgaggctgaggtgggaggattgcttgagcccaggaggtcgaggctgcactcgacttgctttgtgtcactgcactgcagcctgggcatcagagtgagacccatctcaaaaaaaaattgtttttttaatttgatgaaatacctattcttcttaccaggaacaatttttcttcaatataagagaaaaatcaaaaagctagttaaacaatatacatcctttcattatgagtaagaccttttttgaagttacagactcctgaaaagaaagatgttctgttgacacttgggttgttatattaattcagtaaacctaaaagaaaaagccaattttgtgaatgtaatgtagcatataatttgcatgataggatgtgtgcacatatctgttagattacatatttaatgtacgtctaatgctgtggttgcttggagatacaaatgaataataattaccttgcatttaaatagcattagagcttccagtgtactttccacgtgtattattgtttttaatccttttaactcagcaaaataggtagagatgaggtaatagtcatgttttacagattaggaaaataagggtcataggtcacatgactagtaaatggcaggcctagaacccagaacttctgaagaggtttggtcaagtatgctttctgttatacaacacagcaatatggttcctgcccaatgaagcttactgagcatggagtcaagaatacagcattacctgctaaataattacataatttggtaatcagtgatctcttaggtggcaaaacttgattatttgtgatatggttactaaaaatgctgtgcatatttttggtttaaagtttgtattgaggccgggcatggtggctcatgcctgtaatcccagcactttgggaggctgagacgggcggatcacgaggtcaggagatgaagaccatcctggctaatacagtgaaaccctgtctctactaaaaatacaaaaaattagccrggcgtggtggcgggcgcctgtaagtcctagctactcgggaggctgaggcaggagaatggcgtgaacccaggaggcagagcttgcagtgagccgaaatcgcgccactgcactccagcctgggtgacagagtgagaagccgtctcaacaacaacaacaaaaaaagtttgtattgaatctaaaacatttggctgggcatggtggctcatgtacaatcccagcactttgggaagcaaaagcaggaggattgcttgaggccaggagtttgagaccagcctaggcaacatagtgagatcctgtctctacaaaaaaaaattagctgggtgtggtggcaggtggctgtagttccacctactcaggaggctgaagcaggaagatcgtttgagcccaggatttcaaggctacggtcagctgtgattgtgccactgcactgcagcctgggtgacagagcaagacactgtctcaaaaaaaaaaaamaaaaacgaaaaaacaccaacattcaagtggagggtggcagaactagtaagtcatttagcagggcaagggatagacaagaaactggcaacatttgcctttgatgacaaagctggacaacaatgatgaaaaggagattttttttaacaaaaaaattttttttgacattacacaaattttcatgtcatcgttgtacaggggccatgctaatcttctctatatagttccagtcttagtatatgtgctcctaaagtgagcccaagatttatttttcattataccttttatgctattgaattttatattatatttacattattttatgcataaataattactggagttgtggggtttatgattatgctggattctagacagcctaaggggtgcagagagactttgtggaggagacaacagcagcatgacagctgggtacagggctcctaaccctcgcctgccccatgtttctgttgctcaggctcaccaggatcctttaattctgtgttcattgtaagtttgccattcacccaccagctctgtggaccactcagccttccttcttttgcctcctctgccagcctgaggactgggggttgcttgggcaattttacccttccaaacagccctccaggccacaggttgggtcagtggagaacatgaaggtggagttctccttcctcctgtagtgcaaagaagatgctaagaatctattctatgaaatgagcgatgcgggaaattttgcctgtttttagttctatattctcctaatatgaaagtcaagctacctgtactactatatggcttacagaataagccatataacatgaataatacaaaatattgggccaaactttattatcagactttcaacaaatttatttagatgtttatttttggatattacaaataattcggatataatactttttaaccctgggactaaatttactgatgggaacttacaaactggatgaaaagtcactttccgtgaaacgttgggatcctcagcagaggtacatttggttatgttaaaggaagatgtattaaccttaatgccggatttgtccatcaacttcaggaatatgaagtcttctacaaaattaacaattaagatgatgtcaccactgcactgctcagtcttacaacagaggtttgaagagaacacatgaagaagaatttagaaatatgcaagtagtggctgtgcagaatggctgatgctcaagaggcaacatcaaaaagctgtgctattcagtagggtaacggctagccacaagcactgtttaaattaattcaaattcaaattgaaaatttagttactcagtgacactagccacattttaagtattcattagccacatgtggctagtggctaccatattggacagggcaaatatagaacatttctattactacagaaatttctgttagataatgctgttatagaggatataaagttctgtttggaaaagagaaaatacttgtgacaataaaaatgtaaaatggcaaaaacacaggtagtttcttttcagttacatgttgcttctagacacgcttctttgcaaattattgagcaacattttaagatactggacttttgtaataggtgacagtgatggttttatacttttcttagaactgctttacagtgttgtcataagtcaagcatttgggactcagaaaattattgaaatttgcactttgcatattttatatggtataaagttattacttyaaacaaaatgaaaattaggagtattatttataaagttattggtggtaatttataaaaaaacagtttactagtgtcctaaaaattattttgtgctctctattaaagttttataattttatagttcttttatgatggagccttttatagaaacatcacctaactacaggactctgtcccttttaaaaaatataattcagcaccttaattaattatttttatacttcaaaacactcgtcttagggttttttcaggttttaaaaygtaacattagctagcttctttaactttatcatgctatgcaattattgcttcctttactcttaagatcctaattttctttttttatttgagacggagtcttgttctcttgccccagctggagtgcagtggcgcgatctcggctcactgcaacctccgtctcccgggttcaagcaattctcctgcctcagcctcctgagtagctgggactacaggygggcagcaccgtgccgggctaattttttgtattttcagtagagacggagtttcaccatgttagccaggatggtctcgatctactgacttcatgatccacctgcctcggcctcccaaagtgctggtattacaggcttgagccaccgtgcccagcccctaattttcttattcagtaaagaacagttagggctttctttaattttaattttttttttaattttatgaaatagagtctcagtgtgtcacccaggctggaatgcagtggcgcaatcacagctcactgccgcctcaacttcctggctcaagtgatactccctcttttgccttctgagtagctgcaactacaggcacatgctaatatgcagctaatttttaaacattttttgtgtagagacagggtctcactttgttgcccaggctggtctcaaactcctaggctcaagtgatcctctgccttggcttcccaaagagttggaattataggagtgagccactgtgtttaacaacaacaacaacaaaaacagtttaacaagtaatttacagagaaagatgttttcttttactgatagtaccagatggtccaaaaaagaattttgtttaaagttttatttaggtaactttcattttggcaaagccaaaaaagttacatgtgttcttttgggaaaggaagaaataagattgtcagttagctgggcgtggtggcgggtgcctgtaatcccagctactcaggaggctgaggcaggagaattgcttgaacccgggaggcggaggttgcagtgagccaagatcgcgccactgcactccagtctgggcgacagagcaagactctgtctcaaaaaaaaaagaaataagattgtcacttttactgacaacatgatcttatatatagaaaaccctacagactccaccaaagaactgttcaaactattaaatgaatacagtgtatgtgtatgtgtgaatatatatgtgtatatatgtgtgtgtatatgtataagtatatatgtgtatgtgtgtgtgtgtatatatatatgtgtgtgtatatatatatatatataaaatcctacagactccaccaaaaaactattaaatgaatacagtatagttgtaggatacaaaatcaacacacagaaattagtagtatttctatgcactgttaacaatgaactatgcaaaaaagaagccaagagaacaatcccatttacaatagctacaaaaaaccaatcaaatttaaccaaggaagtaaaagacctacatactgaaaaacatacaatgttgaaagaaattgaagatacaattaaatggaaagctattctgtgctcatggattggaagaattaatattgtttaaatggccatactactcaaagcaatctccagattcagtgcaatccctatcaaaattccaatgttatttttcatagaaaaaaatactaaaattcatatgaccacataaatccctgaatagccaaggcaattatgagcagaaagaacaaaaaagaagctaccacactagcttatttcaaactatactaccaagctatagtaattaaaacagcatggtattggaaatagacatcagccaatgaaacggaatagagaacttagaaatgaacccgttatgcctgtcgtggggtggggggagtggggaggaatagcattaggagatatacctaatgtaaatgatgagttaatgggtgcagcataccaacgtggcacatgtatacatatgtaacaaacctgcatgttgtgtacatgtaccctagaacttaaagtatgacgaaaaaaaaagtgaacccgttatatagctagttgactgatttttgacaaaggtgctaggactacagaaagggaaaggacagtctcttcactaaatggtgttgggaaaattmtatttccatatgtagaagaatgaaattaggtccttatctcataccatatgcaaaaatcaactaaaaatggaataaagactttaagactagaaactctaaaactgctagaagaaaacaggaaaaactacacgacagtggtcttggcactgatttttttggatttgcacgcaaagtcataggcaacaaaagcagaagtaggcacatgggagtacatcaaactaaaaagcaaaggaaacaattaacagtgtgcagagacaacctacagattgggagaaaatatttgcatccattctataaggggttgatattcaaaatatataaggagctcaactcaataccaagaaaacaaaactgttaaaacataggcaagacattatcctaggcaaactgatgcagaaacaaaaccaaatgctgcatgttctcacttataagtgggagctaaacattgggtacaaatggacataaagatgggaatagtggacactggggactacaagatgggagggtggaaggagaccaagtgttaaactacaaattggtggctgggcgccgtggctcacgcctttaatcccagcactttgggaggccgaggcaggcagatcacgaggtcaggagatcgagaccattgtggccaacatggtgaaaccccgtctctactaaaaataataaaaaaaaatggctgggcgtggtggcgcacacctgtagttccagctactagggaggctgaagcaggagaattgcttgaaccagggaggtggaagttgcagtgagtagagatcgtgccactgcgctccagcctggtgacagagtgagactccgtctcaaaaaagaaaaaaaaaaagcaaaaactacatattgggtgctgtggctcatgcctgtaatcccagcactttgggaggccaaggtgggcgcatcacttgaggttaggagttcgagaccagcctggccaacatggtgaaaccctgtctgtactaaaaattaaaaaaaaaaaaattagctctgtgtggtggcgtgcacctgtagtcccagctagtccagaggctgaggcaggagaatcacttgaacctaggaggtggaggttgcagtgagccgatatggcgcacctgcactccagcctgggctggtcaggagatcgagactatcctggctaacatggtgaaaccccatctctactaaaaacacaaaaaattagctgggcgtggtggcgggcgcctgtagtcccagcacatatcgaaatatcacagtacgagatggtgctaacactgacataatgtttaaaattatgttttgaggattggtggttgtattaaactgtatataagattaaaaataaattgccagggcatattactaagtgctagtgaacatagcccattgagtcaggggacctgtatagaactgatgctttaccagagttgtaagtccttatgtaatctggttctgtgtcaggtgatctcatttcttcctactcttctgattcacatggaccttactatttttggaacgcattaagcaccttcctctctcagggctttgcatgtgttgttcctctatttggaatattcttttatatatttctaggactgacttcttcccttggctttaggtttctgctgaaatatcacttttttttagagaaatcttacctgttcctgctgctctccttccatcactttccattctcttaccctttaattttctgcatactacctgactggttttttgtttgattcctttcactgcaatataatctccacaagggcaggaactttattttatttgatgcattcattatctttagtgactggagcatagtaggtgttcatgtcaatgaatgaatgttaggaagtatatggttttcactaaatgtagtattgggtcttacaggaaaaataaatacatgttggagatgaatattgtctctggaaagtacctgcacttaaataaaataggaaactgttggcaagatactccactctgattttgactagtctggttacttccttgtgatttttctaacaggtttcaggagtcaagggatttgttggaatcctaatttagaggccctttttttctgggactcttttttgactcagaagtgattacctgctggctttctggttttatagcctatagttcctctgcactattatttaaatatatgttccataatttttcaaagtatattatctggtatttactcaacctgtcttttacacacttgataatttttgttttgttttgttttgttttgttttgttttgttttttgagacagagtcttgctctgcccccaggctggagtgtagtggcaccatcttggctcactgcaaccttcgccttccaggttcaagtgattatcctgcctcagtctccccagtagctgggaccacaggcatgtgccactacagccagttggtttttttttttaagttttcttttgtagagttggggtctcactatgttgactgggctggttttgaacttctagcctcaaatgatcctccccgcttgtcctcccaaagtgctggaattacaggcatgagccactgtgttaggcccataattcttaattatcttaaggattctgcctgagctttggcagagctaggattcygtttacatgctagtttgagaaatacttgccttattggatgtgtttaaactgttttttttttttgttttcttatagacagttcaagaagaagaaagagagatttacagacagctgctacagatggtcacagggaaacagtttactatagccaaacccaccacacattttcctttacacctgtgagtcacagaagcatatttcagatgaatttaattctacaatttattacttgatattgaaacaatattcttctcttgctaggtctcgatgtcttagttccagtaaaaatactttgaaagactcactgtttaaaaatggaaactcttgtgcatctcagatcattggctctgatacttcatcatctggatctgccagcattttaactaaccaggaacagctgtcccacagtgtatattccctatcttcttataccccagatgttrcatttggatccaaagattctggtactcttcatcatccccatcatcaccaytctgttccacatcagccagataacttagcagcttcaaatacacaatctgaaggtaaacatggtatcatataactacatttttagtcctaatagccaattaactgttcattagctcattacaggcaacattgtaatatacatataaataaatgagcataccgaatctgaaaatatgaagtccraaatgttccaaaatctgaaactttttgaataccaacatgatactcaggaaatgctcagtggagcatttgggattttggatgtttggatttgggatgctcaaattgtataatgcaaatattcaaaagtccaaaaaatccaaaatttgaaactcctggtcccaaccattttggataagggatactgaacttgtaagacatgtacttacatactttaaatacatatgattcagttaaccatgctgtgagtaaactaaayccacaaataggatattctttttttcttacctcaagatgcaaatgatttgatacattttatttaaacaacttcctaagtacaggctagagtcaaagtatatatactcagcccaattgcttcagcactttctctgtttctatgactttacagtggtaagtaagaattctgaagttgtaggagttttgaaacatcagataaatactgaagcttaagtacttaggtttgtgcgttttagaatgattgtcagcattggaagcaaaaagttttctacgtaactttcaactaactgaaatattcactctctttgcattccagttaattaaggttttgtcgtgataggtttgtttccttaatttcccccttctttaggtatgtattatgtatcaatttatggtatgtacttaggtatgcaacttaaaacaagttataggttaaatggttaaacatcagggattttttgatagatggagcactagtctttcccctcctttctcaggttgtttgaggttttttttttaatctatttgtactttgtgaaaattctcactcaggattaaactttttggtagcatcattgtatagctacacatatccatgaagactcttgttatattttgtgaggtgatgtactgagaactgtaaaggaaaaaaaaaagccaaaaaacccaaactcctttaacctcagaaacatacattgtgttgcagatacttagatacaactaagttgaaacaaatatactacattgcactgtttaattactttccttgtaccatgtaataaatactctgaggttctaatgacagcactttagaagaacatgattcctgcctttgagtagtattcaacagagaaaatacataatagaatgataaaatttgtactttttagacacctcctggggtgctatttccttccctgtcccccttccctccttcttccagtttctttccctcttccattcccccaccccttctttcacctaattcagtcgcattgtagatcatgaactacagtagttcccccttatctgtggggggaggatatgttccaagacccgccccccaccagtggatgcttgaaaccatggagagtatactatatataccataccctatatacatcatgttttttcctatacatacatactaatgattataaattaggtgcagtaagagatcaacaataataactaataacaaaaattataacaatatactgtaatgaagatgttacttttttcttattaaatcaaaaactttaaccttttcacttaaaggaagtagtgttttttgtttttgtttttgtttttgtttgtttttgagactgagtgtcactctgttgctcaggctggagtacagtgggaccatcttggttcactgcaacctcgcatgtcctgggttcaagcgattctgctgcctcagcctcctgagtagctgggattacaggtgtgagccattatgcccagctaatttttgtattcttagcagagacaggtttcaccatgttggccaggctggggaagcactttttacggcttctctttggcatacctgaattgccaacatcattacttttgccttttggggacattattaagtaagggttactgaacacaagcactgctatactgagacagtcaattggatgactgaggtgactactaaatgacaggtggtgcatacaacatggatatgctggacaaagggatgatttcatgcctgaaatagagctggatagagatttttatcacattacttggaatggcatgcaatttaaaatttactaattatttctggaattttccatttaatatatttggaccgcagttaactatgcgtaactgaaaccatagaaaccaaaattgcagatagaggactaccatgaagacttttaaggaatcctgccatgttcttgttctcctgaaacagacaggaagcacagggagcaagtgcagcctaggaggaaattctgaagggcaaatatgtttgttatttcccagggattttcttatttgtgaagcaaattcttcactaagacctatttctgttctcagtgacaatggacttgcctctctctctctcccatctaacctttgttcttatgttatttttgtggaaataaaatatagcaaagtatgggaacttaaactaagatatctagaaagtataactttgtggagttttattactaatgaaatgctcttgtgtttctttaggatcagactctgtgattttactgaaagtgaaagattcccagactccaactcccaggtaaactttggaaaaagcttgttctttattaattaattaatatatctttttgagacggagtctcgctctgttgcccaggctggagtgtagtggcgcgatcttggttcactgcaacctccacctccctggttcaagcaattcttctgcctcagcctcccgagtagctaggattacaggcgcccgccaccacgcccagctaatttttgtatttttagtagagatggggttttgctgtgttggccaggctggtctcgaactcctgacctcaagtgatccacctgcctcggcctcccaaagtgctgggattacaggcgtgagccaccatgcctggcctaaaagtttcttcttaacatattgttttccctttctttaatcacagctttttcactaaaagttacataatgtaaaactacctcaattcagacctttctcacgtattacttgaattattttagtggctttataattgttcttccttcagcctctattttgttcttcattccgtcttccaccataccatgttcttgaaacaatttttctgccttgctcttttttcatttgtttttgtttttgtttttgttttgagacagggtcttgctctgtcacccaggcaagagtgcagtggcacaatcatggctcactggagctttgaactcctgggctcaagtgatcctcttgcctcagctgggaccacatatgcatgccaccatacttggctaacttttaaatttttcttttgtagagacgggatcttgctatgttgaccaggctggttttgtactcctagcctcaagcgatcctcctaacttggccttccaaagtgctgggatcgtaggtgtgagccactgcacccggcctgctgtgttctttagtccatcttccatgctgcaatcagagtgatctttcagaattcatgtctgatcattcattaaaggggtttaatgattatttgttaacctccttcaagggtggtttatcagacattgaattaagctcaggctccttactatggtatacaaagcacttctttcacaagcctcactttctcacttttaacaaatatttactgagagcctactgtgtgccaggtactagtataaatattgaggataatagggaacaatgtgaagtccctattctcaaggagcttgcattctacttgaggggaaggatgaaggacaatgtgaagtccctatgctcaaggagcttgcattctacttgaggggaaggataaacaaatgtatatgccttgtgataagtgctatgaagaaaattgaagcagggtaatatatagagtaggattgggaggatactatttgtatagggtggtcatggaaagtctctgataaagtgacttgagcagagacatgatggaggtaagagggagccatatggaaatatgggactctttcatgtgtttttataagctggactattttcagtttgcaaatacaataagcatttcttaccttcacattcagtgttctttttgcctggaatgtcctccgtacctcaactttgtctgtcagtagtgttttatcttttaggtctcaactcacatgtgaacttctgcatgaaactttacttatctggaggtatcaaatacttcttcctctgtaatacagtaatagtaatccatagtaaccattactatgattgctatgcctttgccatatatggctttgggaattcaattgctaggatgagaataatatcagttttccgttgagaagattaagagtaatgaaatattctttctcatctcagttcccctacttctttgcagctccccatatgttctaagctttaaatatttcttaaaattctctatttgttaagtcttttggggagacttcatagtttggattctttatttcttacatcttttttggagtcagatctgccttctgatcttgggttggaaaaggcttcatgtagctttggacaagttactcttatgaacctcagtttccttatcaataaaatgccagtattgataccttacacttaattgtgaagattaacttacagataaaacacttatttttataagtgcttcacatgaaatgccacaagatgcatgcaactttcttgggaagaagttgatctctcaggtaaagagttgatctcagttccttaatggttctttactaagactgcctttcctttacggaggatttcccctagtgatgactaaagaatgagatggcaggagaaatggtctgttgggtaaggctgtttgagcaatgctctttgtcaaagttggtgcctactctgctgaggcttggtttattggctctctactcttaattctccactactgcctctcagttaagttccagtaatgaagatctgcttttatttcccagaatatgctatgctgtgtcatacctctttgcctttatacattctgatccttctgtctggatgtccctttctctctctgtctacttggtaagctcttattttgcttccttttctttctttcttttttttttttttttttttttttttgtgacagagtcttgctctatcatccaggctggagtgcagtggcacaatctctgctcactgcaacctccgcctcccgggttcaagtgattctcgtgccttaccctccagggtagctgggattacaggcatatgccaccacacccagctaatttttgtatttttagtggagattgggtttcaccatgttggccaagctggtctcgaactcctgacctccggtgttccacccacctcagcctcccaaagtgctgggattacaggcatgagccactgtgcctggccttaattttgcttttcaaaatctcatccaggtgttattttttttttctcagaagatttctttgactttgccagataatgttagtttttccctccatccttctaccttgtttgttactaatacttttgtatctgtcacccattgctggtcatagtgcttggcatatgatgggtgctcagtaaataaatctttgttaaacaaatgaatttcctagatagcctgaagtgctctcttgagtagcccaagtacttattcctcccccgcttttttttaatgctttcatctattgaaaggcacagtcgaaagaacacagtctttggaattggacagataagatttctaatcctagcctttcaagagaaattatctttttgaacctcctttttcatttctgtacagtatgagtaataattcttttttatatattatgttgaggtttaaatagtatagggattttcattaggcttaactaatacataaaacatctagagcagagttttacatgtagagcactaagtatgtgctcaaaaacatttgcagttattattactatatgcctcaattatatgagaaataatgcatctctttggaaaagcagattttccctgcattttgttttccggagccagtggataccttgatccattgaagaaaactgcttgtccctacattacttgtttattcaagaaatactatatggctgggcatggtggctcatgcctgtaatcctagcactttgggaaggccaaggtggatggatcaccggaggtcatgagttcgagaccagcctggccaacatggtgaaacctcgtctctactaaaataaaaataaaaaaaagaaaaaattagccaggtgtggtggcgggtgcctgtaatcccagctactcaggaggctgaggcaggagaatctcttgaacccgagaggtggaggttgcagtgagccgagattgtgccactgtactccagcctgggcaacagagtgagagtcaaaaaacaaacaaacaacactaaatgcctactctgtgccaagcactattctagttgcagatcatttttttttttttaagagacagaatctcactatgttgcccaggctggtcttgaactcttggctcaagcgattctcccacctcagcgtcctaaagcactgggattacaggaatgagccaccatgcctggcctctgatccaggtctcttaactcccaatttgatgctctgtttacttgttctctatatttaatagttttctttggaaaagtgttcactcttcttctttgtgtttctgtgatagatcctgcctagttaggagtttggagataaggaagtttgagaaaaacaagaggctctaggacaattaatcatgtctgtggctctgctcagcatatcacttgggttgtcagcagagccacatggacctagaattggcctgtcatctttggaaggaagttgtgttgctgattctctgctttggctcattggcttgttagccatttgatgtagattattttgtgtgtggggatttttaataaatctttcaatctgagtcatttgggaagagcaatgttctagcttaatgtattattttgagaagtgatgtcctctttcacgtaatgttggtctcatgcaagtagggagctatgccaaatgtagtatctctgctgaactttgggtcacctttttaactaatatgtatccatatgattttaactaatatgtatgcataaggattgtgtctccttaattcctagttacaattattttatgtcatttagattccttttacttattccatacttgtaaagcactcatataaacaatttaaatgattgtttttattgatgaaaatattttaattttctcataagcctcctgctcatttgtcaaatttttcttttcctacccatagttctactttcttccaggcagagctgtggatcaaagaattgtaagttatttttggtatcatttttccttctcaatcagttcatttttagttagaagaaatcaaacaattagctaatcatcctgcttattttttgccaataagaagtacctgtttaggctgggcgcggtggctcacgcctgtaattccagcattttgggaggctgaggcaggtggatcatctgaggtcaggagttcaagaccagcctggccttcatggtgaaacctcatctctactaaaaatacaaaaattggctgggcatggtggcacgcgcctgtaatcctagctacttggaaggctgaggcgggaggattgcttgaacctgggaggtggaggttgcagtgagccgagatcacgccactgcactccagcctgggcaacagagtaagactccatctcaaaaaaaaaaaaaaagaagtgcctgtttatacttttaagttgttgggttttcaaaatattgttggagttggaacatttctatacttatgtttattaaatctataacaattgttgaagctaaattaaattggaaaaatagagttagctattatataatagggaaaataaatgatcctattttggcatttgtaaaactaatttattgaataattcatatttctggactttgcaaaatcactgaaagcatttagtctcacttaaggaacttaagttatccaaacccctcggtctcggtaattttttaaaaatctatcaaaaatgaagtatttgaattaaacttcagtgatatcttgtattcgtttctcctttagggttcaatcccatttttggatttccagactgaagtttcgctttcactataatcttaaaagcatgttaagaaaagaactgtgtgtttacaaatgttaacaagtcatctgttcacatttagcagcacactaatatttttagtaatttcagtaaaaataggtcgggtgcaatggctcacatctgtaatcctagcactttgagaggccaaggtaggggggtcgcttgagcccaggagtttgagactagcccgggcactgtagtgagaccctatctctataaaaaataataagtaaaaatggtagagtaatttcagtaacattatgtggtttcactctatgtcttaaaataaggatgataagttagtgtaaggattttagactttctttgtgagggtcctgtatttaatattcagtgtacatcaacaatatgtttcataatgagagtggtctacatttsgtcacgttccttttcattttctagaactagtgtttatgattctcgagcacgagaaagattgcgccagattgaagaacagaaggcattggccttacagcttcaaaaccaggtaaaaaagaaaattggaataatattacaaataaatagtacatcaaagtagaaactattttggaaagttacccagatttgggtaattgctgttgtaattccaagatcgtatggtagcatagcatgttatgatatgtcgtaaatgttcttggtctgtccagtcagtgctactcattgtacataagacaaatatagatagtcccctacttgtgatggttcgactaatgattttttgactttacaaaaaagcgaaagcaatgggcatttaagcacgctctttgacttatgacaggtttattgggacataaccctatcataaatcaaggaacatccacagatttctttatcccacttactctgaagytttatctttcagagattgcaggagcgggaacattcagtacatgattcagtagaactacatcttcgtgtacctcttgaaaaggagattcctgttactgttgtccaagaaacacaaaaaaaaggtcataaattaactgatagtgaagatgaatttcctgaaattacagaggtaagttacatacacttaatttctacactactaagtatcatgtttagaaagaatccctcggatgagtttcaaacataaaagcaatagtggtcaggcacggtggctcacgcctgtaatcccatcactttgggagactgaagcgggtggatcacttgaggttaggagttcgagaccagcctggccaacatggtaaaaccccatctctaccaaaaatacaaaaattagctgggtgtggtggcatgcacctgtaatcccagctacacaggaggctgaggcaggagaattgcttgaacccgggaggcagaggttgcagtgagccgagatcatgccaccgtacttcagcctgggtgacagagcaagactccatctcacatacacacacacacaaaaagccatagaacacgtgttatttaaattttcttgtatatttcagctttcgcttattttatataccaatctgggctttatttttaaaatattgaaaatttatgaaagaactatgggtggcttttaacagtttcagtgaagaagcatttaatacatttgtctttcatgtcatgtgcatttttacttaatgcacacatacaatagtttgacctcaaattgtaagctgagatttgctctttttttaagtaataaaacccattatagaaaatttggaaaatacatggaggtctgtgtacatttttagataatccgtttctttatccatacttctctttgaaacactaccatgtagctggtgagcataacacacttattatagttgtactgaattccatactttacatttaaaaaaaaagatctctaagaaagtaatttctaaaagatactgcctttactctcttactaccttttatgaaaaattctgtttctcaggaagtcatttggaccagagatataaaatacagttaatttttctcatgtgcttagaaaatttgatagcggaaggttgttccagactttaggaattaatatggaaacaaggatctgaatgttgtgctgaaaaagagaagggaggactagatgaagtggaaagaagtaatcgggrattactgggaaggaatagaaaccaaaatgttagaagtaaactgattaacagtaaatttataaacaatcgaatggtgataaatatagtctgaggattatatggggtttggtgagaaatacggtttttctgaagccacgcgtgtttgatgtcttgacaccttttgttttcttaggaaatggagaaagaaataaagaatgtatttcgtaatgggaatcaggatgaagttctcagtgaagcatttcgcctgaccattacacgcaaagatattcaaactctaaaccatctgaattggctcaatgatgaggtaatgttgcatctatttttacatacaaatagtaaacattaagtggcagttaaattaaggcattatctcactttttctcaaaatgtggtccatggatgacctgcattrgaatcatctctcataggcctcttcattcttgtaactatgagggagkgtggtggagacaggcatttttaacaaacatctcaggtgtattttaaagtctgagaaccactgaatttaccttttcttgttgaagatttgaacattgaagaagacattcactcattggtattctcactctttaaggctcctattctgcagttcatctcttctgaacaaataagtattagcygaccatgttgcagcatgagggaatactgtgggatttctttataggaatccagttttacttccctttctacctaagttctactcattttagatcacttatattacgaatgacaagctttccaaaatcgcctccatttatgtatgatattttttaaatggacattgaaaaagttatattattattaaatatttgaggtattgggggagaagttacrgtcttcacctcctaactccaatttattttaagtatattaattacactacagtttttaaactgatctgttcctaagcctaaacctgtaggtacctgttttattttagaaggttatttttacarcaaaagaaaactgggttgggtatcttttcctaagtaccttctttgcataagcatccctggctaatctgggtatactcaagcttcacagctgtggaggatttttagtttctcagtgtagtaatcattaaatattttagatatccatatcctgtttttgtatgatcaagaccttccaaataatatttgccaataactattgatcatttacctcattagtacgattcatgttttatgtgttttattcttgtaatagtcatcatatctttggaagtagatatgatagttcaccattctgcagataaagaaacaaggcatagaaagatttaaaaacttgcaaggttatacagctagtaaacagcagagccaagattaagacccaagcattgggtcttatctactatatcttaactacctcagaatcttaaattggatactggtcttaggatcagatatatagaacttaggagccatatatcatgtccaggatgctttttttctctggggccagccccattctttttgccactggttggtttataagataaaaatttcagaagctcatcactccctgaataatatctgtgaccaagaataataaggaaggcatggtttgttactgtctttctttagaagaaaccctctttgcctcttttggctcagatattagaacattggttcaaataatggaaaaaaagagctcaccaaatcaaaggaggaaattaaatcaaggatagttataagtatccactgataagttatttttgatctgtggtcctttgccatttatttcctgccattgctggtggtgcgaggtcagttactctaaagggatagtaggctttagtttgttgtaaatcatggaaaacctcctagagggcagcaatcagtaggatatgagctgagttcttgctatttactgtggcatttacctcagtgagattccttacagagacagcattcatcaggacatattttccattccctgggcccatcagaggctggatttttagcaagctaagttaatggaaattacattattttagaggagatgagaagaaggaaagattctttgtctactttatccctaccacccctagccataacttttgtagaaggagtgcatttcttctcagttcagaatgatgttatccttgaaaatgagtgccagttcacatgtccataataatgatgggagctatcttaaaaagcaccattttcaaagtaccatacttcgtaggctttcaaagttactgccyttgagaagctaacatcctgatggagtattattaggtatccttaagtattgatactcattgaagaatacttaattttggccagacacagtgggtcatgcctataatcccagtgccttggatggctaaggtgagaggatcacctgaggccaggagttcaagagcagcctgggcaacatagcaagacccgatctctacaaaaaaattaaaaattagccagccatggtggcatatgcctgtagtcccagctgttcaggaggctgaagcaggaggattgcttgagtttaggagtttgagtttatagtgagctatgactgagccactgtactctagactgggtgacagagcaagactctgtgtcttcaaaagaatacaaaacttaattctgtttctcagttgtgaactatcagtcttttgcaaatgatttgtcctctgttcaatcctcttcttccctcaagtagatattttcattaataataatttctcttctttttctgtttcctgctttataagatgtattaaaactttctccaaaataggtgactgatacattgttcttatcattttataaacaaagtaccatactttgtaggctttcagagttaaaaagtaatataagagcaaggaagtaaaaggaatcagattcagtttataaggaaaataaaatccagaaatcctatgtttgggatatgtatggaaagccattaggataccctgttcctaaaagaagagtgaccacagtacctattcatacagtaggttttaagatttttttcataaatggatttctctataggtcagtttggttaaattctgtacaacttcaaaggactaatgattgacaggattaatataataaaacgtctcaaaaatggaatgtgggaactggctgccatataaagaatacaaaaggaggcaagaagactgttacaatcaagacaccgtagatggggatttctatactgggtcaggagattagttactaatagaaatatctaattaagggaagggaggatagagttaaagagaggagaaattacactgggagcagtggctcatgcctgtaatccgaacactgagaggctgaggtgtaaggattgcttgagcccaggttgtcaaggctgcagtgagttatgattgtgcaactgcactctactacagggtgagtgacagaacaagactctgagatcctgtctgttttttagaaaaagggagagaggaaaaattagttgcaaaagtagaagtagattgaagcagtcaagaaacagaaggaaatattttcaaatgggtgtcattattagaaactatgtattaattcctggagattgaattggatgacttctggaatcccttccaactttaagattctaggtgtattatcctgagtactgctttaggctttgtgtttctctttatggccaaatggttctcctttgagggactaaggattgttttaaaaggcatcagataaatttagaaatacatggatataatttaggtatacaagtaaataaaacttacttttgcttctggtcatgataaaggaaacaagatttaccctttcaacttaactagaaaattagacaaaagatgaaacaacaattttcagacattggataacaggtagtaccaggcagtgatccctgaggaagggaaataaaaggtatgtatgctataatatccccagytttctagggtggggtgtgtgtgttgtgaaggagggactggtagagtctgtgcagaggggcttccctccagtctttggctgagtaccaatttgtgcatgtatgaaaagaagctaccagaggctggggaaagaaccaccagaaagaaggaatcagcagtcttagagccagcacaggtgtcaatagtttatgttccaaccagttaagagtagaaaaacctcctaagtcacagggcattgaatagaatcttcagaggggtattgcctcagaaatagggcaaaactgaccctagaataaaggctgctctggacccaccatcacaaagcctaaaaacaaacctcaaaagcctgaaactgatccaaataacctatatcccagagaaaagccaacaatgtttaaaggaatacaacgaattccatcaacaacaaggcccagcataaaatttgcaatatccagcatccaactagaaatgaccagacatacatgaggcgggaaagtacaatttatgatgagggagaaaagaaacactcagaaatgaccaaaataatagaattagcagacaaggatttttaaaaagttactataaatatcttccacatattcaagaagatagaagaaaatggacatcatgaggagagaaatggaagatattttttaaacaagaccgaccttgaacttctagaaatgaaaaatatatctgaaataaaaatatataaggtagtattaatagattagacacttcataagaaaaaattcgtaaacttgaatagcaatagaaacttgaatatgagacacacaaaaaaagccaaagaaagatatcaagagcatcagtgagctgtgggattataccagacaggttaagcatataattggagtcccagaaggaaaggtgggggcataggtggtgttagaaaaagtatttgaagaaataatgatggaagattttccaaatttgaaaactgaactgacaagtttgagaagttatccataccccaagtagaagaaacaccatgctaaaatgtatagtaatcaagttgttgaaaactggtgataaaaatattaagtgcaacgagaaggaaaaaggcacattaagtacagaagaacaaagataggaataactgtcggaaacgatgcaggccagaagacaatgtagctacatctttgaagtactgcagaagaaacaaatttgtcagtagaaattctatacccagcaaatatatctttcaaaaagtaaggctgtacttttccagacaaacaaatgcatcaccaacagacctgtaccagaagaaatattacgtgttcttcaggcggaagaagaatatcaaatggaaatgtcagtctacacaaaggaatgaagagtggaattgctctcattttttcmtacctctagaagacaggtgactaaggcagaactaaaacaacatactgtgggatttataacatacagaagtaaaatataatcacagcacaaagaaggagacaaaatggacaaatatactgttggaagatccttctactctacataaagtggtaaaatgttatatgaaggaagactgtacgttaaagccatagtaaatcatagagtaaccacaaaaaataaaaattaaaagcaagatatatttactaagccaataatggaggcaaaatggagctttaaaaatacaaaagagttggaaagaagaaaaaagataaaaagaacaaatagaacaaataggaagaaagagcaagatggtagatttaaactcaaccacattgatattaaatgtaaattatctacgtcaacattgtccaatagaaatataatgtgagccacatattttaaattgtctaatagttacttttaaaaaagtaaaatgggccgagtgcagtggctcatgcctgtaatcccagcattttgggaggccgaggcgggtggatcacttgggktcaggagtttgagaccagcctggccaacatggtgaaaccccgtctctacaaaaaatacaaaaattagccaggcatggtggtgcatgcctgtaatctcagctacctggaaggctgaggcaggagaatcgcttgaacctgggaggtggaggttacagtgactgagatcacgccactgcactccagcctgggcaatggagcgagactttatctcaaaaaaaaaaaaaaaaaaaaaaagaggaaataaaatgaaacaggtgaaattaattttaacatatttaaggctaggcacagtggctcacgtctataatcccagcactttgcgaggccaaggtgggtgcatcacttgaggtcaggagttcaagaccagcctggccaacatggcaaaactctgtctactaaaaataaaaaaaattagcccgtcatcgtgtgtgcctgtaattgggaggctgaggcaggagattcacttgaatccaggaagcagaggttgcagtgagctgagatcgcgccactgtactccagcctggatgacagagcaagactgtttcaattaaaaaatatatacatatataaaatatataaaataatatataggtaatatatgttatatataaataatatatttttacataaaaatatatataatacaggtcgggcgcagtggctcacacctgtaatcccagcactttgggaggcagaggcaggtggatcacctgaggtcaggaacttgagaccggcctgaccaacatgctgaaaccctgtctctactaaaaatacaaaaattagccaggtgtggtggcaggcgcctgtaatcccagctacccaggaggctgaggcacgagaatcgcttgaacttgggaggtggaggttgcagtgagccaagatcacaccactgcactccaacctgggtgacagagtgagactttgtctcaaaaaaatatatatataatgtattttttatatataataaataatatatatgtaatgtgtaatatattaaataatatatttatatatgtaatatataatatattaaataatatatttatatatgtaatatataatatattaaataatatatttatatatgtaatatataatatattaaataatatatttatatatgtaatatataatatattaaataatatatttatatatgtaatatgtaatatattaaataatatatttatatatgtaatatgtaatatattaaataatatattatatatgtaatatgtaatatattaaataatatattatatatgtaatatgtaatatattaaataatatattatatatgtaatatgtaatatattaaaaatatatatgtaatatgtaatatgttaaatatatttatatatgtaatatgtaatatattacataatatatttatatatgtaatatgtaatatattaaataatatatttatatatgtaatatgtaatatattaaataatatatttatatatgtaatatgtaatatattaaataatatatttatatatgtaatatattaaataatatatttatatatgtaatatattaaataatatatttatatatgtaatatattaaataatatatttatatatgtaatatgtaatatattaaataatatatttatatatgtaatatgtaatatattaaataattatatatgtaatatgtactatattaaataattatatatgtaatatgtactatattaaatatatatgtaatatattaaataatatattatatrtaatatattaaataatatttatatatgtgatatgtaatatattaaataatattttatatatgtaatatataatacattaagtaatatataaaatatatattatatgtaaaatatatactacattttaaatatatattaaataatatatactatatattaaataatatatataaaataatatatactatatattaaataatatatataaaataatatatactatattttaaatatatattaaataatatatactgtatggtaaatatataatatatactgtatattaagtatacagtatatatttatactatattaagtatattaagttatatattaaaatatatattaaataatatatatcatgtattaaattatatattgatatattacatatattattaatatatgttatatatagtaatgtataatatataaatatattaatatttttatatattgcataatatgtaatatattaatatattataccttatacattaatatatataaatatataaaatatatattaatatgatatattttatttatatattaaataatatatattatatattcaataacgttatttaacaaaatatgtcattttagcatgtagtcaaaatactattgagatattttaccttctctttgaaatgtgctgtggattttacacttatagcacatctccggttggattagtcacatttcaagtgctcaatggtcacatttggctagtggctgccttactaaacagtatagggtaaacatccaattaaaaggcagatattggctatccttggggaggccagcaaatttccggataagggaagctggtgggcaggaaaaaggcatgcaatggccctcatgagccagaagaatagctgctgactgatgcctgggggaccaagcccataattgtggagctggagccgcactgtgtcccttgcttcagtctgatctttgggragcctgcacagttctgacctcagttaagagctaagggaagagatttgggaatgtttggccctgtgtaacagcaaaaggattcattggtgagggtgtctggcaggtatccgtaaagataataagatgaagggaacatcgccgtttggaaagtgtcgtgatatgatacacaagttgtgctgcctctgtggctctaaggcataccaccttcagaagtcaacctgtggcaaatgtggctcccctgccaagcgcaagagaaagtgtaactggactgccacggctaaaagaaaataccacggcgactggttgaatgaagcacctaaacattgtatactgcagatttaggcatggattctttgcaggaacaacacctacacccaagagggcagcagttgtgtcatccagttcatcttaagaatttcaatgattagtcacacaataaatattccggtttttaaaaatgtatatattttaaacatatatatgtttatatgtatatgttatatctgtattacatatatgtgaaaagaggcagagattgtcagattggattaaaaagctgtctgtaagaaactatttattatttatttttgagacggagttttggtcttgttgcccaggctggagtacaatggcatgatcttggctcactgcaacctcagcctcccaggttcaagcgattctcctgccccagccccccgagtagctgggattacaagcacctgccaccacacccagctaatttgtctatttttagtagagatggggtttcaccatgttggccagcctggtcttgaactcctgacctcaggtgacccacctgccttggcctcccaaagtgctgggattacagatgtgagccactgcgcctggccaaggaaccattttaaatgtaaagacataggtttacaaaagttaagggacagaaaaaatataccctgcaaacatgactcaaaaaagtgacttattaacattatacaaattagatttcagaacaaggaatattatcagtaatagagacatttcttaatgataaaggggtcagttcatcaagaaggcttagcaacctaaatatgtacacacctaataacagaacttcgaaatacgtgaagcataatctgatagaactgaaaggagaaatagacaaatctattactgttggaggtttcactgcctctgagtaatggatagaataagtagaaaatcagtaaggatatagaagactggaacaggtagatcgatcctatgcacccaaatgtttgtacaccaggaacacttcctctactcagccctctatgccctatcctacgtgaagcaggataactggagcatttcctgtctctctattattttccccccaagaccctattctccctctcattccttgctgtcaatttacgtggatgaattggaaaaatagcaagctgacatgtctcttttttgggggatgggttctactctataaacccatattagttattaccagttgtttccaattggaaaagcattggactgttggaatacagtatttctaacttcaccagctagtgaaaggccaatgaggaacaaactcataggaaatatgggggacaggacgatggtgaaagaggaatttagaatctacatagcagactgtaattacactgaaactacagctaaccaggcagactaattacctacttggtaagcttcatctctgaaaagaaagagatatctctcagctattcagcatcacaatagcctggtgtgtagagagcatattcttacttgattggtggcataaaataagaagcaaaactttatggggaagtactaaagtcacccgatttttattgcagagtcagaatctggaaccagagcacttgcattttgatgaacattcttttttttttttttttttttcctgagacagggtctcactctgtaatccaggctagagtgcagtggtgtgatcatagctcactgcagcctcaaactcccgagctaaagtgatcctcctgcctcagcctcccaaggagctgggaccacaggaatgtgccaccatgcctggcttttttgttggtttttagtttttagagagaaagtctcactatattgcccagcctggtctcgaattcctggcctcaagtgatcctaccaccttagcctcctaaagtgctaggattacaggcaggagcccacacccagctttgtctagcattctaactttcagaatatatatttttgatgggaacggggggaattggtagtggtcatagtttgataatttttccaaggagtagttaaatctgagtgatgctcagtaaagagaggaaacaacctgcaaaacattaagttcaaccagacaaacctagccttaggaataggttttccttagagaataaaagctgattgcataagaaggaaaaaaactaggcaaaatgaaataaattagttaagtgactatgatgaatccaccattgctgtacacttacgtgtagaataaaacgatcagaactaaagttttctaacgtgactctttggcttccacattattatggtttatctctttgaagtgtttctaaatagaactagccctgattaaccagggatttatgcaaggtcacatggagaatagtagttattctccataaatgactccataaacatgttgcttgcctgtctttctctaaaagtttagctttaattctgataatttgttccttgaattggcatgtaagaaaaattctgtgtgcatgtttgcagtgagggaaacctgccttcctggtttctataatattactaggttagctcctgtgagtgaatgacctgaaccatactattcaaatgctgctgttagtctcttggactttgtggttgakaagggtaaatttaatttgaaaatcagaatggggaggtcaaggtgaaaatctagagaggtaaaattggaaaaatggcttttgtccccccaaaagttgtcttgatctctgctcagaagtattgtcatgcccaggccttttagaacattttttctcaagctaattagaagagttcaaactataagcatgagaatggctaaaaatcaagactttactggtagtgaaatgttttatttctaaaaacatgagaaaacaatagtttggctggtttactggggaagaaggaagatacaaatagcattggtcgtttatgtcattgtggtaatgtacaggaaaaagattgaatccttagtttgaaaacattgtaggcttttctctgaaagaaaagcttttttcagcttcagcctggcagctcttcaaataaaatctcaaaggaacaaggcactataaacaacccacccatccctaaacatgactgcatagacaagtagatgcttatggccaaggctgcaaaggcagcaggaagggtagctccttaagcaccaagagccacagtgagcaaatagaggcaagtgtgggtcccagaaaaggtgacaggtggactaatgttgacagttagtcctcagattgtggtatattggtgagacaaatagcaagcacaggactcatctacttttagctcatttcaaagggaatttaggatctgctggtgctaagagagtcttgtttgaggaaagggctgttgccaacttggcgtcggggacagttgtcttcacaaaagtcaagcaaatgctgtgaccatcactgctcctctttcatcttgaacactgtgatcccttctctcatttctttttccttcatcttcagccctcctctgtgagatgacatgtaggacttttttgttctctcttagctcatttttttggtttaattgtgtcttggctgaactatggcaattttcctcatttggatggtgtaatagctaaaaaaattgaggagaaagacttgaatccagattctgccttggatgtcagatttacattctcagctaatgtggggagcattgaggtcaccaaactcccttctactgggatctaggggaaatgaaaaagaacccagatcattccttagagctaattaactagttgactttggaggccattttcctctcagttgagaaactttggttgggtgcagcaatggaagaggaattctcaaagggaacagataccatggtgtctgatgactggggttctctgttcttgttcagctgtgttggtctttagctttctagtgaaccctctgaaggtgaaaaaacaagcaaaactcaggctgtgtaagtccagctaagcttccttggtttctggaactctttcctcttgaaaaatagaatagtgatgtatagcatgacactcatttatgtcattcttttttttttttttcacttcaracttacrattccagaggtaatctctgataggcacctaggggagatgtatttccatggctgtcatgtgcttcaccgtccttatctctctgcctgattcctttcacctcctgcttcagtccttatttcttgttggaatatataagctgtctgcccctatggaaggtttcgcttacagtaactggcagatcatctgcttatgtcttggattgaagggtttaccctataacatggccaacattataagatgggtagaaggccagaggaatcagtgaattccttcttgccaatttttcctcattagagaacatagtttacagcctagaaatctgtacttgctgggaagatcctactgcatttatggctgccttcggaaacctagaggcagtctttagcaccattatcctgaggggcagagttagactgaaaacttatagttaagaaatacctgattctaattgtgtcttgattaattattatctgtaacaactgatctccagttatctattgggcatcacactaggcagagaataagccacaacctgagtcctttgggctgactgggcctgttgctcagtcatcagctgcagagaaaacagtgtctttcttcagtcctagccttcccctacctcagagctctgcctcatggcgagtgtggttttcccgcagctgcctaggcatcctcatctataggccctttctctggtctagaccgtgctccggtgtgttcctggcagtgttcccctgctgcctacccagtatgtcgttgcttactgttgggcagtagctcactgttctggcatcctggtgtgtaaatatttgtcaaagaacaggggcattttcccattccccaaaaagcattctgaaaaatgtgcctgttttcttagtcatatttccaagccgtggatcagttagcccattcattccttgcagttgacagacactggcctgacctcagctggccacataaagtaagtatgcagtaacttccggcacgataactttcaagttttagtaccaaagagtcctggacctaatggaaccatacacaacatagtcactattagagaagatgtcgtttcattaacaaagaatcacacatctccccactcagccattgtaatttctttccacacttaatattgaaggcataaatggaatcaacaaagatgagaaagctaaccatatagattctggggtagaacgttattcttcatgtttgtgacttgactttaggtctcatataaggtaggtttttatacttccatgtgtgcctttatataaaggtgacattgctgagctactatcagtttacaggtgtttttccagtataattaatggcttctcctgtcacttagttctacttgagaccaaaagagtttgcctctgcaggatgggttattaagttgaaaaggcagtctttaaccatggagcagagttttccatctttgtgtaaaaccatgtggctgtcatataaaatttgagttcttgattttaacttgactaacactaggcgctaactgagctcagtatctacttaaattgctcacacagttccagtagataaaggtaactgctaatgtgcattattaaactgcttgcatgccttcctctccttttctgtaagcctcaccttaacacccctgtcttcctgcagtcttttgacctaaccttcagtcttctacaagcctggccagcgtctgcccatttgtactcccaaccccataatatatatgtcagctttttctcttttcaccatttatagcacttcagccttcccccttctagtcagaatttgatttagagaaatgaatctgttggatgttgaagacttaattcagtttattaggaaacaattacatatgctattcaacacagcaactgcaactattttgaaaggctaggcctgagtgtctattctaataggtgtaatttcttcccacagatcatcaatttctacatgaatatgctgatggagcgaagtaaagaraagggcttgccaagtgtgcatgcatttaatacctttttcttcactaaattaaaaacggctggttatcaggcagtgaaacgttggacaaagaaagtagatgtattttctgttgacattcttttggtgcccattcacctgggagtacactggtgtctagctgtgagtacccctttcatttttgataaaatgtaaaagctatgtacttatagaacacacagagggtagtgagtagtagttctacatgttcccttgattattgagagaaagagtgtttagtagtaggttgactaaaatcagatagatctatgaacttcctatcaagattgggatgtagattttgaagaaagctgtggaatttccctttctagaaatatttaaaagagagttatagggtgtctaagcagccttaaaggaaggcatgggggaaaaaaagtgacttattaatgatgctgccactcagattctgtgactgttattttcagcctaatcataacttaccttgcatacttggtaatttaatatttttatgactctgtgagcattagcttaatgtgttaataaaactatttcacagtctgttttggattacatttcaaaagcataaagccaaaaggaacttctcaatataaagaaataaaacccagaatctgctcaccatctttctgaaactttgtggaagtgattttgagatactcaccttatattccctgaaaatcatgtagtttcttcactgttgcccactttgcagagggagagaatgaacattagaaaaaggcttcacagcaataatggggccacctgttgatgagtgccatcatagttttatgtaaataacccttcattttttttctctacagattaagcataatataatgcaaaatatcagtcaaacttgtcatgattttgtaggaagtctggcaaaaggttccaaagggcagggaagggaaaaactgataaaccgattttcttcatctcataaacacagagactttttttcttattctcaggttgtggactttagaaagaagaatattacctattaygactccatgggtgggataaacaatgaagcctgcagaatactcttgtaagtagggagttgaggacagaagagtttgatatygggtataggtggtgtttttccagtaattgaactcagttgtttgataccttcaatgsagtgattgataaaatcttcatattaagtaaaaatgcatattttgtatctaagtaagtttagtttaaaaacaataccaaagtatgccctaatgggagcaattactatcctaatgcactaaaatgtagactagatataaagatatagatgctacttagaaatcatttaatccaacctcctaatttttcagatgaagagaccaaggcccacagaggtgcctttgatttgcccaggtcctattagttagtggctcaggtggaccagaatgcaaatctctttatgctccacctgtttcattttccaaaatacctattcctcactgtaccactctgatggccaggaggaagtacattccacaatggtgaacagtttgcacttaaaagagagctctattgaaggtatgcactcaatacattgttgatttggatttaatttttagataggagagccaagcctaacagtagtaaataaatacctcaatagtaccagaaaaacacttttcttccattagattgagttctaaaggaccatataaaccaaggaaaagaataaaaagaattgttcctcagaaggaatggtaggtagaaggagcttaactgttagaggcagaggtcatgttccttttgagttgacagagtggacattagaagagacaagctagaagaggcatgctcagctctggagaaaacttaacaatccagggattccctgcccagtattatatactcttttcctcagaagagcagatgaaacaaatttgttcctaggtattgtcagccccattcttagtgtggcagctgtcatcgatgttccccactgcttatctcattctctcctgatacctttaggcaatacctaaagcaagaaagcattgacaagaaaaggaaagagtttgacaccaatggctggcagcttttcagcaagaaaagccaggtacctttcatcttgatgaaataaaagtcctaaaagtagggtatttggggaggaaagaattttactgcttaattcccagggaccacctgtgttcgtgtctagcctgacttcagcttggttggttggtttctgggggaggataaattaagctatccgtaggaaaagtgatagtgtgtttcttatgtagaactaggttttctaaatgcccagatattttactaagcttttcactcctaaggggaatgtttgctgattatttggcctctgggggagggagcagtttttatacccttaggtgccatgggagtcggagatattctcctgtttgattaatacagagtacacagacctgactggaatgttgtattttgtttctttgagcctctgttgtcctgactggggggccagagtcatctgtttgtaatttagagaaacctgtacaatttatatcttttggttcttatttttaatctaagaaggaaagaagcttggaaagatgtcattttttttgttgttggtcttccaggagattcctcagcagatgaatggaagtgaytgtgggatgtttgcctgcaaatatgctgactgtattaccaaagacagaccaatcaacttcacacaggtgagctgagccttccrtagggagctctaggattactttgtctccaagctgccctgtagatgtttttctctccagttgttctctttaggggcctctaccctaacctttagcatgcttcagcccatgattcataacactgatggttactacctgaatcacatcacaaaagaaagaaaattagtgataagccacgtcctgggttaccacacctcagttattgtagtaaaggtttcaagagcagaaccttctctgcctgtctcctctacctactgtaacttctagagagaactgggaccagagcaggtttctttagttcccttgcatttcgttagtagtcaggtttgggaataggccatacctcaatctcctagtgtaatttgttatgctgccccctcccctgacccctcacttgatgaatctggtcagtcttctcttagagagtgattggtcatttctgtccatgtggtctctcagaccaaagtggattgagattagagattatggtttattctgatgtgttctccacttttacttctgtttgaatcagtgactttaccagatttttctaccatagccctttgtctagaccagcctgagctgactcttcaagttcccttaattcttctaaaaggtgaattttttatttttaggcctaggctcatatcctcttaaaagttcaacatagaagacttattagacaccattctcaaaattcttagagacgtgggcatagcctggggattcctggaaatacccagtgtaacttctaaggctataatggtgaaaaataacaatagaaaaagcaatgaaaagaaaaaaactacatgtaaccaagaatgaataatttaaaagaccagaaatacaactgagactgtttgttgaaaaccttgcaaaagaaagaagtatggggaaaggcrtatcaggtctagacaaaagcattgaaaattaagggtgtctctgtgtccctacagcaacacatgccatacttccggaagcggatggtctgggagatcctccaccgaaaactcttgtgaagactgtctcacttagcagaccttgaccatgtgggggaccagctctttgttgtctacagccagagaccttggaaacagctgctcccagccctctgctgttgtaacacccttgatcctggaccaggccctggcgagatgcattcacaagcacatctgcctttccttttgtatctcagatactatttttgcaaagaaactttggtgctgtgaaaggggtgagggacatccctaagctgaagagagagactgcttttcacttcttcagttctgccatcttgttttcaaagggctccagcctcactcagtccctaattatgggactgagaaaagcttggaaagaatcttggtttcatataaattcttgttgttaggccttactaagaagtaggaaagggcatgggcaaaaggtagggataaaaaccaccagcatatacatggacatacacacacacccacacacacaaacacacacacacacacaattttcacgatgtatggtcaggaatgtgactgtaaactggactttggggcccaggcataagtcccttcctccaggacctttcctatttatatgtccctatacaaaatccatctgcttttatacgtagctgttttatcatctgtagcttcatcctatccggaggcacagcacatgagccctggacaggtcccaaagttccaagcagtcctttccgtgaaagcaggggtttgcatgtgctaccaacacatgatacggggaagacccacccagggagcggtttcagtggcgcaacaaagcaccacttttactgttgcctacttctgaccaagaagaaaaaggaccttagtatttagcataaaattccagcgctggatgaatgcagatctagtttggtctgtggctagtttaaatatgtttctaaccacagagaatttcatatatatatmcatatatatatacacatacatatatatatatatatatgtatgtataaaatttcacagggatatgcttttttttttaaagactgaatgtgttcaccatttagcctgtagatttatttccattttccaaattccagcacacagagatcccagcccctatgagtagggtgtttgtggactacctaatggaatatttttgaggcctggatgaactttgccatatgggtagaggttacagagggaggtgatattttcagctaaaaaaaaaaacgggtggagtttggactgatcaacttgagatttaaaaactgctattccttttgttctttctagcatctctccccaccctctgagagctcctcaggcttagatagtgaagtgatcaaatgccagtgtcattttgtacttaagttccaaagtaggaacattttatacttttttctgtattgtaataggtagttttgtatgaaatcttttctcctctcccgttgtaccgcattctttccagcattgtgctttttccctgggcttatttgaaaattttactgttttatacaagctcgtttagtacatttttctatgttttaccacaagttacaatttgaaaagaaaactattttttttaaatattccattgttaactgaatgttactgtttccactccagcaactacatgtcctcccttcaactgcctgccttttggggaaagaccaccttttgtgtgtttgttttttctctctctttctttccctttctctttctatctctctttatttttctttctttttctttgtttttgagttttctataggaaataaatagctttctatatatgagttgctggggaccttcacattctcttttagaaagctgtggcatgcagtctcattgcaggactcctggaatattgtctggttcttggtatttactgtatgtaagcaacaacttgaaaggtggcaatatggtgtcgatttggactatgaatcaaaagacctttttcaggttctttcactattgtctgggggactcagaacaagattgttctctgtatttattgtttgtccatttaggtaacatctgtcttaccttcctcacagactttgtacagaccaaagcaacaaatatttattgccatgtatagcagaaaatgaaacatgcaacaaaagcactttgaaaaatatataaggaattgttgagcctgtctgaatttgggccccctttctgactaatgcagttttgcacaaggtagaagttagtgaccctgagaccatcttaccaccctggacctggtccaaatacagacttacacagtggaccattctttcctgagctagccaacaagagcaggagtagtatctggaaactttcccctttgtttaggggtaggctttgatgaccaggaaaaaaaaaaaggtatttctgcattttatggcccaaaggcatgttattaatatcttatgtaatttactttaaactaaataagacttttttctcctgtgttcccctttctcctgtgtccactgctcatattcayctgccttccctaaaaaaggaatatttgagggatgataagcactagatgccagctatagagacctcaacagaaaccataatcccaagaatcactccgagaccctgaacagagaatatcagacagacctttcttacccatttgagaaacacatggtctgaggcacagaggctagttacatcccatttgtcacctgggacccaccattgctcccaggagtcctatttagggttgaatataagagtacttttccctcatccagtctggggaatttgtgtcaattgactcctctgtatgagatgcttcatacttctatgtggaattaatttctgtattctttagccactgtaatcatgctagcatcttctatccactgcccccagcaatgttagcaccaagatcctgaggtagaaacagagataacctggaaaagcacttccaccaaccccatctcatagcctgtccattactgcctggttttacatggcccttaagtggctctagtgggtaaagggggaagagttcacttgagagccccaatgtttttaatgtttcagtttctggtcctgtgccatccctccagcttttaaatatgtcttgctggagtaagagagaggactgacacctggggtttctttttgtttggtccacctggatggactagcatgaggtggaatatgatgctttcaccctgggagttcacatacccaagagagtcagaaaaagaggtgttaggctattaggccctattgttaaacaggccacgtgctgaactactgggaagggtaccttattttcccgcccaggagcaatgcatctacagcttggaattccatgggaagggacaaggctcatcccagcatcctttattataagtctagggccttgttttacctgtactgactcctaacatctgtctactaagaacacacactaccattcccagctttgaaggtggaaaaggaaacgtgggacagagggttatgctggtcacctgttaaaataaaggataccttacacatacttcctttgtgggagagaaaagagtggctaggaggctttgagctgggacctcgaggaaatgttattgtgagctgtctctttggcctgtcagggagatggtagggataattccaattatgtgaatggttggaccacgtgtccaggggtcttatcaaactctaagattctggaatggtattaagtgccacaatgttgctgggaagaggaagtcaaggcagagattcaaagttaaatttttaaggccactggcttagcactggcttggttttagagttaaggcgacaagaccttagctgcagaattttctccattccaatctaaggagtagccatcaattccttacttctggagattgccttatcctttgcagaacacaagtgctaggaaaggaaaaagtgtgggagagtggcacacaagaagtccagagtccagtccactggagacccctcattcaatttacttttattcttttcacaaatacctactgagtaatcgtacgcaaatcctatctctttgatgccttccctgatcacatgatcttaatatctctcatctggacatctgcagcccttataatcagaaaataatataagtccacatggtatttgtattgtaattcaccttttgcatcatgaatggactgagacatgtagccaccaagggcaggtaaatgatttggtgcttttttttcaaaccaggaataaaagctgtttctttctggcctgccagtgatgaggtagaggtaattattcaacatttatttagaaagacaacattgtgggccaggcatagtggctcacacctgtaatcccagcacattgggaggctgaggtgggaggatcccttgagcccaagagttcgagatcagcctgggcaacacaaaaatttaaaaaaaatatattgtgaagaaaggaggactgctcatggcagcctgcaacctcctttgtggtcccaaatcgttcatctctggcctcaaacctaacgctccactctacccttaacaaaaacaccttcctcagcatttagcatgctctttggggtgggtgggggttctcagtctctaccaggggccttgtggaagtattttctctacacagctttctgttaaatagtttcctccatcctttttatttccggtgatattgtgcatccctcatagactgagactctgaggaagcccctcaggctaggtgttttacaagcacgtgtttaagcactggccttagtcgccctgaagggtggagtgaaaagatggtttgactatggaaataaaagccaccttgttctcaggtttttatagcctgctgaccttgtcctcaggatcttagagtctgtattagagtctgtagaccttatagttaactaatttaggaagctaagcaaacaccaagcaatataccttatcaagaaggcagactcataggcatgtagttccatacagaactagaagtagaggatgaaggggcaaaggtggaggtaagtcagggataatgttgcctttatctgcctatctatatgattcttcctaatttttaaaaagttgacttatttaaaataaactgtggatcttgctttcttgctttgactggaaactccctggtaaaaaggacttgatggtgtttgtctctctgtccccctgtctctgtggctgtttgctctgtctctgtctgtgcctgtgtctcccgatccaagctggaccagtgattggatcctcggtgtggtctggatttctgagtccaccccttacccaggagtctgaatactgttcattcatttatttcatcccatatacctggaagtgaagcctggaacgcaaataacatgcaaatttgtggctctttggcactttaaaaaaccaaacctgtctgtggaggctgccaaagaactttcctgaggccaaacacaccagtcaggacttccaacccaccctgctaactgtggccttctgttcttgctcctctcctgcacccctttcttctcacaatataacttcgaagtgaagtgcttgccacttttctacctgtaaaactcacactcatgacagtaaaacataagaaagcaccaacttctcaaaaatctattattttgggggaacagttttctctatgttgggttagaagatcctcttcttgtccccaggatgttctcaaattctaaggttttcttttagtcatggttaagactttgaagccaattgaatatggagtgactagggaaatcttcaagccacgttcgctctcctgattcctgaatgtggttaaaaatagctgacgaatgcctgggtctgcaccaggtatcaccagtcaggcaatagactgtccctgcgaatggggacctggacctaaccatgggtcagagtcagcctttatcccaaaccactccctgggtatctggtctagtcttgggctctgcagaaagttacaaagggaagggggtggggtgcctgttccttgaaccccaggaaaaatattttacttccttaccttcctgtgcctcatttttccattgtcccatcaccagccaatcatctctgcctgtaagagtcaacccatcacttttccagtagcatcccccaccactctcccctgcccactctgcctcagccacaatggcctctttggtgtttgtctaagaagccaagcttgcttttacttcagggccattctactcaatgcttcctctgggctctggtggaatgttaccctataccccaattctcacaccccatagctttcttaccctcagtttttccccacagtacttaacagcatctaactatattacaagttgactcccccttatctgaaatgcttgggaccagaagtgtctcagattttggaatatttgcattatacttaccagttgagcattccaaatctgaaacccaaaatgctccaatgagcgtttcctttgagtgtcatgtcagcatacaaaaaaattcaattttggagcatttcagatttgggatgcccaacctgtattaaatgatttgttttatccatcactaaaatatctgtattccaggtgctagaattatgtattccaggtgcctagaatagttgaaggagagaatagttgaagggacgaatgaattcctgttatttagcatctttgacctgtgcttccatcatgaagcctccaccctattccaggttctcacatctttgtgtctagtttatacttcctacctcagagtctctggcttcaagttcattgtccatttggcagttagagttgttgtcttcaaatagtgttaatgataatataaacatttatcgagaccttggcctgagacttacatgtcaaatactttatatgtattacttcatttaatcttcacaaatctatgatgtaggtacattattatccccatttctcagatgagaaaatgaggaggatagggattaaataatttgcccagagtctctcagattttcagtgacagaaacagggagcatatgactccaagacccctaaaagtgctagaatctgctgcttccacgtggccacacgacttcatctcaacaggaaaaacgcctgacctagactccaaggggactcgaccaaagtgaaaccaaataagagaacctttgacaaagttctcaaagtcatcttctgcttttctctcgtgagcaacattgaggtccttatttgtcttttcatcatagtttggaagtcaaggggaatgaggaggtccctctgtcattggttcactttctcttggcttctccagacagggataacaaggaattctcctcacctctcccatgacaaccctttcctgtctgtcctttttctttttggctcctcctttcatcctctgctcttggctgtgcacattagcaaacctcttttccctcaaggtctctagtctgaatccagaaaggggaaggctagggattgaaggtggtgaggtagggagacatcaagtggattcagcctgtccccaccgacggcctcaggaatccagtgtgccaggcggtggccctctctggggatgacctggggacctatacttgtaggaatttggaaacatttctagtgctccattttatctttttgcctcggtctgtgtctcccgctctgtctcttcagcatggagtttcctcggccattcctactggtttgagaatgtcaggaatgcagagccttgtgccctccctctcctccacctcccacccccatacactgagcccctctgccctgtagaggcggaagttagttcagctacagactgagggggaggggtgccgccctgttactggagaaggaagacagcacacattctggctcaacccctcctcctgccctctctcctatttcatccccaaaatcagtctgccactttcatcttcctcttcaacagacagcctttcccaccctcacccctcactggaggcctctcttgatggtaattactcctaattgttttcccttggctcacgaagcctttccttgcctgccctgagccaacagctctcctgtgtctgctcagaaaatgggctcaactctcatggaaagagaggctagcctctttgggcttcaaaaccctggctttctagatctaagtcagaggggaggcacccacttgggctctctcaaggcaaattgcaacagagaatagtgaccaaaccctagcagcaaggtctcctgaggagctctgagcatttctctgaagatctcagcaccagagaaggtcctttgggtctggctaggaaagggaactacaggactcttgaatggagtctccaagccccacagctctggccctggtaw

SEQ ID NO: 6855 - DNA, 52772 bp, Homo sapiens
  misc_feature (1)...(52772): n = A,T,C or G, or insertion/deletion polymorphism (see Tables 1-2)
ccagcctgggtgacagagtgagaccctgtctcagaaaacaacaacaacaacaacaaagaaaaacacaaacaaaaaacaaaaatgctcccaaaagaaactttttaaatattttaactatagaaaaaattttaaatataaaaaaattgggggaaaaaattcaccattcagtaacacacactgttaacactggttcatttcctgttttaacacaaagaagtgctttaagaagtaatccacctgccaggtgtggtggctcacacctgtratcccagcactctgggaggctgaggtgggcggatcacttacttgaggccaggagtttgagaccagcctggctaacatggcaaaaccccatctctactaaaaatacaccaggcatagtggcacatgcctgtaatcctagctacttggaggctgaagcatgagaatcgcttgaacccaaggcagaggatggagtgagccaagataacaccactgcactccagcctaggcaagagagtgagaccctgtctctaataataataataatctgcctgaacatttttttaaaagcataattttattcatattgctcttaacaggtatcagctcaataactataatattatggcagaattttacttcagaaccatttttgatacctttgttactatagaagagctagaatagaagcaataaacgtaacagaattcaacgacttacactgctatcagcaatgagagaaaatggaaacaaatgaacagggaaggagaaggcagactaaggaaaaggaaaacacagaatagagagaaagctaatgtgaatgtaaaaggaacatatgggatgttataagacctaagtgtatagatttttcaacttattcctaaattagctactagtcctgaccttatattgatccccttaacagacataaagtactacaaatgaaatagtgaaaaatgtcctaaccacaattctcagtaacactagctaaatgaaatagaatatttacattaatcaaattatttatcatttagaagtagtataacatagtactaaggaacaagaactcttggctgggcgcagtggctcacccctgtaatctcagcactgtgggaggccaaggcaggcggatcacgtgaggtcaggagttcaagaccagcctggccaacatggcgaaaccccatctctaccgaaaatacaaaaattagccggacttggcggcgcacgcatgtttgtaatcccagctacctgggaggctgagacagggggattgcttgaacccaggaggcagaggttgcagtgagctgagatcataccactacactccagcctgggtgacagagcgagactccgtctcaaaagaaaaaagagaaaaaaaaaaaaagaacgagaactctagaaaactctagaaccagagtgcctaggtttaaatcctggctcagccagttatagtacatgactctaggcgagcttcttaacttctgtgtctcagtttccttgtgatataatagggataacaacagtaacctacttggtaggtactattaggtacccttgtaagatggttataaggattaaatgaaccaatatattttaaatacttagaacagggtctagtacacagtaaatgtttgctagggtatacttaactttttcaatacaatcaatgagataatactcctaaatgagcatataaacaatgttctaaccaaaagataattatgtgggctgggtgcggtggctcatgcctgtaatcccagcactttgagaggctgaggtgggccgatcacctgaggtcaggggtttgagaccagcctggccaacatggcgaaaccccgtctctactaaaaatacgaaaatcagccggacgtggtggcacatgcctgtaatcccagctacttgggaggctgaggcaggagaattgcttgaacccaggagacagaggttgcagtgagctgagattgtgctactgcactccagcctgggtgacagagcaagactacgtttcaaaaatagcaataataataattttgtttggtatatagtattacataattaggattaaaatttctcttaaaattattattaagcacaaagatacaaatactgaaaatgttaggaaaacccattctttcactacagcttaaccaatgaaagtagctaaaaggattcaacagctagttagtcttacccatttcaagtcttttcacatcactgactttagcaaagatacaaagtcctataaaagaagacacaaaacagaaaaattacatactgaaacacctacttcacttaattttagaaggtgcagccactagaagtgacatttgtttgtgttcttagtggagaaaaatctaaggtggtaaagagttgacttgatgggaaaagagtaaaaactaaaactagcttgaggtacttccaaacatttctgcaacctgtactacattaaacagcaattacagactacgcacagaatcacagaatattaaagcaagaagcaaattgggagcgccaacccttaagagactgagtggtttgcataaagtcataatgttagcaactacaccgaaattataacctagaaattcttcccaatccattgttctattacctcatgctaaatcacttcataaacaagtgacagactttgtgatggtcctattaagacttttcttccatgtcttactcagtagcctgatactctaatgacaatcaagaactactctggagtaatacaaagtacttcccccaacatcatcaatcaaactgctacaaaccaaagcccctttgcctatataaaaattactgtctcctctgatgtatccactttttccacaaaataaagatgttaaaaaccaaactgctggccgggtgcagtggctcacgcctgtaatcccaacactttgggaggccgaggagggcagatcacttggccaaggaggtcaagacttggaggccagcctggccaacatggtgaaaacccatctctactaaaaatacaacaattagccaggtgtggtgatacgtgcctgtaatcccagctattcaggaggctgagacagaagaattgcttgaacccaggaagcagaggttgcagtaagccgagatcatgccactgcactccagctgggcgacagagcaagactctgtctcaaaaaaaaaaaaaaaaaaaaaaaccaaacacaaaaacacaaccaaactgcttggaactaggttaataaacatatcctcggcacatatggtcttggtagatttccaagaggaggaggctactagggatggtaatagtcacacctatatatatttataatcttataaccatatttttaaaaaatattaagcacttcatcaaccacatagcaatactagggcttcaatgtattcatgaggctggatgatgataataggcattctttgtggtcacaataatgaaagtcacacaaaggaaggcagcttaaagttttcttggcgtacgagaccacgccactggccactgcactccagcctgggcgacagggcgagactccgtctcaaaaaaaaaaaaaaaaaaaagttttcttggcatagctatagactaagcagagtaattatctgattacctagtcttgccaggaaggatccctaaagaatttaagccttagatttatgcttcaaatatatttccaaatgctcaacttaaaaggcttctttactaaaaattcttcaggttattctttccccttctttcttctttaatagagtagactcccttgggttccagattaagggggaaaaaatcttatcaactaatatattagcaacacttttttgacattttaaagttgcttcataattgtcattactagcctttttaaaattattattaagaagaatgccaacttaaaagcttggtgcccaacagaataatcccatgtcaatttccttgcattttgttgggatagatgtgaagagaaaaggaagctagaaattcaaagaattttaccgattatatccagagaggttaagtgacttccctgaaatcacacagatggggcaaaaagaagacaagaatccatgtatcctgactccagggcaaatgcacatttcaaacattatacaacttcaaatcctttaacacaacctcaaagattaatacacactggcaatttaaaagtaatccctcactaaccctggggaatccacactgatttataattttaaataattaaaaccccacatttatattttactacaaatacatccagctacttcagtgtgcttatggtacattcttttagccacttgcagttacattgggagaaggaatattttaccccaagattctccatgaaaatgttggatctggaacctctgatgccaccaaattcaagcaactgtaaaaatgttttctttttaaaaaaatgattctaataattcatttcctagtatacactggtcatgtaatttactgaaagaacataagctgttacagacattcagatgaagtcaggttagtagtggaacacaagataatgggaaacctgaaagaacaaaaaagatcacagtcttgacaactgcggtgaaacacttataaccttacatatatgcaaaaaggggattatgaaagacaatgtctagggctgcaaggaagttactagaaaatatatattgaggctgggcacggtggctcacacctgtaatcccagaactttgggaggccgaggtgggcagatcacgaggtcagcagttcaagaccggcctggctaacatggtgaaaccctgtctctacgaaaaatacaaaaattagccaggtatggtggcaggcacccataatcccagctactcgggaggctgaggcaggagaatcgcttgaacccgggaggcggaggttgcagtgagacaagaccaagccattgcactccagcctgggtgacagagcgagactctgtctaaaaaaagaagaaaaaaatatatatagagagagagagagagagagagagagagagagacgcaatgttagctttatccaggaccaagatgtggttagaacaatttatgatataagaagggtgtgaaagcaaccatgtgaaatcacccttttccaagttctgaaaaacaattatgtgtacaatagtttgtactatatcgtcatgtgtttgaggttctttccttctatttttacatgtaatctctcccaatcactctaacaccttaaataccttaacactctaacgccgtaaaccctaagtgttcaaattctttcatacacattcatttactgtgcaccgactacgtgcattaagaaagggtccctgccactgagcagctcactgtccagtagggaaagccakatccataaacasgtaccgcaagacagtagagctggtacaactgatagaagatgtagaagttgggaagaaaaggacaagagttccaaagccgcaatgcaagtcaacaactgcattcccttagccagaagtagcagaacctgtttttgtacccatccactccctctagacaactcattagatgagtgacatgaagaccatctttgcagttgggataattaattgaagtcagttaaaaatgaataagccttcctaaaagggactagagaggaaaaataaagggtggtagagtgtaaactggaagtaggttaagggatcatgcttatagagatgcttaaagttgcgctttaactgtaatttcaaagtcagggtaatctgtatttcaacatgagtccttaacacaaattatttttatgaagaataaagatttaggagatgatgagatctaatacatccagaataaccaattataacaaagaccctcagtcaaatagttggtagtagataaaaggctttatatgaatattacaagaatcaccaccactccaaatataataagtgtaccaaatatgaagtaaaatgactttaacaaggctgacttgaaagtgataaagaagcaagttactgctaacaagatagtggaaatactgcacaggcaccgataaacagaaatcaycaagctcaaggaaagagaaacgaggcatakatccagagatcacgttagggtacaccaagaaagagacggttcaagggaattaccaggaggcgatgwgccaggtaagcaaattgtggcagttaaggggattttcataacctgagcaggagggtccagacgtttctttctgatggtggcactagcgatatcacatctcagggagataccacagagtaggagagttggagaaatgtttacgtgagacgcagaagtagtcaagaaatatcactcgggtctcaaggaaggcgggagatgaagccrgtaccacagaaagccgagcttcccggtgaaaacagctctccccagagaasacccagctctggcgggaaagccccggaatcgcaaccggcctttccccaagtacggctgggcgctgggatggggcctgctgtaacggcagggagacggtctctccgcggcccaggagagagagaccagaaggaacggcctcaggtagcctaacggccaccggcggccacagcgcggccaccggacagcaggggggaggggaggtggtcccagggggcggggcagaggaaaaggcgccggccccacagtgctccccgcttccgcccagtccagcccgggccggctgaccgggtccgacacagtctcctggaccaggctccctccatcctcacccctcccccagcttcccgccgccactcaccgaaccggaaccggctgccatgcgaaggggtttccggccgggcgcggaacgcaaaacccgggaaccgccgcgaaccggaaccgccttyacagcaccggaagagtcgctaggtggctgaagwggagggggctggggcaggaggtcaaagaacagagttaaggaccagtggggcgcctgcgcggtgtggcgaggcccgagaagcgaagggagcatttaagactagtcgtaatttctcagtacccttttcagtctgggctttttcgctttctcgtactcggaatactgttagtgagcccttcgtcctatgcttttctctgttccctctgctcccttacccgccgccttctggttccgcccggcgagttttgcttgcttgcgttccagtttccatggcagcttttcgcggtggccctaaatctgcggaaacctgtggcttcccccgacagatagggacctgagatctaaatcgatctcaggctatctcgtgttttattgagaatcacagaacgttagtgcttgtagargttattggagatactttagtcttaccaggttcagagaagtgaagtgatttcccaaaggttttaagtgcacggcccatctaggactaggaaacaagtttcttaacttgcaatcctgtactctgcaccacctcatacttgattgaccattcagcaagcaaacaaacaaacaaacaagcaacttgaggacggattaggctagactctggcaagatgtagaaccttccagaactctggaggaatttgaaacaggcagagctgtgaggaaagcttttgggagcccactagagatctgcttttctgggtagagatagagaaggacccaggaatcacctgtgacctttgaagggctttgttgttcctgggacacattgattaacctggaatctgccatactttctaagagaacataatgggaagaaatatgtttgttcattcaggctttttgtcaagcacctcagcttggcaggcctctggacccaggccctgtagaagtcttagagaaatgcccccttaataggtcctttacacccagatcacagccacaggcacagtctgagctcagacttaaagaagggcagtttctggaggcccccagcctttctgatactctcagcagcttgctgagttcagggtttcctcccctgtcaaatacatcaaagtagattatttgtattgcctcatgtgctgatacttttatattatattgtcaagtcctaaggccaagtagtcatgagtgtagctggtccatgtcagtcactgacatcttatttcacagctctgttcgtttggattaaactctgtctctatttctaggaggcagccatgcwtaaagacgagtttcatctgaaatttttcatgtgtgtgattcagtctcgccagttagtcaggactcctcagagaacaggtacccttgtctcctgatcatactccagtgacagagaatgggttctctcacaagaagtctaaatacaggatgtgaggctttctagtgtaaatacggattttaggggtcaactgaccttgtttatcacattctcactttgataaaatattgatcactgagtcgtgtattttccrggtaagattttgacctggtttgttgtgatagatgccaggcagataaggaggacttgagagttgaggggggaacaaaatttatcccatgagcttgtcattattgtgttgttatgtgaattacttcgaccagtctgggctcatctgtgggaatctttattgtcattataactgacactccaaaactatcagataaatcaagccctaaggaaaaatggccttctcatccaccccacctcaaagtatctagttatatgttctgctttcccccatgtatgtcaagggaatagaatctttttgaggtacatcgcgtctctaatttttcactggatttttggaaagaaagccctggacagctcagagtcatagggaaaatgaaagggagtaaggaacactcccttcccagaatcccaccttgagggtgacctaaagctattgtttctcagctggggaagcttctacttccagcatgctcataccaaagccaccaccaaagacagacatcttgaagagtctagatactatggatgatccagacaccgtgggaagcatacctgttttcaaaactggtgaggcatgtgggtcaacagtgagaaatgttcaaaggaatatgggaaagtgaaagttgtatgcatagtattataaatcagcgtagacctactaaagctgaaatataagacccaagggggaargtctgtgtgtgtgtgaaacagagagagagagaaagagagagagaaagagaaagagggatggggagggaaaggaagaagggagagaggtggggatggatcatctgggaaattgtagggaaacagacacatctctatgcagaataacttaatttggtcaatattaaatcaattggctcataactgtaaactactaatctggtttatcctattgtcagcatccttgatatataaatatgtgaaacttaagaaagttgactaaatgagttattattttacaaaatgattctaaatattgtaaaaaattttcatcttaggaaaccatttaataatagatttctcatgtatttttaaatgttcaattcacaggcaatttatatgaagcttcagaaacayatctatgtatttcgtcttaacttaaatacatctatattggagtcaattcactggaaacctttattgagttcccgctatttgcccaataatatactggaaatgatagattataaaacatatgtataaggcatatccttgccattgccccaatagcttacactttggaaatgccttagcgattatttaccccaactctcttatattttcagaaggaactcaggactaaaaggttttcctcagaaagttgataatttcattaaagtaacaactcctagcacttatgaaatatatatcagtatttagccatatttttgagcactcactatttgaaatcattgggctagactctgtaggaaatgagaaaatgaaatagacactttccctgttccctaggagcttatgattaaggacgggagataatatggaacaatgtgtaagttaagaacttaataattttggttcaaaatgttgaattggttcaaaataagatgccatagaaatgtagggttcaaaataactttggttcaaaataagatgccatagagatgtagggaagagaacagccagctgactgctcagagccagcttttcttttccttccttccttccttcctccctccctcccttccttctttcttccttcctttctttttcttttctttccttttttcttttcttccttttgcaactgtttgtggtctacatccctttaatcagacttcctttgcccctgcatagaaagcagcaagaaataaacccagctgatggttttttcctattgtttattgaatttgtacagattatttcytatttgccctcatctttcctgcttttttcattctccttttgctctggtgtacctaaaactcacctcagactccctttgctctgatgactcatttggacctgcttctgtggtttgaactcagcattgtctcatggacaaaattctgatgttcaacttctgcctttaaatcctggggtctgtgtggctcagttaagtggccactcttaaccctttcagctttcctactagagaaaggaaatctaatattttcccagcaccaataaggcctccattcctcctcttctgcctacctccctgcttccttcctcatcctttcctcttcccttcctccttccctcctactcttcctccttctttgacttccttccaagagaatgtgttgagcacatactatgtcaagtactgtacttggcactgggaataaagtagtaaacaaaacaggtacattgtctgctctcatgaagtttatagtcttgtgggactaagacagtaatcacacaatcacacacatggttatataactagaatggtgttagtgcaatgaaggaaaataactccatgtaatcagaggataaaacagggggtgtaatatggcctgagaagtcagaaaaacctttctcaggaagacctgagggatgagtatgcattagccaggcaaagagagaagagctttccagaaaaggggacaataggctgtgaaacgggaaagagcagaatgggccaatgtgacttgatgatgggaggaatagcgggagagtgaactgtacaggtggtgtaagagccagattgtgcagtgccttctaggtcttatggacacttttgagctctgggaaatcactgaagaatgataggatcatattgcgttttaaaacatctttctggctcctgggtggaggatggattggagaggtacgagggtagttatctgctctaatgagatggatgccactgccttgctccatttctcacctctaggcaatgcatcactatagggcaccagtgaaatggtgaggaactcatgtcgtcaaacaacagagatgagcacagagctactggtgcccaaacataaaaaacccctggcctgatgtctttctgcttctgccagccyaagaaattcacagggactccctccagggtgttctgctccttgttctaagtgcagttgtatatggagattctgtgctctagtccttaagaaaaatggaatatatttctttcttgtctcttacctggcagggaagcagctgctgttttttccaacatcttgcctatcagtataagcagctctgcctgtactataatgaggcaggctgtgtgtgtgtgtggcccatagaggatcagctcctggcataagaaagccacttgatcctacactggggcatagcaagggtgtgagtcatctaggctgtacactttacccctatgtcctgacccctaggcttttcaaagaaaggtggttagcatttcaagataggtaagagtgtgggacaactacttccaggaaaaaagctcaggggtagcaggcacctttgtggtccaggctctgatccagcagatccaactgcccactagacataaagcctctcctgtgtataaagacttcgatgatgggcaacctgcctaggtaactagtgactctcaagactacttctagtgacctgaaaatgtgggaagcattccaaaggagtgctgcttcacccayttgctccttgtgtcacagcttctccctggaagataagagctttctatcatatttttcacttcatctaggccatctatcaccagcattgcccatgccccctgctgcccttctgatcctctgtaccttcctttggaagtaaagcagccttgagaagagtttttattaaagaggcattaatgatggaggacctttgcgtagcgaggaaacctttctgcctatgtaacagyatggtggtgcaggatatggaaggcatatttagagtcagtataaatattgatgcgtagtccctttgcaagagtgagagctcaagttaagacaatgagttcagcttgctgagaggtagtggagcggggaagatcagtagcctcaatgatagatgtggaagatactatagcatagcctgcctttgctggtgagtggcgattaggcctggtggaactgccatcagtaaaccaagtgtgatcagggtgaggaacaggaaagaaggaaacatgggcaaatggagtgaatatcgggtggatcaaagagagacagtcatgggggtcaggtgtggtatccagaataatgtgggaggccggatggaagtctgggccaggaacaatggtaattgtgggatactcaacaaagagtgagtatagctgaaggagccagggagcagaaagtatatgcatcaggtgtaaggaagaaaatagattttagaagttatgagagctgtagagagtgagttgagcatagtttgtgattttgagggcctctaaaagtattagggcagcggcagccgctgcacagaggcatgatggctaggctaaaacagtaaggtcaagtcatttggataaaaaggctacagggcgcggtcctggcttatgtaagaactccgactgcacggccctgcactttggctgtgtgtaatgaaaagggttgggatgagttagggagagctagtgtgggggcagcttctagggctgtctttaaggaacagaaaggagcggcgaaaggatttaggatctgtggggtcagctaggtttgcttttgtgagtttatataatggtttagtcaggatggtaaaactaggtatccaaaggtggaagtacctaaccatgcctaggaaggaaaggagttgttgttttgtagaagggattggggtttaggagatttgccagacacgatcagcagaacacgtgtgttttcatgaagaattatgytgagataggtaatggataaggaagaaatttgggcytgactgaagtaatgggggctgtccgtgaagccttgtggcagtacagcccaggtaatttgctgagcctgatgggtgtcagggtcagtccaagtgaaagtgaagtgaggctgggatgaagggtgcaaaggaatagtaaagaaagcatgtttgagatccactacagaataatgggttatggaggggttgtggagggaggtattgaggttaggagagtatatgcctttggcaccacggggtggataagcaagacaatttggttgataaggcgcagatcctgaactaacctgtaaggcttgtctggtttttggataggtaaaatgggggaattgtaaggagagtttataggttttaaaaggccatgctgtaacaggtgagtgataacaggctttaatccttttaaagtgtgctgcgggatgggatattggcattgagtggggtaaaggtgattaggttttaatgggagggtaaggggtgcatgatcagtcgccaaggagggagtagaggcatcctatacctgtggtttaaggtgaggagatacaaggagaggatatgaaggagactttgaactgggaaaaaaggcagcaatgaggtgtggctgtagcccaggaacagtcagggaagcagataatttagttaaaatgccttgacctaacaagggaactggrcaggtggggataactaaaaaggagtgcttaaaagagtattgtccaagttgtcacgagagttggggagttttaaggggtctagaagcctggctgtcaatacccacaacagttatggagacaagggaagctggcctttgaaaagaaggtaatgtggagtgggtagcctccgtattgattaagaaggggacggacttaccctccactgtaagagttacctaaagcgtctgtgatggtccaggaggcttccgaggcgactgggcagcgtcagtcttcagccgctaagctgagaagatctgggaaggagtcagtcagagagccttgggccagagttccaggggatctgggagtggctgccaggtgagttggacagtccgatttccagtggggtcccgcacagatgggacatggcttaggaggaatcccgggctgcaggcattggttggcccaagtggccagatttccgacacttgaagcaagatcctgggggaggcggtcctggaggaacacctggccgctggggttcaggcattgtgaagttcttgtgtgctggagatgtggctggggtttctctcacagtggaggcaagtaattgcaactcagaaatacgttgcctctactctattattgtacaccttgaaggcaaggttaattgagtccttttgtggggtttgaggaccggaatctaatttttgaagatttttctaatgtcaggagctgactgggtggtaaaatgcttattaggaataaggtggccttctggccyctctgggtctagggtggtaaagcgtctaagggttgctgctaagccggccatgaactgggctgggttctttacctcgggtagtttctttaagtttgtcataattaacagctttgtaagctgcctttttaagcccttcaacttggcaggaaaccatgtagtctygcctagctatatctggggaatcggccggatagttccattggggatcgcctcagggaactgctctaatgccttcctggaggtgtggttcrtgaagccagcagttatcagcatgcgattgggctagagaaaaaactttcccattcatctggggagagggtagaagttaggatgacatttaggtcactccagattaaattgtaggacagagctcgatgtcggaattcctgtatatatttagtggggtctgatgagaaagagcctaaacgctggctgattcgggaaaggtctgatagagaaaaaggcacatgtaccctgactatgccttcagctccagccacctctctaagaggaaatttttgggcaggtgggggagagctagtcctaggacgaaactgtaaaccggaccgggtgtggggaggggaggtaatagaagggttatagggttggggagcaaaggctgaagaagagttggagcctgattcagcctggcggggagcgacctgaggaggagcagtctggggaggaggtgagaggtcagatggttcagtagaaaaggaagattcagaagactcagcaacgcttggggttgggactgaagggacaggccagagggaaagaaggaggatttgggacgagttgcattgggaacacagactagggagggaacaaagtgtgaaaaatgcctggatgtaaggcacctcagaccatttgcccattttttcaacaaaaattatctaggtctcgtaggatggagaaatcaaaagtgccgttttctggccatttagaaccattgtcgagtttgtattggtgcaaagcggtgttgcagaagaaaatgagatgcctagattttaggtcaggtgagagttgaagaggttttaagttcttgagaacacaggctaaggcagaagaaggaggaatggagggtggaaggttgcccatagtaaaggaggcaagtttaaagagaagagtagagtcatggagaagggggatggggagcagctctgggctgcaatgtgggtgagcagccaaagcaggcatccctgcaattgacttgccaccaagggaacacgggtgaatgatcaaggcaggcgtccctgtggagatcagacaccaatggaacatgggtgaataatcagagaggcatccccacgataattaaacaccaagggaaggctgctgacccgggtcttcggcaccaaatgtttcacgtgtccatgtgaagagatcaccaaacaggctttgtgtgagcaacgaggctgtttatttcacctaggtgcaggtgggctgagtccgaaaaaggagtctgcaaagggtggtggattatcattagttcttataggttttaggataggcggtggagttaagagcaatgttttgagggaagggggtggatctcacaaagtacgttctcaaggatggggagaattacaaagaaccttcttaaaggtgggggagattacaaagtacattgatcagttaaggtggggcagaaacaaatcacaatggtggaatgtcgtcagttaaggctattttcacttttgtagatcttcagttgcttcaggccatctggatgtatacgtgcaggtcactggggatatgatggcttagcttgggctcagaggcctgacagcctgaccatcttgggcacatgttctcaggatctcctgagggctgtatcacaggccattggtcactcatatttggctcagaataaatatcttcaaatattttacaaattttgacactttttgtcatatttatatgacacattttatttatccattctttagttgatggactttgggctctttccacattttgccaacattgtgaataatgttgctatgaacattggtatacagattttgtgtgtacatatgttttcatttttcgtaggtatatacctaggagtggaattgctaattaatatgatgactctatgtttaacatttgaggaactgccaaatttccactgcagctgcaccactttacattcctaccagcaatgcagaagggttccaatttgttcacatccgctgtaatacttttctttctttttcctttccccccttccctcccttccttccttccttcctctctctctccctcactccctgcctccttcctttcttcctctccctctctccttccctccttccttcttttctccttccttccttccttccctccccctctccctcctttctctctctccacccctccctacctccttccttccatcttccttcctttctttttttcttttttgataatagccatcctaatggatatgaagtagtattttcacttcaaatgaagtagttttgatttgcattgccctaatggctattgatgttgagcatcttttcttgtactttttagccattatatatcatttttagagaactgtctattcaagcctttgctcatttttaaattttttatgtttgagacaggatctcactctgtcgcccagggtggagtgtggtggcgcaatctcggctcactgcaagctctgcctcccaggctcaagtcattcttgtgcctcaacctcctgagtagctgggactacaggcatgtgccaccacacctggctaattttttgtatttttgtagagacggggtttcaccatgttgcccagtctggtcttaaattccggagctcaaacaatccacctgccttggcctcccaaagtgctgggattacaggtgtgagccattgtgcctggccagttttccctacttattaacatcttgcattagtgtggtacacttgtgataattgataacccaatatttatacattattattagctaagttccatagtttacattagggtttactctttggattgtatagttctatgaatttgacaaatgcataatgtcatgacaaatgtatgtcatgtatctgttatagcatcataccgaatcattttagtgcccctaaaatcccctgtgctccacctattaatctctccttctctatcccaagccccagtaacaactgatatttttattgtctccgtagttttaccttttccagactgtcatacagttggaatcatacagtatgcagccttttcacactggcccgtttcactatgtcttttcctggcttgataattttttattgatggaaaatattccattgtatagctgtatcacagtttgtttattcaccttttgagggacatcttggttgcctccagcttttggcaattatgaataaagcttttataaacattcatgtgcaggttttttgtgcagacataattttcagctcattcagctaaatacttaggagtgctattgctggatcatgtggtaagacaatatttagctttgtaaaaaactgtcaaactgtcttctacagtgactgtaccattgtgcattcccaccagcaattaatgagagttccagtggttccacattctcattagcatttggatttttgaattttaatcatttaatcattctaataggtgtgtagtggtgtctcactgttttaatttgcagttcgctaatgacatatgatgttgacatcttttcatgtttatttgccacctgtatatcttctttggtcaactcttttgcccatttttaaattgaggtattttctttttattgtcactgaaaagagtcaaactgtaaaacatttgaagagatttatcctgagccaaatacgagtgaccaatagctcccccatgacacagccctcaggagatcctgagaacatgtgttcaagatggtcgggccacaagttggttttataaattttagggagatataaggtatcaatgaatatatgtaagatgtacattcatttagtccagaaaggcgggataactggaagcagggaggggggagcggggcttccaggtcataggtagattcaaagattttctgattggaaattggtgaaaagagttaagttattgtccaaagacttaatagaaaagcaatctgtgaggaccaaggttttatcaggtggacaaagcttccaggtagcaggtttcagagaatagattgtaaatgtttcttatcagacttaaagagtctgttctatcagtaattccaaaagggaggagcatataatgaagtgtgtctggcttcccctttccatcaacgtctgaactagtttttcagattaactttggaatacccttgactgagaggaggggtctattcagatggttgaggggcttataattttatttttggtttacattcttaatgagttgcaaatgagttctttatttattctggatgccagccccttatcagatacatgatttgcaaatattttctcccattctgtgggttgtctttccactttcttgatggtataatttggagaacaaatgcttttattttgtgtagtcaaatggggttttatctcctagtcacttgcatttgtattgtttgtgccagaatgtgcagaggtagagatamaagtaagcaagaggaagagggcagtggtaaaagcaagaggagacccgactgtggagacaatgaagcaaagggaaggtgagacttgagtaatggatgcacctcttgctctgggagcatctgaccctttttccagagtggatcctgtttgctgtgaagcccaatttatatgtttgcttcactgccagaatcccgcccccatccctccccactgcaggcttgagaagtggcctcacagacacgcccttccctcttgacactttcattccaaatagctagcttttctgtactttctctgagaaaggtaatgtaaatgtaaaagaagtttttgaggctattctatagaagatgtcataattcaatgttcctcaaaggcagggactatatttatttttttaaacctctcggcacctaatgcaaaatctagcacacagactcccaagaaatgtttgcttaaagacggatagagggccacaggggcaggttttattagcagttgctgaagatgttggaatgcaaggtgtctcaggcagtctggactaggaaaaagttctgtgttgaaaacaagagaagcaacgaaataatttattattcccattaaataaagatgctgatggctctcgagatagatatgaggaccccaggactctggggagtgaaggaactaagccgctgccatatctgagctgagtacttagggggaggaggaagaggaggagaaaggcaagcaggaggagscggagmcttcttgtcagcatctgttagtggaggttgggaagcctctcctccttccccctccctckttgcctccacctggctcctccccatgttcgtccatcacccctcccccctttcccaaggacaatctgcaagaaagcagcggcggaggagagctaagactaaaaggcaagaggggccattgagtgaagagcaagggggagagctgggagtgaggtgggaaggtatgggccgggagcaggcggtagggagarctgaaaggagcagaaaggaaaagaagagatacggcatcctaagctggagccgagagggggatgggcagggcagtcgtgaaggatcctagccccttggccagtcccctccgcttgcaggctcagctgcattccccaggaatctgggatgggtgggtggggctcgggacgggttgcccttggctgcctgaccctaccctggcactcacccaattcaaatcagtgctcctatgatgctgcttttctgttcctccctgccgcgtgcttatatacgcacgtgattttagagatatgttttaatatctgtctgtttttgtctacgtgcgtgtcattgtgggtctgtaagggatgcttatacatgagtctgcatgaatttctgtgtcctgtgcctctataactgtcttagagatttcaggagaagaatatgagcggtttttacaggtcagcactcttaaactcctcttgttatggcgaattttctccctcactgacgcttccaggggtggaagagctctgtgtgggattctgcccccgtcatgagctccaagagtgaatgagaagaaaaaacgggaggaaagggatcagcatacccagatgtcttgttttttcctttccacctttttgccttcctatttgccctagtcacttaatctttctttttggaaaacagcagaaatttggacatgaacattccagttaaataagagcgtctctagtcacgcgtgtctctatgttcctttcactgtttgtcactatatgatttctcaagtccaagttaaaagtgtgttttaaagtagaatatggaggtatatctgtatctaagccgattttacatttttcatatatttgtatttcatgtagttcatcagttcattaacgttttcaacaagtatttattggggtcctgtaatgtgcatagactttgcaagtctttagtgagctgtgggagagtttttaaaaatgatcatgatccctgccctggaggagttctcagtctagttaggaaaaatgactttagcagccatccagtccagtggttggcaaacttcgtctgtaaaagaccagatagtaaatattttaaactgcaggcttatgagtctctgtcacaatatccattctgctgttgtagcacaaaaacatccatgataatacgtgaatgaacgaaggtagtgcacatactgaaatttgaacttaacatttttcacatgtcatgaagtactttttgcaaccactaaaaaatataaaaacctttcacagcttactgccatacaaaaatgtgagaagggctggatttggcctacaggctgttgtatgctgacccctgatctagtccaaccctcttatcagtgcgtacgaaactattaaaatgccacataaagcaggccgagcatggtggtttatgcctgttatcccagcactttgggaggcaaggtgggcggatcacctgaagtcaggagttcaagaccagcttgaccgacatggtgaaaacccgtctcaattaaaaatacaaaaattagccgggtgtggtggtgcatgtctgtaatcccagctactcgggaggctgaggcaggagaatcacttgaacctgggaggcagtgatccagtttagacaacatgtggttagaggaagtccaaaagaaggtttccttgacctgtggtaatcagtgaaggtttaataagggtacaactatcactggtcttaaatgatggaatgggatgtgaatctgtggaaagggccagggtagccacctggacaagggatgcagtgtgcccaggcacaaaagtgggaagagcaaagtaatgttcaggtgacaatggagcagagaatctataggaccaacagttgaagctatatgcaagggctaaattgtagaagcttcgaatgccaacccaacaagttgggaccttatttgttagtactgattatatgtagtacgttcattaatctctgtctgttaacacaatgcatgtttgtgaatgtatgtcttcatatatgtctcattgcattattttattatttgtgtggatttgggtgtttatgtgacttatgtctctataggcagctaccctgagttctccaaatgcagggtagaagcaagcacaagctgcccgtaaaacttgggttcctgtgaatgaatacacatctccactgaagcctagggacctatgaccttcctatgaaggtttattttgtgtgtctaatagagtgaagaaaggaacacaagcacagggaaaccagctattgtagtaagcagttcaggtggaaaatggcaatgaggatagaaaggaggggatggataaaggaagataataagaagggagaataataggatttagttactgttttgaatctgagaggaagggaggagataaatttaaaataacaggttttagcctgaaaaactgggagagtgataattctactggcattttatggatacaaaaatacgtcctcttgtgtgttcctttgagagaggtgatccctaaagaataaaatatgaaggtgttcccatgtcgtatgtacacatctgtgtatatacggcagtgactttgtgttaattttctcatttcatagcatgtagtaatgtgaggggcaagacccaaagaccaaggatcaagagatgctcaggaggctgacatcctgagagggaagagccatagaaagcccctgaccattcttgagactgacaccattaatttgcctaactctgatgtgcctttatagcctcagactccagtttcaactccatatcacctaaccccattccaatagcacaattccataacacccaaccctaatcttaattataatccaacctacccttgctcttctacttctactttgctgattgtcatcagtgccctaaacctcatctgattccagccctctgcaataacctatcccttcattgaaaagggagggatcgttgaggctaactcaactttttctcctccctttctcatttctattcagtcaacttctcttttccctgaccttagtttattccccaaataggttccaatyggggtgggagggatcagggaggaattaggaccttagtagtcttgggcttgattacatgacatttcagcttgtcagtctacaagggtgtggctttcctctggaagaagtccaaagctctcaggctgcaaagctcagacttggtatagtgggagagcctgactgaggtgkctctagccagtctaattgccgttcctttagctagtggcatcttgattcctgctgtgtcttaactgaccattgtcttaaattctagagtggatcatgacccatgaagagcaccatgcagccaaaaccctggggattggcaaagccattgctgtcttaacctctggtggagatgcccaaggtaaggaggaggggacaaaaaacatggctggtgggacttttggaatttactgactcccttagcctatacaatagaattattcttctgtaggttcacgggaattttgggctttgctaaaaatttctgtgaggcctaagtcctcaagtgcatttgaattttatttgccatgcgtttatttacccacatcttcataaaacttatttccaagtttctttgaagacagggggctcttttggtctttgggaacctaaaagagtggtgttttctcaagcagcattggaaagaaactaaagagataaagttattgagaaggcagtaagtggattaacttcatgtactttggtaatggtggggatgggaggagacccagaattagtatatggtgggtcccaactaggtcttcaggtattaactctgatgtctggagagttcctgcactgaccaaggtcagtcaggcactcggttttctctggcctttcctcctcttccctttcatcaccccttgaacaaataggaacagcagcagttaatcaatacagatccggtatgaggtggaggggcagaaaacagagccagcaaaaacccttttctaggttgaatttaagaaacctgggagtcacgaaaattaggtatataggaaacacggagtgggagtaagagggtattgatttttttaaaaaaaactttttctcctttgatcttctgatatattctgatacattgaaaagaggtagaatttctttgaaaaggatacatgacatggagacaattagaaagagagaaggaaagcgatttcagctaggctcccctcctctgcaccactgttcctaggcttttttagactttgcgctaaggacccactttgtatagagccctgtcttgtatgttttgaagaagttgaattcctttaggaatttatagtttaatgaggaaactagaattcttacataaggcacataaataaaaataagcaagtgtgcattaaccaagtggaatctacttacataatgaaatgatagcctctgattgaattaatcagtgaaaacttcatggagaaggtagatttcaagacactgaactctttatttaagtaaggtgcttagaacagtagcaggcacatcgtaaatactcaatacatgtgatcattaattaaaaatgaattagtgagtatctactgtgtcaatcaggatgatgatgaggttcaccagtgatacatcagtgaaaaagtctgacgcaatctttgttcttatgatacttattagtatattagtaaagctagactttttaaactaatatttattataattgtgatataggttatgaatcagaaagtgctagaatgaagaaactgaggaaggagggtacggaggtctgagtttaggaatagtgaccagattaggaatgcagagccctagttgagtttgcagaaaccacagayctggcttttattgcatctgtcttctctgctggcagagtaccatgccaatactgaattctttaacatgtacttgagcattgatcctgaaaccttggtagaatgatctgtggacccagattgtcagattaggggaagaaagaagaaagcctgctaaacaaaccaagtgagatgcacagagttataaaatgaagaagagctttttagagagggaaagagagaaagaaaggtcagactaggatttaacttgggtctcagagcagcagagcccttccaccttctgatcctgagcagtgagaccctcttattctagtgaagaccataactcactgctgtaagaaaaagaccctgttttatggaggcagggactatagataagctgatttctgaaggacccagctgataggcacagtgtagccagggaaatagcccacctgcaaatccccataacatcacagccacatgtcactagggattgagagtgatagaaactgaaattctatggaggcaaggmggcaaaacagaaaactcaaaatagagctgagaggtcctagctgaaggagaagctcaaattcagaagtcgcctgcccagagctgagtttgatggactctagttctcccggggagaaaacatagaaatgttttgttttgttttttttcccttagggcttgtgggccacatgggaaagtgagattgagctgtgtaaaatccatagaggtcacagctttgtcattctccaaattcagcaaagctaatcatctcttgaggtagaaaaatggccaggaatcagacatcctgagctcaaaaacaaagaactctgggatgctgggctgatgccgtaccaaatcctaattccctttccagcctaggaatggcttcagccgccaaaactatgctacctttagccttatgacatcggcatattctacccctggaaaggacctcagtcagtcatctgctctggccctctgtctccagatagccagccattacaaatgtatgtttatctttttgatttttttttttaagagatgggacgggatcggccaggtgcagtggctcacacctgtaatcccaggactttgggaggccgaggcgggcagatcacccgaggttgggagttcgagaccagcctgaccaacatggagaaaccccgtctctactaaaaatacaaaattagctgggcgtggtggtgcatgcctgtaatcccagccacttgggaggctgaggcaggagaatcgcttgaacccgggaggcagaggttgcggtgagtcgagatcacaccattgcactccagcctgggcaacaagagtgaaactctgtctcaaaaaaaaaaaaaaaaaaagatgggaagggatctttttatgttgcccaggctggtcttgaactcctggctcaagcaatcctcttgcctcagcctctcaagtagctgagaccacaggccatgtgccaccacacctggccttttctatttttaaaggttcgcacgaacagagatccttttacctctctggcttgctattctaaggtttataatttttacttatgatatccattaggaagtgcaattcatctctaacaaatgtttattcctcatatatttttaaaaatcttatgaaagttaaggcagaaataaattatttagtatcagctttaaagtcatgctcaagtcatttattagattttttttctgtctagtctcatagagacccattacccacagttcttctttctaaaacctcttcccaatatgccgtaattggagactccaaactacgtgcttatgatgttctccagaacccctcctgactacacccagaatacctactggatggtgcctgtaatcttatccttcgtcttgcttctaataagtcagacaactgccatggagggttatttagggcaacatggaacagccaaggagactctggccaggactggcttggggccagactaagctagtcaggttggctaggagagctcaaagaattaccggggctccttaatataaactatttgtataccccaaagtttgtgatttttagggaactaggggtttgaggcataggtaccaggtacatgaagagcatcctaaagtttggtttctaggaaaacactcagatattcaagttggagacaggatgaatgacttctggaagttggtagagttgaggtaagaagaaggcagagggagaagagaatttccttattgtgagattttttttgtatgcccaacagatttggatagtccctgcccaccatctgttgtttgcttttgtactgaaaacgttcggagtcacttgtctctcttaaccctgggtataccaacaggattgcattaagttagagtttttacaggaccatttactcagcttgggaacaggaaacaatgttccaacctatacatttcagaacaattttttcccttatttcctgaaattacaaattcatactccagaactccaggtatccagaagagaatcccataggccttgtgaaagactggaaaacaaactttagtttcatatctattctgatcttattgagctaactttattcatctttcctaaagcattgaaggctttgtgttgacttttgaccttgttcctttcacacacataggctattcctcaagctactgagaagcccctctcttcacagattttttggttttgatgccttcaacttaaggttgtgaacttaggcttctagacttcatggggctttgccttagtgatgtcataagtaagctttgacatcagtgctcaccaatggcttcttgttgacaagcccaaactttcaggccttaccttagatcagttatcagaagcatttggcactgttccaacttcttgaaactgtccacttttggcttctaagacattgctaartcctggttcttttgtatttcttgctgccccttattagtttttatcatggaaccccccttccccttcctgttccttcaatgttggttttcctcagggttgcattccttgcccctttcccttataattctgcatattctcttgagatagtctcttctgtgttcacatggatactccacaagaacttcaaacagcatatccaaatatgaatgtatcacccccactgccacctgcccaaaccaaaacctgcctctgctgagtcagtggaccacgcttttaccctttgtctaaatcaatcacgggacattttctccttctctgacccttgaaatgtaatcacattgccaactggatataagtcctgttgcttctgtttcctagatgtcttctgtccagtattttgttttgtcccaaatgctactcttccagttcaggccttccacatttcttttctaggatgccaggtagcctcctaaccctagaaatccctctctcaagctgtctttcacactgctgccagagttatctttctgagatacagatcgcatcatgtccctctgctctctaaattcttcagggattctttgttgtatgcaacttttctttttggaggggccacagacccctttaagaatcaaatgaaagctgtggaccttctcccgaaagaaatgtccatgcctgcagaacttttcatacagttttgtggggttcctggattccctgaaacccatcacccatggatccctgattaaaccctggcctgtagaagacaagtcaaacttctcatggcacataggtgcctgcccacctgtagagcttcatctctcaccatttcctagtttatattttattctttataatactaaattacttaaggttattttttgaccctcacctttatttgtgctattccctctgccaagaatactctccctcaaattatccacctgacagaaaaattttaaaggaaattgtcctttaggtcccatgacaaatgctgtcttttctgtataaccttctctgacttccttctggcaggcttagatactctttgtccctgtttcgactgtactttgtctctctctctctctctctctttttttcgagagatggggtctcactgtgttgcccagactacacttaactcctgggctcaagtgatcctcctgtctcagcctcccaagtagctgggactatagggatgcaccattgtacttggctcatgtcttttatagggaccaatagaccatattgtaattctccacatgtcttgaagaccattaccaagtcctttatcttggtattcccagactctgtggtggtcattgctgtacccccagtgcctagcatagtgcctgaaacatgataggtgttcagttagtatttgttcagtgaacaaatggaccttcaattcaatttggagctaatagccatgtaataccaacctgcaaaaaaaagaaacattttgattttttttattccattctattcctgatagccttggattattcaaaagtttgtgatggttttttagtttggtgctgcagatttttccgattactagctctcttagtgcttgttggtatattacatttctccaggcagggttaaggacaacatgaacagattttagattaaaacaaaaatatgtactagaatgtctaagagagactggctaaaatggtttacaagaagttgacccttcatggctcttaagattccctgtgcatcaccatgtgctccttgtcacattacatggtaggaaaggaatgtctcccatctctcaccaataaggccatgcttagcagaggatcagtgcattgttcctaatatgaaacacacatatgggacacctgctgtgtgttttatgttgggacgggttggctttttcacagtgctcctggaagagagttcttttcactgagcagctactaggagagggataatatcatctgtgaaaaagggaaaaggattgcctctctattttagtcctaagtttttgttctgttttgttttaattttctttctttttttttttttttttttttttttttttttttacagatggagtcttgctatgttgcccaggctggtctcaaactcctaggctcaagcagtcttcccagcttgacctcccaaagtactgagattacaggcatgagctaccgtgtccagccctagttctaagtttttcttccagtagaagcagagagagaatgatttacagtatactttttgagttccccataaacatcttatatacagggccacaggaagagactagcaaatatttgttgactaattgaggaaatgccaggagaacgcagtgagagaatagagtccccaccaattcttcctgcacacttggtcacagcctcttctggcagtgtgataactagtaaatcacaactgtgtggcacacattggaacatagaccaactcaagtgacacaaaaaaggggggtgtgtgtgtgtagactgagagaatcagctgtctggtaacagatatactgtgaacttgtgaataaactgtgacttgccaggttactgaaccatatagagtcatgtctttgtcctgaaatgccaactaaaagctgatgtctcgattcagtgcagaaagcaaggaaaaacctagtacagccattgacattagtaggacaagccatagaggctaataatgttaacttaggcatctgagaacttgaattctaatctgaactttctaaaagtactagctttgtgccccttgacctttttgagtttcagtttccaaatctttaaaatggagacaattccaggattgttaacagcattaaataagatgatgtttgacaagctcttggcagtgtctagcccacaatacacattcaagaaaatgtgttattcttgttgttattgtttcccagatggtcctatcaaggaaaggtcttgggaaaggcaggattttgggggggcttgaggagcaatgaatgcagattatctgaagctccagtaacattgactgcagtaattgggagtggggaggccagaagactttgatgagaggattattctagattcagagaaaagactaaataaagtactgattcgttatctttagccaaatgtaatatctctggattccagkgygccttttcttaggagcaacctctccgtgacttcttttgtccctcctttcaggtatgaatgctgctgtcagggctgtggttcgagttggtatcttcaccggtgcccgtgtcttctttgtccatgaggttggttctgtactttgttcttcatcattctttctctgtcttcttctaaatctgccttctatccccttcccacattctgtgtccttacmtcccagttagttacattgctgtgtttgattttccttgactccgtagcttcatgagtcactctttcctacttgactccaatagtgatggtgggacctgagcatctacaaactgggtcttcatgttgcctgttcaatttaaaggaaaaagtaactctcagtcctccttttatctccctcaaaacagagaaagaaatggaaatgggtagtatttacagcaaatttagtatatccagaggaagagccccaggagaaaagagacttgctgcatttctgtagtttgcataactttctgaggttctcaaatcttcttttgcacccttctcccagtaccctctcatgcttcacccactcttctttttataaggtccacctgctttcttgtatcagattttataatcttttagagcaagtcgcgtttctttccttccctcccaccaacttccccttctccttttctccatggttatcaagaccatctgttatcattggccccctrggaagcaggttggaggagataggatgagccaaaaataagaattaagattaactattaggaaggatatccacatcccagtatttcaaaaatgggagaaagtagaagagagtattgcaaaagttgatgcctccttctttggactgtgttaaatatgatagtctcacgagcatccaggactcactaatgggaggaggtggcttgactctcagagaatctcttcccagggatcctgtcttaatcttgggaatttrtagagaagcctaacgggctgaacaggtataatgtgtcacacagggttatcaaggcctggtggatggtggagatcacatcaaggaagccacctgggagagcgtttcgatgatgcttcagctggtatgttccagagaactccctgtcccatatttgctctgtccttgtttcatcccactctgttttgggctcatggtctcctaaattccctgtcatgtggtttcatgggaaggaattcagtgacaagagagggaccctatttgccctttactcttagcatttgaaaataccaccctggtttcctggggcarggagagggtggargagtgatcacaggatgctttgctctttatggaaaggtcataaacaasactatggggactgacacataagcagatcttactctagggtcacagggaaggtctggccctgaaaataaccttaccagaggactggagccagagccagaagtggagctgaaatctgccagtcctcatgtgatggagatgaggtgacctgaaaccagaccacttaaaggacgaaggaactgagacagcctttcggagtctcaaaaaaatcctaagagtatcctgaggatttccacagtcctttatgctacttgctccatgttgttttaggcttctcatgtgtatccactgtgggctagcccacagtgagtgagagaaatacaatcatttgctggtttactgaaaatttgtaaattacatttgtatcccccttttttcagctcagttccctaaaaatccatgggcaaaaatttaatatgcagtgtctagtgaaggctctacctaggtgctaagtaatggtgcctgccataaagtggtctgagaatgagccagaattctccaccagtatcccaaagtcatggctgcccaggagtacatatgatatgaaaacctaagtatacttacctctctcaggtaagtataytttctctcagggatagaaagccttaatttcccagggacttatagatacctctcttggggtatctataaggctttctttacctagagctatttttcctgtgaatacctggatattgcagcttctgctgctrgcaccatggattgcaaggagctaaggggaaaggattggcagtacctgggtacagttagaaatctcagtgcagagagaggaaaaatactacaaaacacattgggatgaactcctaataataatttggacacaatccagtaatgtcaggccattagggagaatttctaaagactgaagtcactgcttctaagatgtgaaagttggagattatttgagaagccaacatacatgtatgtattcacttgttctctttaggatagtcatggatgacaaagccttcaatgaaaggagttcttagcagtcttctcagatgtgtagcaaaatatgggaatgaccctatgatgcctcagccagcatcatttccctttcctttggaagggacagatcactcttaaggatgtcaaggaactttctagggagtcacacagttatgttaggccatcacagcattggaataggggatatctcagcatgttgagccctgtctctggggagctgacttctacctcttccaaagggaggcacrgtgattggaagtgcccggtgcaaggactttcgggaaygagaaggacgactccragctgcctacaacctggtgaagcgtgggatcaccaatctctgtgtcattgggggtgatggcagcctcactggggctgacaccttccgttctgagtggagtgacttgttgagtgacctccagaaagcaggtaagagagttttcacatcagtattgcttatttgtgtcggtacgtgcacgcrtgtacacacacacatcgcccccgccctgcttttacctcccattggagaaaaatgttacccagacacaaataggcagkctttgccctcctttttctggtattgtctacaattccttttggctagagtttctctctctcyagatatctcctctttaggcatgccaggtrcctcacccagtggctcctggtttgcttctcattgtcaggtaagatcacagatgaggaggctacgaagtccagctacctgaacattgtgggcctggttgggtcaattgacaatgacttctgtggcacygatatgaccattggcactgactctgccctgcatcggatcatggaaattgtagatgccatcactaccactgcccagaggtaaggggacttgggaggtaggcagtgtaagaagatggcagctaggacaggctaaagggctagaagctcctgaagactaaagcgtttgagctatggtgactataatggccagttttctggggctagaacactatttttaacgaaaaattatctagagcactgaaattgcactgttcccttaatgatatatgatttgtcttttgccactgtctggcccactgtccaaatatgcagctctgaggtctttcatatcattggggtaaatggttattcttcagactgggcaaatctagggagcccagacatgagctacgctttccaaccatatcatagaaagtataggtgctgctatgaccacgacagctcagagataaggggacctggggggaggcaatgtaggatgggaggatagaagggtaacagtttaccccagggtaatcctaaaggattccagttagtccaattctcccttcacttcttatcctttcctttccttcccttccctgacccggttcctccctggaacagagcctctgtttagacactttttactgctgtgttttctcaggcctaggaaggataccttgtggctaaagtatttcccctaggtcttcctggtctcaggaagcctgctagaaggcctggcagcatacatgtatctcccagagagggtaattggcctagatgtgggtggtggcttgatcttggccrtagggtcacttggactgtgtcatatgtctatctcttgcagccaccagaggacatttgtgttagaagtaatgggccgccactgtgggtaagatcctcattctgacccatttattccgtggacctagcgatagccctttccttttccccagagagtccagtgaggtctctcagtagcagcagatctggaggtgcacatgctccttgtggtgtggttccctttccggcctccatcccctctgttacatycccacacatgcatgtgtgtacgtgctcaggcacgtgcttggtgtaaagagtgggtagtgctctgaggctggaagccactgtggcaggtgaacataaatggaaggtatccgttagagacagaatctcattgaggggcccyggtgctcttacccttgccccacgaataaaatggaggctctccagaccttttatcaactaygaggactaggagaacttgttgggtatgggtgaggctatttgtagagtacaacttctagcaggatgcttctgactctcatctcagatacctggcccttgtcacctctctgtcctgtggggccgactgggtttttattcctgaatgtccaccagatgacgactgggaggaacacctttgtcgccgactcagcgaggtacttgcactttattttgcccttaagaaatccctcaccctgttccactgatgatctctttcccacccatcagcttcattccatggaccattttaccctttgttctcaaccagacaaggacccgtggttctcgtctcaacatcatcattgtggctgagggtgcaattgacaagaatggaaaaccaatcacctcagaagacatcaagaatgttcgtatgaatgaagccagagaggccttagaatccatagcccattcccttctggcttctgagtctcctgacattgcttctccccttggtccttctgcacatctctccctggttccctgcccctgattgcctcccacaaagaaccattacaagacaagaggctgagctgtccatggtttacccaagtctctgcttgttttcttcctttkactctgcgtaaccctctctctgtccctctgttggtcccttcagctggtggttaagcgtctgggatatgacacccgggttactgtcttggggcatgtgcagaggggtgggacgccatcagcctttgacagaattctggtaagtcactgggctgtgtggccctcatgccttgaaaccctcaaccttgtagtcctgccccctcagggctgcacttcaccagacagggacttacatcactggtcgcattgcctctccaccagcctttgggctgcagtggccactgacccattcccatacacttgagggttctcttctgttacaaaaatggtgagagactacgccttcctaatggtgaggaacaatatctttttgttttgttttgtttcatatatttttaatacgaattttgagataattgtagattcacatgcagttgtacagaataatacagaggtagtcccacataccctttgcccagtttctttcaatggtaacatcttgcttaactatagtacaatatcatcaccaggatattgacattgatatagtcaagctacagaacatttctgttaccacaggatatctcatgttgtccttttatagccacgtgtactttacccccacccatccctcctcattattattattattattattttttgagacgcaccattgcactcgctcccaggctggagtgcaatggtgcgaccttggctcactgcacgctctgcctcccgggttcacaccattctcctgcctcagcctcccaagtagctgggactacaggcgcctggaccacgcccggctaatattttgtatttttagtagagacagggtttcaccgtgttagccaggatggtcttgatctcctgaccttgtgatccacccgcctcggcctcccaaaatgccgggattacaggcgtgagccactgcgcctggccctccctcctcattcttaacctctggcaaccactaatctgtctctttgtctgtaatttttaatcttatgtatattatataaatggaattgcataatatgcaaccctttaggattggcttttttttccactcagcataattctctagatgtttatcaaaggtgttgtttgtttctatagtttgctgttttttgcagagcagtactccatggagtggacgtattacagcttgtttaatcattcaaacatttgagttttcaatttttggctattagggataaagcgactatgaacatttgtgtacagctttttgtgtgaacttaaattttcatttctgcagagtaattgcccaggagttcaattgggttgtatggtagttttttgtttcttaaaaaaattttttttcaaagatactgcccaactgtttccagaatagctgtaccattccatcagcaatttatgaaccacctgttttgtttgcatccttaccagcatttgggggtcgtcacyttttttttttttttttttttttttactattctgataggtatatagtggtatttcttttttctttctttctttttttttgagatggagtctctctctgttgcccaggctggagtgcagtggcatggtctcagctcactgcaacctctgccccctgggttcaagggattctccggcctcagcctcctgagtagctgggattgcaggtgcctgccaccatgcccagctaattttttaaatttttagtagagatggggctttcaccatgttggccaggcaggtcttgaactcctgaccttgtgatctgcctgcctcggcctcccaaaacattgggattactggcgtaagctactgggcccagcctttttttttttcttttttttttttaagagatggagtcttgctctatcacccaggctagagtgcagtggtgcaatctcggctcactgcagtctccatctcctgggttcaagggattcttctacctcagcctcctgagtagctaggattacaggcacatgccaccgtgcctggctaactttttgtatttttagtagagacggggttccaccatgctagccaggctggtcttgaactcctgacctcaggtgatccgcctgccttggcctccaaaaatgctggaattacaggcatgtaattccaaccttagacactcagtttaaaccctcttatcctatcttcactggaagagcaaagcaatctcctaccttgttttgtcaataagaagggaatattattaagccccagtaatcctgttgattaccatagtgggcatgtttctctagaagtaagtagaatctttggggttccgatggcaagaatacagagtcatcaagctttagatgaaatctgtttggggaggtaaagcccagtaagttctttgctgcagttcttaattgtgagactcagtcttgtgatttggaaaagggctcgagtatcctgactctctaggctgagccaagatggggcagcctgagccagactgtctttgttctctgggctcctgcagggcagcaggatgggtgtggaagcagtgatggcacttttggaggggaccccagataccccagcctgtgtagtgagcctctctggtaaccaggctgtgcgcctgcccctcatggaatgtgtccaggtggtaagtactgatcctaaacccctttcttaacactctcaagcccctgccttggagctcaaggggcatgagactatgtctaaggccactggtataggagcaggtggaaaggcaagatggtatagtaagagacatgtggggaaagaacacagtgggctttgcataggagctcttaactaagcttcagtgttcccatctgtaaaatgttcctaaggaaggtgggagattctacatcctccttagtaatgaaacccagtatctcataatatacaacctcaaacctttttatcwtgtctttattggaagaataatgctatattcctcctaactttattaagaacaggagaatattattaaattctagctgggtagcttttgtctctatgatttctatcttgaacatgtttctctgaaccaacacgaggttactaatgctaacgttgagggttattgtaaggattggagataagctatattagcatgtgatacagtacctagcaaatgttgagtgctcaggaaatggtggcctttattatgaaggaatcactcctttgataccacagagcgaacgtggcggctgagagcgagaactaggctgtgtggcctggttctgagggctggtctaaatactccccatctcccggcctccttctctctgagactcaggagtcccagttacctgcagccttgcttggaaatgtatctgtaaaagctccaaagtgaaggcactgccccacagagctgaaatcagtagttgagaagcacacagcaggaatcagtccttcctaactgggttacctgtaggatcttcatttactcatgactttagaggctgctttaaggccggggacctgggtgtggaatggaagatactatttatctgtgagcattcttccactctgcccatacttctaataaacagagcatagtgccaggcacggtggctcacgcctataatcccagcactttgggaggccgaggcaggcagatcacaaggtcaggagattgagaccatcctggctaacatggtgaaaaataccaaaaaaattagccgggtgtggttgcacacgcctataatcccagctacttgggaggctgaggcagaagaattgcttgaacccgggaggcagggggttgcagtgagccaagatcacgccactgcactccagcctgggcgacagagcgagactccgtctcaaaaaaaaaataaaataaacagagcatagaatcagttcttttcttttgctgctcattacttagacaactcaggaaaaacaaaaatacttccatgaaagtttgggggcataggaaaggtggggtgtagaatggacaggatctagtcacaatcccagagatgggcagagttcgactgtgggatggagttccagctgtgcagaatcctgaccctggagttgaaactgtcgctgtgctcccccctcagaccaaagatgtgaccaaggccatggatgagaagaaatttgacgaagccctgaagctgagaggccrgtgaggagatgacgggaagctcactagctacagaaatcagagscgtgaacgaagccaaagatctccatggctccaggcccaaaacatgarcttctgctgcttccttttctgattctctctgcagcaagttcctgcccaagaaaattagttgtgaggtgactgggaggctcagttcatctcaggggtgtggtccctggcatcaaccttttataatctgttatttctatatgtgagccccagcaagatgataagttcctctaggcaagggacagtctcttgtgctgagcatagtgcctgaagaagagtactgagggagtgtttgatgaactagtggcccttttgcagcccctgccctgtccctgctctgccccagttctgtcctcagaggtttgccctatggaacttccctctgggagcaacacttcagaccaggatctccatggctgctggctgtggggaatggcctgaagacacctctctctatttgtacttcctacaggagcttcatgaacaactgggaggtgtacaagcttctagctcatgtcagacccccggtatctaaggtactggcaagttgacttgccctctccccttttccttctccctcccccagtctctcttcataaatgctaccacagtccatacaacataagccttgccaacttctctgccccactctgatcttcagtgctgggtccctggccctattataatgatttcctcttaaccaccccagataccagagcccccttcttagtgtaccctggatatctctaacacaagacccatgcccacttcaggactggcaagatagcatgcaaagaatgggaaagagggcttatgtactttttctctgggaaaatatgggaataatcacatctaagtgtatctaagccacttcttccactggagtagtggttctcaatattaagtatatatcagaattgtttgggttgcttattaaacatgcaaactcctgggcccctctctcagaggagattcatatctgggtagaggccaggaatatgcaggtttaacaggctcccccagtggattctgatgcaggtgatccaaggaacacacttgggaagtgctgctctggaaggtctctcattcattgtataataatgatatctgagatgggggacagcagctttatttattgatctgtgatcaagaattttgcttccatgtatgtggtagccagctgtgctggcattccttgggagaggggtgtgtgttgtgttgtcttaggcagatatcctgatccctggatgacaagggcttagagcccttgccctcctttactaacctcctccctgttcccctgctgggtttctgtcctcatttttccctgcttcctcctgtatagagtggttcgcacacagtggctgtgatgaacgtgggggctccggctgcaggcatgaatgctgctgttcgctccactgtgaggattggccttatccagggcaaccgagtgctcgttgtccatgatggtttcgagggcctggccaaggggcaggtatggggactattctgggacctaggagcagtcatggggaagataagtgtagcaagaatgacctgtccattctcttggcttcctctgttcctcactacctctctctcctctctcagggtccaggcagaagtagatatttaatactagggcagtaggaacagcaggaattactgcagtgaaccattgcaaacaacatgtcttatttaattctctgtcccaaagctcagcacagtgcctggcataggtagatgcttaatatttgtgaatgagcagtaagggtagaagaagttgagtgcgtggggaaaagctaatacctggtgtaccttttccaaccaagggggatccaggggtagggttagaactcaagcagtggcaccagtcccacacaggcctcctagtgctttagccttgtgcagagctctgtgkcttatccccacagatagaggaagctggctggagctatgttgggggctggactggccaaggtggctctaaacttgggactaaaaggtaagtagcactgcagaggcacctcctcccagtyacctcttaaagttgcccttggatgtgggttcattatgccatggtctgcttcaaccaccctgttgtctgggtcctccaccctcaacctcacagttgctgccatgagggcagacatgcccatctcaacatctttagcagctctggcaacttagagctccagtatgtatccttggataggactgagagggtgggctagggagggcggcacaggtcaagaaattaaaaataaagtgcctctaactctagcttttctccccctcaattttcctgtctcttccccaaattccaattccccttcccctccccgccatcactgatcaactaggactctacccaagaagagctttgaacagatcagtgccaatataactaagtttaacattcagggccttgtcatcattgggggctttgaggtgagtgcctgccaccatttcttcctctctccctcctacctcctctccctctccccaatcctgcccttgtgctctcttcttcttaggcttacacagggggcctggaactgatggagggcaggaagcagtttgatgagctctgcatcccatttgtggtcattcctgctacagtctccaacaatgtccctggctcagacttcagcgttggggctgacacagcactcaatactatctgcacagtgagagcctatcaccacttcccatcccttttggccaggattataatccttaaactgagtgtggtcccaaacagtgagctactctttatatcaagcaaatgggaatgtttgaaaatgattcttcagctgggcatggtggctcacacttctaatcccagcactttgggaggccaaggcaggcagatcacttggggtcaggagttcaagagcagcctggccaacatggtgaaaccccatctctactaaaaatacaaaaactagctgggtgtggtggtaggcgcctgtaatcccagctacttgggaggctgaggcaggaaaattgcttgaacctgggaggcggaggttgcagtgagcagagatcgtgccactttactccagcctgggtgacaaagtgttcagtttcctcacctagaaatgcaccagtaccctgaataccaaatgttttgtttgtttttttttttctttctgagatcatgcagtctaattttctgagcagtagaaaggataggtacagctttcttcccaggagagacgttctgcagtgaggttggcaaatatgcctgttaccctaaatgcaagaacttgatgagctctaagggccctgctagcctatggagaatatagttccagggtttaattaatggcaaagattaaagagtgataagaatcaggmccctgatcatgtctttctaactataacccattgtccttgcagacctgtgaccgcatcaagcagtcagcagctggcaccaagcgtcgggtgtttatcattgagactatgggtggctactgtggctacctggctaccatggctggactggcagctggggccgatgctgcctacatttttgaggagcccttcaccattcgagacctgcaggtagctggccacccagagcctgctagatagctctcccctgtctccagactgtttccacagtgatctgaactatgagagctcaagttgaggaccgagctgattggtctgtagaatcctgtgaagaccagaaagagcactatgcaggcattctctggtgtcacctcatatgcatgaccgcagctactgttgttggaatgctgattttgagtcaggcgacctggtgctaagccctttatgggcatttttgcattttatcttcacaatagacatgcaaagaagatactatctccatataacatagaaagtttagagaggttaaaaaacttttctaaactcctaagtgagcagatggtttaagtggttgagaaagtcagtgatctttttactacatcatgtctccccttcagatttcccttgctgtcattctgcttttgagagagatactctctcaaaacagagatataaagtgtcaacactgacactgtgaccacaagtcagccctctgaggcaaggggaaccagaaaggcttggaaagggagattggagagggtgaggggctgaacactgacagttactgcagctgtctgtagtgctccctcttccagttctgtctcatttggagtcattgtttaaatttcagtccacactgagcttcttacaggaattaggcacagttcaggcccaggattgtaaacaactctcttccatgtgtctcttccttcctggagaggtgtggtrtggaagatgatttatacccaaccttatccrttcccagttaggcttaggatttactctttcattttcaggcaaatgttgaacatctggtgcaaaagatgaaaacaactgtgaaaaggggcttggtgttaaggtacctcatccatggtttgttcctaagtgaagaagaaaaataagctttggctcaaacccatagaatggccattgttgggacaccctgaggaatctgtagatataaagggagggggccagcctatcccttgaatccttggaggagataaaaattgaaaggaaagaacaaaggcagaaatgggggatgggaagccaaccacagagtcacaggcttttggtctccacctggcaggaatgaaaagtgcaatgagaactataccactgacttcattttcaacctgtactctgaggaggggaagggcatcttcgacagcaggaagaatgtgcttggtcacatgcagcaggtagggaagacaccgtagtcatgcccttcatcagacagccatacctgccaacagccatacctgccaacagccactgaggcttccactggccttttccagtcttctggaggagcctgtcagtgccatcatagagcatgggcctgcagtctcttacagtcatagaatcaaaacatctttatcctggaaatgactttagagattatatggtctatccttttcaaaagccctcatgggagggcttttcaaccttggcagctttgccttttggggctggatgataatttgtcatgggtggctgttctatgcactgtaggacagttgcacagcatccctggtctctacccactagawgccagtagcacctccctctcactcccaattgtaacaaaaatgtctccaaacattcccactttcccacctgcttcctcttaattcaaaggaaatctgtatgatgttttatattaattctgaggtgctaccaagggcagccagattgggccacaaaaaaaacacttttatgtcatcattgacagtgatcaacaaaagctgctgggctgaagaggggcaggcagctgacccattggccaataaaactaaaacaggatctggcagctgtggagctaaaagaggggattgtggggccaatcatctttaattagttgttattatatctgatacatggccaaatttgctgggccagcttgccttggatcctggcactgcctcagggcaccctttcatagtttgacttctggattcctgttttgggctgtaagcctggggcccatctttctttttttctctgtgtgtctagatatctctgccacttcattagagtccttccctctgtaatttttatgtttctttctccagggtgggagcccaaccccatttgataggaattttgccactaagatgggcgccaaggctatgaactggatgtctgggaaaatcaaagagagttaccrtaatggtaggtggggtgagagckagtgccctctatagaggctggttccccagtatagaagctgactgcccrtccctcattgcrgggcggatctttgccaatactccagattcgggctgtgttctggggatgcgtaagagggctctggtcttccaaccagtggctgagctgaaggaccagacagattttgagtgagtacatctgcttcctggagtggttcttttccctggtagtttcaagctctactgtcctcaacctgttcactgtctttaattcttttttttttttaaggagtaacacctgtattcttacccatttcagatgtgatgcacatgtcctaaatctaacctcttctgtctaacttcttcctataaacctttggtagaagttgattggggtgctaaaagattatatcatcatctacctcattcctctgtaggcatcgaatccccaaggaacagtggtggctgaaactgaggcccatcctcaaaatcctagccaagtacgagattgacttggacacttcagaccatgcccacctggagcacatcacccggaagcggtccggggaagckgccgtctaaacctctctggagtgaggggaatagattacctgatcatggtcagctcacaccctaataagtccacatcttctcagtgttttagctgtttttttcattaggtttccttttattctgtaccttgcagccatgaccagttctggccaggagctggaggagcaggcagtgggtgggagcyccttttaggtagaatttaacatgacttctgccccagctttatctgtcacacaaggctgggcacctctagtgctactgmtagatatcacttactcagttagaattttyctaaaaataagctttatttatttctttgtgataacaaaragtcttggttcctctactacttttactacagtgacaaattgtaactacactaataaatgccaactggtcactgtgcttttgcttctcctgttatcatcttcctaagtggaatgtaatactgtcagccccatgtatcagacacttgtctgatgaagcagtaaagacgttaagggtatcacagggggtggaggaagggattatctctagtacactacttgctggctgtctgaaaaattgtcactgccaaactctaaaaacagttctaaatagtgactgagaaggtttgttgctggagtcagggaataaggcagccaaatactctttgcacagttctttagtgggaagagaaattaacaataaatatcaagcactgtggtaggcatttcatcattgaatcctcatagtagcttttggagggcaatggtgacagcctgacttcagaaaggaggacactggagctcaaggtgattgattacataatgtctccttcaatattattcaagtagaactcaaactcagttctgacttcaaacctcatcctcattccccattcctgcttccttatcatgccatatcaaatccccagagccataaggcctatgaaaacaaagtgaaagggaaggttcaggcattcattcagaacattttaaatgctaattgccattgatttataggttctctgtctctttcctgtctttaatcttagagctgtttcctcaagaaaatgaagagggaaggatggctcagggaaagttaatcagagggaaaatgtcactctgtaaagagtaaaaaatttaggatgatgatacgatctgggaaaaaaaggcatagtgaagaccacttaaaaacaaacaaaaaaaacctatgaaggtgcatgctatttccccagagctaaaaagataagtgaaattgtgtttgaactcttaagtggaggtgaagcagaatttattagccaccaaccacataagtgattatgaagtaactgagaaacaggtaacattttttcccacatggacaaaactttctctttctagaatattaagtatctatgatgagaaatgaagtagcatctcaagcagtttataaatctaccagaatattagaatcacctgggacctttgaacgtactcatgcccaggtctactttattcatttatttttttgtagagatggggacttcaactcctggtctcaaatgatcctcccacctcggcctcctaaagtgtgaggattacaggcgtgagccactgtggccagccctactaggtctgctttggaccaattaaatcaatctctgggggtggagcctgggctttagtatttttaaaaattttcctaggtggttctaattaataactaggattgagaaccactgactaacacagtggaatctcattcctggctatatttgaagcactgaagcccccagtcctaccccagaaaattccaaagaattggtatgaggtgaaatcttggcaccagtgtttttaaaaagcttccttagtgattttatgtgcagctggagttgagaacataaaagcagtaattccaaatttggggtgggagaaggtataaaggaaggggaagctcttcagatactctgcccaagccctcctgttcactccagcaatgcccagaatcactgctgctaatgggagaaaggttgggatggaaagttacatagaacagccaggcagtaaacgaagaactttttctaaggggggttggagaaaagtaggaaaagtagaaattgccaaacttgcttttagaactatttattctttttttttaagtgatgttttttaaacaccagcatcaataggacagaagaagacatctgttttccaattagctgtgtcagtagattccattcattgtttgtagttcccaatcagctttaaaaaaaaaagtttttcaaatttgcatacaagtcatctaaaatcartaacaacttgatctaatttagaaaaatgaaagagtatcgttcactaaagcagatctcttttgggtagatggaccatcacaaaaggagctcttacatgcttttcccactcccatcccaagtccaccctcccaccaattgtattgtataaatcaataaaaagcaaaggttccagaacaactgaaagaaaaataattccaaactaagcagagtgaactttccattgggaatgaagacccatgggaaaaggcagcccagcccataactcctccctgctggaacacacaccgtaggtgtaggaactgcctgggaatcccattagaacacactgtttctcaggaagagaaaaagctgcattacaagaaaagttctcaggactttaggagttcttaggactgttatttcagagctatttattactgttattacagagctcttgttatttcagagctactgtagcccttgggcacaaccaacagaaagaggcaaagactgctgtttcctttgatgaggggaaagaggtccagtcccttccaaatgccccaggacatggcacagtagggatgtcatccagcccagttctggatctgcaccatttgaggttatagtatcttcatctttgggacacaattgctgttagctgaaattgtgattttcttaagttttttcacagatcaattaaaatggtttttttttttttttttttttttgagacagttttgctcttgttgtccaggctggagtgcaatggcgcgatcttggctcactgcaacctctgcctcacaggttcaagcgattcttctgtctcagcctcctgagtagctgggattacaggcgcatgccaccatgcccagctaatttttgtatttttagtagagacggggtttcatcatattggtcaggctgggctcgaactcctgacctcaggtgatccacctgcctcagcctcccaaagtcctgggattacagacgtgagccaccatggctggcctaaaatgctttctagaagggattcttctggaccgttaaccacgtccccaaaggaaaaccacacacacattatttaagtactttccatcttcctagagaaatttagttacactgttgactccttccctaaaggggaggattgagggagacctcttcttttgcaaaatgcaatataaaaagccaggtaagcaataaacagaaaacaaaagtgagggattttttttgttgggttgtttggtttgggaaggggaggtgctatggaggttattgttgtgacatgttgcttcgaaatctataaaccacacaacaggaacaactgtttttctgttttctgtgacaaggagtactgcagggacaacctcacccagagctgcctgcacgatggtgcaaacatcttctccggctattctaaaagtaacaggtattccttcaaagaagctggcagtggaaggcccttcactgcatcggggagatactggagtcccaggctacggcgcacggcatagcgagcgagtgtttttagagttcctggagctgagcacagaacagtcagtttttcacatagctgcgggtctctggccacctctcgtggcatggtgccatttttcctcaattcaaagtgtccaacagctctgtggaggagctcaaagcaagagtcctctttctctgttccaagtcccctgactagcagagccaccaggcgggagatgggtgtctggcctattaggttgatgactctgacctctgcgccataatccagaaggatgctgacactctcaagatttcccttcatggcagcccagctgagcggtgtatcattgttgtaatccagggcattsacagaggccccgctctctaggagagcccgcacacactcagcattgttcttaaaggctgcccagtgaagtggggtatctctgttgccatccaaagcattggggtttgcaccatactccaataggacctccacacaagcctcatctttctctgctgcatagtggagggctgttcggttatacccatccagggcattcacctgtaaaaagggaggaactattacagtagacagactactgagaggaagacaggacagcagcaaagaagcttgcatggttacccactacctttgctatgcagtgctctgaacaggagggtcagcaagcaactcccagggagtcctggtgataaagatgaagatatgacaggagcttaggagcaaaaaggaaaagaactgtcctcaaacagtcaacactattatgtgcactgactagctggtctgcattattttggtttttgctgcaatgttcttttatctattcattagaatctctaccacagagtaaggggtaaggcaggaatagaggaagtctaagtccccgtaactgctctgaaacattactggaaagctgcttgactatacagagttttggattattttacttaccctgaccctttctgtaccctgtggctaatgtagcaaccaaactgaaaaacatagcttttgctaagttctttaaccatacagagaaattcaaaatgttagaatataagtcagacctttgcaaaaatatgctgtgggttcacaagagaacccaaatgaaagcatgtgataggaagagcacaaatctcccagtgctggaaaagcagctggcttgctgacagtcagcatcacctgtagtttttttcttcaaatttccaaatagcatataccctcattaatgaaagacaaaaacaaaaaaaaaccctgaaacatttaagtaaattcaaccttttatttggctaaaacctatcttaagtaccacttcttaagtactttaagtacttttaagggtactttagatttaatcagagttgagggatctctgcatttatatctcctggatagacaataagcaatgagaagattaaacggaaatataaacagcccctacaaggtaagcttcctgaagtgatggccagtgacagcttaagttaaggagaagaaagaaaggcagagtatcagcaccatacaatgggggcaagcagggtggggacagaaaggtaaaagaatgaaatccttagatcattttatatatttaccattacattttccttaatattggctatgccaacattaccttgagttagaagttcagactggaggagggaagagatggaggagtgatggggagaaattctaagaaaacatgaagctcaagttttagtgagtcattaatgtgaatgtgttaaaaacattacctcggctccttttccagaagtaactccacacagtcagcatctgacaccatacaggcacagtgcaaggggttcagtgtgccatgannnnnnnnnnnnnnnnnnnntgctccctgtgggcagtaagacaacttcagtcagtgtgttcagctctggcttgcccagcaggacagaattcagaactgagtccaggggacagagagttctaactctcactattttatagatacagtgctagttcctgtttccttttctattaatattatgtcaatgtccaaaccaaaggagtacactgaagatgaaggaaaggaactgttaattccttagatcaagttactaagtttctccacaagggaggctgccagatggtcacctggacatcactgaagacaatcttatgtatcaaagcactggaaaccttatcatcaggcaggaaagctggaccagcaatccactttctatggccaccatgctctggaaaagtaggaaagtgagtctgtcagactgaggccagaaatggcatgctcttttgtccattcaacaaatgaccatcattaatagtggcatcatcttaacacggtttttccttttttataaacatcttcaaagtagcctcttagtatcagtattctttaccatctagcctttgctggtgcttctattcaaaatcaaaggagaggccgagtacagtggctcacacctgtaatcccagcactttgggaggctgaggtgggcagatcacctgaggtcagaagtttgagaccatcctggccgacatggtgaaacccggtctctactgaaaatacaaaaactagctgggtgtggtggcgggcatctgtaatccccgctactcgggaggctgaggcaggagaatcgcttgaacctgggaggcggaggttgcagtgagcc

SEQ ID NO: 6856 - DNA, 233528 bp, Homo sapiens
  misc_feature (1)...(233528): n = A,T,C or G, or insertion/deletion polymorphism (see Tables 1-2)
tcattctaatactcctgagctaatagcaccaagctaatggcttgttcattttggaagatattaacagcagggcgctgccttttacccaaacataagatcataataattaaaatctgatattgctcgaaatgaactcctttaaagtaatttatatcccacaaacacacacagatgcaggcgtgtaagtgccaacattcccaagaatttacgaccccttagagaaactctgtccattcctttccaaaatgaaaagttttctgttgatgtgataaaagactccttactatgttcaggggaaatgtgtatttccactgatcaatttctgagtttcccagaagaggggagccacagagaaatcctgaaaactaatggctatgggagcaaagtctatttgtactttattgcaccaatcagagtctaaaccactgaatcagacagtgagacaaagaaaaatcttattgtatgtgtgagactaagcatgaggcagagatgggatctgcatacacaaagagatggaataatttggagagaggatccaagaaagtaaacataacatattgcattaattaattgcttccaccaacttatactgagtgcttattgagtcccaggcattggacacccaacggtgtttgtgctagagtatgatccttaacgagaggttcatgtttgggctttggagggtggtgctatgaaccccctgaaattgtacataaaatctcatgtttatgggcatatgtgggtgagggtagaaatagattggtacttttttttttcctggggacaaaatataccacatgagtcacattttctaatccttcaggaacccccaaaaggtaagtacctaagataatagaatttgcctcctctactcttttcctagaaagaatgaacaaaccaaagccaaaaccaaaacaagccaacgaacaaagatatttctctttacttttacttcctttacttttgtaaagttaaaaaatattttctaccaaaaccttaggaaaaagccttacccctacattccaaaggtgacaaaaaggccaccaaggccaggggcggtggctcacgactgtaatcccagcactttgggaggcygaggcgggcggatcacctgaggctgggagttggagacaagcctggccaacatggtgaaatcccatctctacgaaaaatacaaaaactagcagggcatggtggcgtgcccctgtaatcccagctacttgggaggctgagcaggagaattgcttgaacctgggaggcggacgttgcagtgagctgagattgcaccactgtactccagcctgggcagcagagcgagactcatctcaaaaacaaaaacaaaaacaaaaacaaaaacaaaaaaaccaccaaatatagtgaattatgggataaaattcattgaccagctattagcaacaagatcatgtcattagagataatttgaactaataatcccattgctaatccttgcttgagtctatgtaaagaattctcagtgggatgagaagcataattcacagacaccttctcctaacagctatgctcttctgagcgtttattatctaccaagcattatttcaaaagcttcacctgcaaggtgttattaaacctcacagctattttatgaagataggtattattaccagtctgttttacagacaaggaaacagattcagggaggttcaataacttgttaaagctccacagctagaagtttcctgttatcttcatcccttcccttaagaaaagctataaatgaccacattgtaaaggtgagctagatgtcaggaaatggaagcaactatataatctcaagacaaaacagctttcttgcaagagacaattaatttaaatagtgtttaatagttggtttgtcggggtccagtttcttagcagaattcatctttgtgtttccagaactagaggatttgaaccgaggtggtgcggtcaggctgggaggaagtggggaatttttttgagacagagtctggctctgtcgcccagactggagtgtagtggcacgatctcggctcactgcaacctccaccttctgggttcaagcgattctcctgcctcagccttccgagtagctgggattacaggcacgtgccaccacgccagactaagttttgtgcacatccggctaaattttgtatgttttagtagagacggggtttcaccatgttggccaggctggtcttgaactcctgacctcgagtgatctgctctcctcggcctcccaaagtgctgggattacaagcgtgagccaccgcacttggccgggaagtggggaattattaaggaggtggaactgaggtgaactacccaatttcaaaatccttgtcagcacagtctggctgaactgaagatttttcttaccacctagacggtggtttagactttccctgcctcttaaggatggcctttttatttacttacttatttattttttttggagacggagtttcactcttgttgcccaggttggagtggaatgacgtgatctcggctcaccgcaacctccgcctccagggttcaagcgattctcctgcctcagctttcctagtagctgggattacaggcatgtgccaccacgctcggctaattttgtatttttagtaaagacagggtttctccacgttggtcaggctggtctcaaactcccgacttcaggtgatcctcccgccttggcctcccaaagtgctgggattacaggcatgagccaccacgcctggcctggatggccatttaaaacaacttattggccgggcgcggtggctcacgcctgtaatcccagcactttgggaggccgaggtgggcggatcacaaggtcaggagatcgagaccatcctggctaacacggtgaaacccggtctctactaaaaatacaaaaaattagccgggcgcggtggcgggcgcctgtagtcccagctactcgggaggctgaggcaggagaatagcgtgaacccggcaggcagagcttgtagtgagctgagatagctccactgcagtcaggcctgggcgaaagagtgagactccgtctcaaaaaaaaaaaacaaaaacaaacttattttgacataatttcatacttgcaagaataatacaaagtattcctgtatacccttcacccagattccgtgtctgttgacattttaccacatctgctttcgccttctctctctaaataaacatattcattttattttctttttcatgtagacataatgatgatcttttttctcttcagggtgtatttcccccaaaacaaagacatcctcttccataaccacagtacaatgaacaaaatcatgaaattatcaatgatatggtttggctctatgtcccacccacatctcatgtcaaattgtaatccccagtgttggaggaggggcctgatgggaagtgattggatcatggaggcggatggatcatggaggtggattccccccttgctgttctcgtgatagtgagtgagttctcacgagatctggttgtttaaaagtgtgtggcacctcctcctctttcacgcttcagccatgtaagatgcgcctgcttcctgtcaccttcccccataattgaaagcctcctggggcctctccagtcatggtacctgtacagcctgcagaaacataagccagttaaacctcttttctttgcaaattacctagtctcaggtatttctttatagcagttcaagaacagaccaatacaatcactgataaaatactgttaactcatctacagatcttactcggatttcaccaattgtcccagttgtatcagcaaaagaagatcctagctcacacattgccctcagttgtcacagctctttggtttcctttaatctggaagaatttctcaaccttcatgtctttcgtgacacagacatatatatatatatatatatatgtaatttttttttttttttttgagactgagtcttgctcttgttgcccaggctggagtgcaatgatgcactcttggctcactgcaacctccacctcccaggttcaagcaattttcctgcctcagcctcccaagtagctgggattacaggtgcccaccaccacgcccagttaatttttttctttttagtagagatggggtttcaccacgttggccaggctggtctcgaactcctgacttcaaatgattcacccaccttggcctcccaaagtgctgggattacaggtgtgagccacagtgtatggcctgacacagatatttcttgaaaaagtataggtcagtcagttattttgtcacgtttttcagtttgagttctattgatgtcctgattagattcaggttatgcactgctggcaagaatatcatggaggtcatgttgtgctctttccagtgcattgtatcaggaggtgcacaacatgtcccgtcactggtgatgttgaccttggccttttggttaagctggtgtctgccatgtttctccactgtgaagtcactattaagtcactatccatccccccttatgtttacattaatgaattgtttaaaattttttggtaaaatatacataatataaaatcaaccattttcactgtttctaagtgtccagttctgtggcattaagtacaatcacattgttgtatggccatcaccaccatccagctgtaaaacttttccaagtctgtactctttaagtacagacttaaatatggccctttgcaatattatgctgaaatcttcctctctacagccttcctacaactggttattgttattgccactagttaaccaaggaggactcttgtcttgggttgacatgaaggtgagttgaaggtcacaatcatgatctgcctcctgctctcctcttctctgctccaagctatgcaaccccagctcctctaaggaaagaacatgaggacttgggcaggttccctttagtaaaaagataataaattttcagaaacctgtctatagccaacaggacaaagagacattgaatttttccataaagccagatttggccaacattttgttggttttatttaaatcccaaaccttctctttcttccacaacctctatgctatgtatgttattttcagaggtgtgtgttcactgtaaaccagccaccattctactttctgtctctaacattttgactaccctaaacacctcatataagtggagtcacacagaattttgtttttttgtgactggcttatttcacttagcataatgtcttcaagtttcctccaggtagcatatgtcagaattttcttgcttaagcctgaagaatttttcattgtatgccagtatcacactttgtttattcatcagtttatggacacttgggtttcccctgccttttggctatttggtgaataatgctgttatgaacatgtgtacaggtattgagtccctgctttcgcttcttttgggtatatgcccagaagtggaatctctggatcattattttcctcttcttaattaataagcatcttgggggacgatactttgagattacctaaaaagcctgttatttttctgacactttcacccactagttttagcatccatcgatttctatctgaatcaattattctaatggctgtcaaatggcaattttctaattccatcactctttctgcatttatgagctggcattctattggaaagaagaaactttccttctccccgctttatttatgaatatggactcattttattgaatgggctatgttcctttcctttttacactattgctctgagcaattcttttccctatgattccccagagtgcaagtttggggaaatgcgggaactttctgtatttctttgtcaccattaagcaaaccgrgagtgcaacctgacttccccaagttgagaaaaatcactttcctgcccatgcattagtttagctcaaggggaaaccctttttcgaaagtgctttctgggtagccccgcgcgaactgcatttcccagaggtcttcggagatacgtcatcagcgagcgcggcttttttgcttgcgaagccggctttggagagctgctgtggcggcggcaacatggcggacgtgataaatgtcagtgtgaacctggaggccttttcccaggccattagtgccatccaggcgctgcgctccagcgtgagcagggtgttcgactgcctgaaggatgggatgcggaacaaggagacgctggagggccgggagaaggcctttattgcgcacttccaggacaacttacattcggtcaaccgggacctcaagtaggtaccggctgaaggggccggggtcggggaccggccccgctccgaccctgcccctacgtcgctcgagtcttcccaggcaggggctgttctccgtttcccttgatccctgttctttctcttcttgttctccaagcctctgcctgtccctcagggacatcttaacaccatccccgctttctcgtcttgcttctcctggcctcctggtcctgtttgtcttccgccatcctcgacctcttctgtggcggttccattcctaacaaggaggcatgcttttcccatgaacttccacttctctgagcttggcaggtttctcacctgtaggccctctgtgccccatcacgtctgatccgaatgtagtaatagtacagacaggacctggtcagtcggctccaaacccaagtgcacccgatctgattagccccaattccccggccctgaacttggacttcatcagttccaccaccacccacccgcaaccacgacggaccggccaggccttgagctgtcttcaccttttcccctaaccgctcccaaaccacctgatcagtttcctcactcccactcctgtgggagttccttccgcagtagagacctactctctaatctcttaaccagtttaattacttatgcttaacgcccctgcttcttaatttgtagtcttttagggttaaggattccacttttcctcctcttccttacaaagtaccttcttcacttacactttttaagtgttgtaagaattaaatgagaggatgtttgtaaagggcctggcacatagtaggcacttcttgattgcttaggtcctgaacttgccttctgttttataagagagtcagtccttcccaggaaggttagaatttcaggatttttgccttttacttctcagaactgacctgagtaggggaaagcatttggtgagctagtcatcctttgatttctggactggttggatttttgttttttcaacttggtctccttagtaaccagatggaaagaggaggtaggatggaggaggaggaggaggaggtggccaaatgatgggtgcctttttgttttccccctaagtagttgccgtaaatcacacagccctcctcaacgcccacatccgcttgctgttctctggcaccgcgccgagcaccagttaatactttctctgcttcaggggatgcactggctattcttccctatcttctgttttctttccattttctctccgagttacttccctttgtaatgttcaggatattataacccttcaccattttaaatagaaactttaagagtgctgacattatccttttgccttcttaaatctttgtacagtagtgccaagaagaaggtggctgatgattccaaaatgaatgtggcataagaagctgttcctagagagtcttttgttggcagtttgggactggcccctcagaacgtactcctggaatgtgctcttgttggctcgctttcccaagcttctctagggttttcctgctagactgaagtgtgtttgtttgacacagccacctcagtggtgtcttcccattccatttgtttattttatctcttctttgttttgttaagttttaccatctgtgaagcatcatgtacaaatctatccctatgtgaatgataaataatcatcatttaatcaggtacttgctgttctgccaagtgtaatgatctgcacgtgggtctgaaaactcttagtgagaggcagtgttataccacatttcaaaattccagaaagtctcctccccactgcagggatgaatttgagttgttaatttctgattatgggggtcttattgattctactgcccttaccttttttttcctcctttggaatggcaccagaagctctgttttaaagtcagataaactctcatttagggtttttttttttaagtgtcccaagtattttttaacctttcaaaaagtatttcttcttaagggacttctgatggatggtttgaagagcagtctttgatcctgggggctggctttaccctggagtgtaaatgggcttaggtttatttgccttgtctctttgcttttcagtgagctggaacgtctgagcaatctggtaggcaagccatctgagaaccatcctcttcataacagtgggctgttaagcctggatcctgtgcaggacaaaactcctctctatagtcaactccttcaagcatataagtggtcaaacaaggtaagggagatgtaataaayggagctaatatatggaaarccaagttttcttatattccatacatgcagaaagcaagagtatgtttttattgctttttatgttcttgattcagcatggggttatagagttggaagttgtagaatttttctgtaacctattttgtagtcctttgaagtctttggggattcatgatgttcaggtgattacatgttaaaaattctaactcaggtgtatttaacctggagactgggtatagggagcaactcttatgaaccccttaaaattatatgcagtatgttgtggtatgtgcatgtatatctagggaaggcttcctagcttttgtcaggttcgcagaggaatctgtggcccccaggaggtgtctaaatgtttagctgcgcacattatgttcttgtattgtcttttcctctgtcacagatggatgagcatcactagaataccgtttgttagatgactctctaattacttagatgccacctaagggagattgttcttaacatgctctgtagagtttgatattcatggtttctttcagcaggcaggcctgtggcagagaccctaggacagctgtaagttgcaaactaaactgtagctgaaaaataacagaaacaattaggctcatgaatctggaaacggttcgtttgtttactaacaagttccttttgtttgggtgctatgtggtgtggcgtacatgtgtgtatgggctttttttgttgattgggaactagaatatatattttaggaatgattttggaagctcttttattatactgtgctgcctctttgaataattgttgttagaattgttggttgtttaactgtatgcagggttgtgccccctccagtaatccattgtcattttcctcgtttctgtggttttttttccccttaggtcttgagtaagagctaaagcttgagagtttttctggtgtgcagaattttttctttgaatttctctttgagggtgttttagtattctttggtttgaagtggaaccgtgggagctgctttgtgattcaggaaggtgatttatcatgggttactaaagaaagaacttgaaccttgaatgcatacatttagcctgtaaagcctttccccaaaactctggactgccagtgacagaaacccagctgggtctagatttagccaaaaaaaaaagcatggggccttcattggttcaaggaactaaaatgttcagggagttacttctctgtggctgaactcaggaggatcagggtgcttgggtgggtggcaggaacatcactctcctgccctctctaggactgctttcctttgttgtcctgatgctctccaagggataaaaaacatgactcagcagctgtggatatacatagttcttatacctggtgacctcccagtgtccatgtcaggctctgaaaaaggattctggcccaaacttgataggtgccctctgagatgattcactgcacccgtgggtgggatcctcagctcagagcacctgaaacacaggaaatggggttccttggagttgggagagagggagttcccggaagggatggatgcagggcagttggagaaatcacagatgtctgttgcagttttttaggccagacgtgggactgttccagctctacacagataggtgtttggaaaaggaagccatgttgatgtattccatgggtaaagttctcaaaataggctacagtgacaagggctattcagtggtgagaagattcaggctgatctcaaaaccatgagtgagtgggacacttcgtggaaatgactagtcttacattgaagtgatgacactgaacttttgaatgaaggtagtttaatcactgaattgttctactattagaagttcctacttcaacccccacccttgccccacagtggaaaataggttgtattaaggaaaagaaatgttatgtatgtggaacttcttgtgctggaaatgctacaggttaaaaatatccgtatgcatttatcccagattataaatctcatatgagcaatgtgaggaggtgtcgaggttgtagccatgcccccggcctgctgaggttaagcatctgtaaaagaaccatgttctttcaccagcacaagagaacagttaagagactcagccccttattttagaggtgcgcaaactgaggcccagtaaactgacctgtttatagctccccaagctagaccagaatttgggtttcctgacctggttcaatgttctttcctctaaaacttgatgttttagtccagttttgcttaaggttttcaactgtagaaaacaatttttttccccgtttacttgcatcctggaaacaattcacattatattttattcatgaaactgtatgtatttttctaatttttagtgatttatcaaagggtggagatggcaaatacatggtacatggattcttaacctattgctttttctagggcagacatcactaatcaaccattgcattctttcctgctgaggctgtgtgtatgttggcttagaatccttgtaactctctgttctggcgctaggcagccactgccagttattcagaggagggcggcaaggaaaacatgttttttatttctgttatagcagataatgtcctatgtgactattacttatttataccttacctttttctagaagggatttaaagtagattataagaatacacaaaaccctgaaagaaaagagggagaacaaggatgaggatgtctatatacatttctttaataaacacaaaaagtagcctcaagaaataagccagtactctaatttccagctgggaacatggaagaagcaaacaattaattatatgtgtttatcttgcctttcctacaaatgaaaagagctttttaattggtaaagctttcatcattcatcattttaccctcaaagagtttaaaccagtaagtgcgttaatgggttaagtgaagtttggggtaacttgccaatgtcagctctatgcactattggctaagaattgaaggacatatgagaaaggctttgatacccatccattatgagatgaactttctgttttatgtgctgttggccatagaaaagtctcgttcatgcctaatgactaattattttctttaggggattttgtaatttttgtaaagtcagttggaatattaattacatggtacttggcataattgttagaataacatgtttaaaaatgaatcccatctaatggaatgatgttaaattgctgtgagcagcacttttcctgtactgaattggggaaagaatttagcttttcactattatgcacctatagataattgttgtgagaaggatgacaagctttcttgactagggcaaaaaataattggcatcaacgctgtccttgctataaaatagtcaatgtagacttgatagtgcttattatgttcagagatgctgagagttaacctgaacttattctgaaggtcctcttttgaaggtttctggcatcctgtcaccaggcttttatttctggctttgatttttttcatttgtttatggcagaaggctacttgtatatttgcctggaaaagcagactaagacgtccgcctttccctggcaacatctgaagctgcaaagaccccagaagtgtcactttttactgggcttgggaaatgggcccagagcgaggtgctgctgctaccttttttttttttcacgtttgattttttttttattacagaaagagcaactttctattccaagaatattccattggaaagtctgaagacatttcctccctcctgccctcctgaactgttcttattagaatccagttgcttaatgactaagttactgcaaagttcacctctcacatctatctctgaaggtgctcttttctgtttttgcatcatggaactaacagggttggaatcgttttacattgcaacgcagagcctttcctttagggactctgtcctctattaagggtaaactataaggctcaggggagaggcaccatgtccatcttgttccttgctgggagtccccagcaactagcaaggcgcctggtacactgtaatcattcagtgaagattcactgagagaatgaaagaataaatgaatcgaagcgttttctgttgaatttttaatttacaaccccttttgtggtttgcttgcttgtatttttgatgaagtacagtgagggcatttccattttcagccattactgagaaagccagttgtggtgcttggatgggaggcaatttggagaccttatgatggaggccagggctgggggtcatttggaaggccaaggtgaggtcattgggtgaaccaatgataagctctttgaaggctgattgtagcagttttatccacatcatctgtcacctggtgtgcccttctaatgggacttggtggaagttttttggagttgcctgagtcaggctaatttgagctgctgcacctgatgtcaggtgttctgtggcggctgtcattttggcagcagtgtgaaaactgtctgggaagaggagagtcaattccaccagcctcttagggttatcctactttgtgagttacgtataaccgatttctacttgtgttttccttcccaccaggcccacccctgactcattcttctctccatatagctgctacatgttcagggaatacagattccttcagaatataataggagagaaaatcacttaaatgcccctcacaatttaatcatcatgactttaggattgagcacccttctgaattgtccttttattggcaaaggtgttctttcacctaaatctaaccttcgtagcaccccatcactcaaaatgaacttgctagcgtagtgagtttggctgtagtatagactgccctggttagccttgaaccctacaccctcctcctccctccccacctgcaaaccctggataccgtgggagccattgtgaaaagaacagccaaccagagaaaacaatgaaatacagccagtctcctggacagcaagatacatggcaggattcagaagtcaaggaaggtataacaaaaatataaaaacttagatgtaagttctggagtcaagactacctgagttctgatccagctctgcttatgcttgagctcacaacccttgatacaagggaaaaaaatctttttgagtatcagtttcctcatctgtagaatggggataatactagtatttggatcatagggttgaagcgaagattgagataatgcacatcaaatgtcttagggtaactcacacatagtaagtgctaagtaaatggtagttataatgaccaggcatcgtgatagtacacatgtgtgtactcatttatggaacgtgtgttacttgtacgcatgtgtactcatggagtgcgtgttactcatatgcatgtgtacttatttatggggtgtgtgttacgcaagtgcctgtgtgctcgttcacggggtgcgtgttgcgcatacacgtgtgtgctcatttatgaggcgtgcgttacttctgtgcctgtgtactcatggattgcatgttactcatatgcctctgtactcatttatggggtgtgtgttactcatatgcttgtgtgctcatccatggggcgcgtgttatgcgtgtgtgtgtgtgtgcttgttcatggggtgtgtgtatgtgtgtactcacttatggggcgtgcattactygtatgcatgtgtgctcgttcatggacgtgtgttactcgtatgcatgtgtgctcgttcatggacgtgcgttactcgtatgcatatgtgcttgttcatggacgcgtgttactcgtatacacgtgtgctcattcatggggcacgggttactcatgcgtgtgttcgttcatgaggtgtgggttacttgtatgcatgtgctcgttcatggggcacaggttcatgggatacgggttacttgtgtgtttggtgtgctcgttcatggggtgtgtgttactcgcatgtgtgtgtgctcatggagtgagtgttactcgtacgtgtatggacttatttgtggggtgtgtgttactcgtgtgtgtgctcatttatgaggcacctgttattcatgtgcgtgtgtgctcgttcatggggtgtgcgttactcgtgtgtgtgctcatttatggggtgcatgttacacgtatgtgtgtgtgctcattcatgggacgcctgtttctygtgtgtgtgctcgttcatcaagtggcagtgttgctcggtggttcagagcgtaggctccagagcctgaccactctggctcacatgctgtgttacctgacagctgtgaggctaacctctctgtgcttcagtgctgtattctctaagatgggaatgataattgtacccacttcagaaaggtgttatgaggacaaaatgaggtgatacaagtaaagcacttaagctagcacagagtcagtactctccagtggctgctattattgtcttaagacgatgctgaggacaggttccaggcagtggtggcccatcttccagtggcttctgctccctcaccaggcctcccacacctgactttgctattctcctgaagttcttcacattggagattctgttgaataatcagcaccttttccagtgagacagcaattcacacattaatatgaattagtgtgtggggggcagttctttcctcacagaacctgggggtggaggtaagggactgggggtttggtggggggtgtgggagtcgaggggcaaaggcagggcgaggatcctggggacaaaccacaggagtggtgagaggaccatggagaggaggtgagaagggcatattttttgtgcacaccaaaggggactcttctcatcttggtactcagtaagagctaggaaatcagatctgttttatagtcctcttacctggtgggaaaagtcttgtgggccagtctgggatttttagcctttttttgagacagggtcttgctgtgttgcccaggctggagtgcagtggcacagtcatggttcactgcagcttcagccttatgggctcaagaggtcttcctgcatcagccccccaagtagcagggactacaagcatgcacacccacgcccagctaatttttaaattttttgtagagatgggggtctcactatgtcgcccaggctggtttcaaactcctaggttcaagccatcctccagccttggcctcccaaagtgctgggattacaggcatgagccaccatgctcggcaagccctgtttctttaggacaatatctgaacacaaaggctaatttagaacttttggattctctccaggttgtaaactgggtgcttgttatcagcagggctctggagtcagactttatagggtttgaatccttatcccccttttcccagctttctaatttgggacgagtggcagaacgtgtctttgcctcagcctcctcctctgttcaatgtggataacagtagcttccaccttccggggctgtcgtggggactaaggcattgagcacatctgagggacctaggccggtgcccagtgtggcgtgcttgcggcgactgtcctttattcttgctcattttaatatgaacggtgaagctgtgcctggcggtgtgcagtcaggagaactctgacagagcattctagagagcactgttcagtctcggccttccactgtcctgctatgtggcctcctgccagtggctttcccccactgggtttcaccttcctcatcggtaggatgaagggttgggctgggtgatctcttcagtcccttccagctctgccctggagaggttcattggagtcatcattgcatttctgtggtcgtggaaacaaaattgtaatccgaggaatggagagtatttccacctcttcagctctagtccagtaatgtttctgaagtacacacagcctttttgtatgctccagagcatctcagaatatcccagagtggagcagcagcccccagggactttagtggaaaattaccttgcaaaggttctgcagacagcattcgcctcttgtgacacaccacaggtaaatattactgaaaatcaagccatgcccctatcattctaaacggtttctatcccaaggctttggcccaattccatgtctttatgttctacttattagttgtggtttctgaaaatagtcactttattgttgcctggaatcaggtttgtgactccctcattcttttctgtaaaagagcaggaactgtctttggaagcctcactggccggccccagggaggctgcagaggctgctggacgtgtgtcaacttgccgtctgggagccactggccatggggactcatgttgataccctgcttgactctcttccatcagccttttctgggatgatcaggtttgtgtggtttgtccagagccttctgtacattgtaaccagagcctatgaagggcatttcctcttctcttccaggaatgttgaatagaaaggaaattgtctctgtcatttgtccttatgcaaaattgcacattggtggtgggaaggaagcatatcattacatgtacagaagcctcccgttttcttgtcttctctcttcatggtggtttggtttgggagaaggccgctgggttattagtgcttctctcccttctctgggccatctcatctgttctgtggcttcacttgccagccacacacaatgacatctaactccatcaccaggctggctccctccctcgacatccagacccatgtatcaaagggcccagctggacagctgcccttggagactcacaggcctctcagactgaagcagtccagaactgaaatcctcacccccaccaccaacctgcttctcgtggtgggatgccttagccagccacctacccagatccctgggtgtcatccgtcgcttctgcctgtccctcacaccctctgacagawctattgatttcccctcttcacagcctctcagctcttccctctccatcttgactggtgctgcctctccccgggcctccattattgctcagggcaatgccgcagcctccccactggtttctggcctgtagtctaccctttctaatctattttccactctgcagctctcgagggatctttaaaatgtagagatctgattttgtcactcttcggtgatttcctccctctctctcaggatgaattccagctccctcgctggcacttggaggctttctagtaatagtacacgggagcccgagtcctttggccggcttacctagcctcagtttcctcatctgtaaaatgccacgagtagtcctgcctcttagggtagcagtgaggatgatgtgaatactgcatgcgagtgtgtggcccgggggagtctctgtacatgacctgttgaccgttagcagccccagcacaggcccgttgttgtcgtcatggtctagcaccacttgttcttctagcttgtttcctcccccctttttgcggggggaagaaaccctttttattatgaaaactttttattatggaaaatttcaaatatgcacaaaagtgagagaataatgacctagcttcaactattacgaacattttgggccgaggtgggcggatcacgaggtcaggagatggagaccatgctggctaacacggtgaaaccccgtctctactaaaaaatacaaaaaattagccaagcatagtggcgggtgcctatagtcccagctactggggaggctgaggcaggagaatggcgtgaacccgggaggcggggcttgcaatgagccgagatcacaccactgcgctccagcctgggcgacagagcaagactccgtctcaaaacaacaacaacaacaaaaagaacattttgctaaatttgttgcatgcttgcttgcttttttggttggggggcgaggactggagtccatacgtgaaaatggagcccagacatcctgcattttgtctatggagactttagtgcacagcttcctctctccccactttccctgctcttcttctttttgccacttctagtctacagaagtaattgtcgttccccaaggggccatcatctctttgtcttggggcctttgcacttgttcttcctcctcctttctttctgtggaaaactcttagtcattcaggtctcagcttagttgttaaacatctctgggaagcaaggctttgagatgcatccaaattaggtgctccctgtgtttaccccatgattgcctttacttgtctgttttccctgcaagatgaaggcttgtcctgtattagccctgagactttgggccagttacctgacacctgctggactgtgaaatgggcatggcgctgatctcacagggctgttctaagcatctaactggaaactgtatatcaagtttctagttcagcgttggacacacagtggcatttaataaatggtaattatttgtattaacgatttctaagtgtgcaataaaacagtatttgaatggagtgaaattggagcctctgagtctcttcctcggtcatttttagattgtggtttcttttccttctgaatctgcctctgtttgcatcaccttaactttttcagattttggttgtggctgttgtcaggtgcaggagcactgagaggcaggaggcctgggagtgagtgccaggaggcttcttctccagttctttggctgctatgtgcttttatttttatttttattatttttttcattttctttctggcagtagaagattcccaaactatgctctgtgctaatcttagggatcctctgcgctggctcaggacttctggcctgtgtgcgggaggggagctggggcatctgttttgcctcctgctcactgcacttttctttggcttctggaacttgctctctgcatttcctttgccgcagtcacttacttgttttgggaggcaccagctcaccacagtttcttgggcttggtgaggcctgttgctggggccagtccctggccagggtcttggctcagcttctgcttttccttgctgacttctccaggtgaagggaactccctaagaccctcacatcacactggggacggtttgctcatctagtacttgctggcaagtcaagaactttgttgtctttttatcacgttgccaaacttgtttcaaccctgggaattggaggctgtttctgaagtctcctccagcctcatctgtggctgctctgcgagatgcaccctgggtcagctgcaaggagcctgcagaggtcagctgtgccctgctgctcgccatgcctccgcctggaatgccttgcacttttgcgaatgcattctttcctccagccctgataaagtgtctcttcgatgaagaccaagcagagcttagctcagccggctttgccccacagcctctgggcagtcacgctgaccacactgcggctgcctgctctatgggtctggccccgttctccagggtggggactggagtcgtcttggcatgcctggcactgagtacagagcaggcatgcagtaattgagcaccacctctgccatgtttccaagcacactccagggactgtacttcctttgactgttaggggaccttggtgaccaggttgggcatcacatctcatttgatagagagtgacttgtccaaggccatgctgctagccctctaacggggaccaacagtatttggcagctataaaagggaatgtcagcagaatgtccagaaaagcagagaggtttcttctaccattgaggcccattaaggtactgccttttcccccgggcracacccatcagtgcagcaggaccagtggtccgtccatgagacataccaaagggaatcactggggacaggtgtgatccacagacagccatatggggcccagcccgggcatggacatagcttagaggaattgccttgacctttatgaggaaggcagctgcaggcctctcagattcgggagtggcaggcacccttgtgtgcgttaagctctagatacggtaagttgggatctgagcaactcactggcatctttgcggggtgtctcatgaaagagaaaggtactgcccaggagccccttactggggtgggagggggcacaaaagaatgactgtgtcaagacaggcaccacccctgcacctttttgtttgttttaaacaggaatcgtacttggtcacccattgggttcataagttgagatgcccgccgctcttctcctttccctgtttgcgtgtgtctgtgtgtttcagcactggagggttatggtagaccactgttatttttagtcagtaggcttcactgattactgattacttatcagtagttcccgccacggtgcattctggtcttagccctctcttgatgccgctatacgtgttaaattttgaaggatgagaatctgtagattttgaacgtgtatatgcattaacgtgtgagaaaatggtcgcacttgctaccagtgtgctaattcttaatcatttccaaactgtgtttttgggtagtgtgctttttgctaggaaatatcctgtccatccagtctatatgcatttattgagcacctctatattccagttgctgttctacacacagtgaacgaagccagtaattccctaccttcctggtcgacagaggactaaagtgcccaaagcacctagttttagtaagaatttctggccctactgcttgtcttttctagttttattttttccttaaccagtggccttaaatgcctcagcttaccagtccttcctgtcagaaaggaccatgacagagtgccgggtgacttaaattggcaaatgtaacttatccaaagcagtgtctgaacatgaaggaaattttgtcttgctatcctggtgtcttaaatatcacccagtttttatagtatggtgcattttaattctgctccacacttagtgcaaatgtattgttagcgatataccgttttctggcttatttgcctttggcatggcaccagtttcccttatccttttctagcctaaggctgtgctctctttaagggattctcattgattggaagagaacactatatatcttacatttgtggcccatggaggaaaggcaaccactcaatcagctttagggttccatcgacctcagacgtgactcagttggtctgtttctatcatgagataactttctacatgttctttgagatatgtattggtgactctgtagcaaagaagctacatatttgttattccttttatctcggactgggtctgtttacatctcctctagatccccgaaggccgattttgcccgtgcatgagaccggccttattccctgacttcagcacctcctccgggtatgctgggttcccggatgctctgtattctcttggtgtgtccgatcacccacctgctcttcatccagtcatccaatcatagcaagatttatctaccttgccatttaaagtcacacttggtattctgcatgtttcccagaattgaatgcattgattcaaactactacatcatccatgttgtttgtgatgagaattggaatcacctgagtttcaagatagactgaattcttgatgtcttagtgaggagaaaatgatgaagtgaccattgaagagctttgtttagcaacaaggcggaagtgcgttttccttccggtgtctccatgatagtttctgtgtgctttagatcctctccaagtttcttccacttcacctgccaaatgggtttgaagatactcctttttccgggtggtgaatgcacctagctcgggctggcacatagtaggtgcccagtaggtctaagttttttgctcattaccccaggctcccatctgccattccccctgcccctgaacacttgagcggtggaggtgttcctgcctaactagattcccttcacactcagtttggatagcatccatgccagctccaaatgcctttaaagtgtttaagaaactagcagaggattatggaggccaacattcccctatcccttgtttttcccagtctaaaacagaacagtccgtgttaattttaattgcttggatgagctcaaacattgagattttaatgcattttcacagtagctcagacagcataaccacattatcctgctggcagttggttggaatcctcggccaaaacgttgtacttggggacctcagctcataaagccagaacgtggtaatttcctagtgagatgtcttgtggggaatgttgcttttcctgttgagacttcctccagatagtgaagtgttgtccttctcagtcacgtagtgatgggtacgtactgctttcaaggaaggtttcagagctcttggctagctgagggggtttctgggggaactgctttattcttatgagttgcaaaatggaaaaggcctattataggcctcccataagcaacccagatgggaacattgtcactgtctgcagcctggcgtgctctggaaggcacttcctagtgactgcatctcccatctcctcagatgatactaatgagtttgctgctaactgaatgagcaaatactcccaccctgtttcaggccatcttttgtcactaggacacttgcaacagcttcctcactgagccctgtcttacatctggtccttttcccacatagtcagagtgacctttcagaatgcaagtttgattacgtaactgtcttgctgaaaatgtattgatggctgggtgcagtggctcacacctgtaatcccagccctttgggaagctgatgctaaggatagcttgagcccaggagttcaagaccaatctcggcaacatagtgagactccgtctctacaaaaaaatgaaaatatctgccaagtgtggtggtatgtgataatcctaagtcccagctactcaggaggctgaggtgggaggatcacttgagcccaggagtttgaggctatagtgagctgtgatcaccccactgtactccagcctgagtgacagaatgagaccctgtctgtttaaaaaaaaaaaaaaatgtattgatgactccttctcgtgctcaggatgaagacagtctccataatgtagctcgttatgtggtccaggtctggctcccattgcaccccagctctggtacttagtcaccttgagccaccatactcaacctgctggcccttgctactgcctgagctgttgccatgttcagatgggcccacctcactttatgcatggcgaatactttttcatttttctatatttgttacttgagagtcttttctaactccccaagttggggtgaggcagccctcctatgtgcttctgcaggccacctgcccgctcccgtgttgcccacatcatggcctgattcatgctggactgtaggtactgattacctggacagggcctggggccagttgggcatgttccccattgtatttccaacatctagcaagtccatcagaagaaaacaaactaacaaaacactttcagttagatgagtagcttaattatctttgaagacaatatgatagctttaattgggcgtatttttgagaggaggtaggagcataggtaggattccaggcccacttttctgcaggttggtgggagatgactactaactcctgtgtctccagagcacatggctgctgcaatgtctgtgttgggcttatgcattccactcacagctcggcttgctgaaggagcatgcatattaaggcttgtttttttcttttttaaaactagtttggggatacaaacagaaggtaaattatcctgattattttgaggcagttatgaaaagggcaaagaaaggatacagtgaaagtcagagaaataccttatgtttattttagcccttcacagtttctgaagcatggacatgcctgtcattgcatcaagccaggagcagctgcgatgaatggggtgaaagcctgggctctggggcccggtgggtggcctgggtgccagccctgctgctgccctttagtaactggtgacgttgttcagctcactcctgtttcctgatctgtaaaatgaggttgatggcaggagtgatttgtaaacaaggcattttattaataaaatgtttagacccttcttaaaatacaacaaattttatagtgattaacatgttatgctctataaaagtttattatagaccattcaagctaaaacaatatagtttgaaagtatgccacatcaacttcacttaccagctactagcagtgtcagtataaaaagcaagatcttacaaccaaagtcaaaaggtgtaaagtgtggttatttttataccttagcatcacctccagttctaaccatgctggctgagactgagacataccctcccatagccactccttggccctcaagggacagggcctgcaggcatgtgctgtgaataaggcaccgttggcccttttagctctgacttacttttcatttggagaacttatgtctgaagttaaggttcagcatccatccatcaaggtttcacccacatccttttgccgcccccctttctatcctaaagtgtcctttagtgttggagaaatggctgtagatgcagaaaggctcttgtatcagtccattagttgatgaagaaagagctacttgtagggtgacaggagatgaaaagaaacttaaaacttgtagacactgtcctctgaaagaaaaaagggatttgttgttgttgttgttgtttgagatggagtcttgctctgtcacccaggctggagtgcagtggtgtgatctycactcactgcaacctccgctttgtgggttcaagtgattctcctgcctcagcctcccaagtagctgagattacaggcacctgccaccatgcctggctaatttttgtatttttagtagaggcgggatctcaccatattggccaggctgatcttgaactcctgaccttcagtgatctgcccgtcccagcctcccagtgtgctgggattacaggcatgagccactgcgcccagctgggaaatgtttgaaacattttgtttgaaaactgaattttccagttgagcaacacagtgtgcttggtggggaccgtaaagggtttcctgtagaagcttggaaagggcggcccttgaaggaagcttctatagaaatggagccatcatgtgggaccgtgcagtggtcacagtcgggtgggagggggagtagtaaattttgccgtctctctgcacatttgtccaactgatgagaaaggcctttgagagttggcctacatcaaatttgccttatgacagggatatctgtatcttacaggtgtacatggagctggcagccaaagaggtcaagcttgtgtctacagctttttgtgaacactcatcttcttccactgtgtctgtctgccagtggtgacgtgtctgcatttcgacaagatggtgtgtcactgcctcccccaaaacagggggccacccatttcctcattctcccattaatctctacgcatgggggtcatacctatgctaatcagtgattcttctacaaaaaaaatggaaactgaatttttgttaatttgtttctgtttttctaccttgaaaccaacttcccagcagcattaggtaactagatcaagtccaagctctgcagtttctttactgtgtccttgggtaggttgcttgacctcccctgagtcttagtttccacatctttaaatggagagaatcatggttcctaccttctaggatgtctgtgaagactcagtgagctaaccctggtaaagaacttagctcagggctccctcagtgttagctctgaggagtatgataatgaaatttattagtgagcattggtactaaatatatcaacagtcacctaagctgccattcagactggtaataccaagcgaggaagttgagggaagtcgtatgtccctgtatcacaaatcagcagacagggatcttcagctgggttttgggcaaggcgcattaatggctgctttcccgaggatttatttccagccatgatgtacaaatggctgtgggtgttgaggctgtaatggatcttgtgtttaaggcttccactgtcgcggctcagmagagccctccctcggcccgcccctcagattgctgcctctggctcagagcatgactgcatctctcggccccatcacctgccagctctgagctggtggctgtgaggcgcagccttggcattgctggcaggttggtcttaggagaagctaggcactagagcttgccagcacaatttgtactttgattaatttatttaatttatcttgtgtcaacctgagaggatcattatgcacaaattactgttgaaacttgaagctggcctccctttcactaagcccccaggctggtctgtagtgctccaccagagtctttctgagggtgatctgttcctcttgccctctctgagataccagactttctccaaagttcgggttagaagctttgaagaaaggacttgtttggattctggtcccgtatgttgtgtctcagttgcggagagctgtccccttttatctttgcatgtgagttaaatttcatttttctgctaagtagtgtgagtctgtagccgactgctgctgctgcttctttccagtcaagtggggttttcagaatggggcccgagtgggcttaaaagttccttcagggatgggaaggaggtgtgcacggtggggaagggtgacactcaccaaatcgcttctgttttattgaatgtaaagtgccataaagtgtaagacgcttcattctttgtaccactaagaaagataaagcactgccacaggtaattttcagacactgtgaccgtaaaatgcatcatgatttcaggttttagaataagtgacatgtgatatgttgttaatggggctggttataaaacccttagcttttgatacagtttcactgaagttgtagagatgtggatttggagagcccagatatttgtgtcatccrgtgaccttcacgtgaccttctataggagtctgttctcacgctgttatgaagaaatacctgagactaggtaatttataaagaaaagatatttaattgactcacagttccgcatggctgggaaggccccaagaaacttacaattgcactggaagggggagcaaacatgtccttcttcacatggcggcaggagagagaagtgctgagcaaagggggaaaagccccttatgataccgagagagaagtgctgagcaaagggggaaaagccccttatgataccatcagatcttgtgagaatgaactcgctgtcacgagaacagtgtggggatgaccaccccatgattcagttacctcccactgggtccctcccacracatgtgggggttatgggaactacaattcaagatgatatttgggtagggacacagccaaattgtaccatcttccaagttgctaaaaaagtaatgtacccatctctctgtgaggtaggaagagggagaccagtgtccctagattatgcacaaaaagattggaaaaatcatgttatattgtgctttttatgtgtgactttcagatgatcacattctacatattttcactcagcttaaagtttttacttttaaaagtggtggccaagcctcatataattcttaactttaaaaaaataggattatcacttgacaagttttttttcttgaggatagaacattccactctgttaatttattattttgtttattttttagaaattaggttttactatattgtccaggttagattcaaactcctggactccagggctcctcctgcctcattctcccaagtaactgggattgttggtgcatgccatttcaccgggctccactcactgggcgccacagtcctgatgtctcctttgttgtcaccacggagggctgaggaagtggagggggcattgacaatttgtgagtctcaaagaaagataaactcaggaggtcttttcactttcatgagtaacgtttgggaccacgtgttaggaaatccaaggtacaggcagaattttctagtcactccctcggtgagtgtgggaaactgaattaattgccatcgcattggcttatgtctatcctagagcaaatgaagtttaaggaggtcccactaagttattcctgattatttcaggctggaaactagctgcagatgcaagagaatatttaaacaccatatgcatgtgacctgtggcctgcgcagcccagctctgttccctcttgaaggcacaccaaccactggcagacctttgccgcggctgcctccatatgtgattacccatagaagtaactgctcacagcagaccacagcccacattccatttgtttctcatttggtccccagtgacttgtgaatctagactagattggtttgccggatgaggacgctaaggctacaggaggacacatgccttgcctgaaaccagacagctctggatggccaagcactgtagatcatcctgtttggtgggactggcagaggattaccgcgggtggtgtgcttttgtctaggctcttgtgattaaaaggaaaagattcacttgagttcatgtgaacaaaaaggaggcattatttaggtgttttgtggaaccagagggcaaacagtatagccaggccttgcaagggcctggcaccaagagctagagcaactcctttgtgagtcttggtgctgtggggccccatggtcccttgtctctgcttcctcatgagtctctatcaggctttgctgtctgcagatgggtgtacttgtcagggcacgatggcctcatggcctctgagtttacattacctcagcgtcggtcagccatatgagccgaatgaagaatctttagttccattttttgagagagcatctggagccagctctttgttctggtccactgaatgtgtccatggagttggggtgtacagttctcagagacagaggtgttatgctgaactagacctgagtcatcctctgcaaggtgtgagccctctgtcacggtgtctatacctttcctaatctgtgaaagttgagaagttgcttttctgaaagagctcatacaggttgaacatccctttttcaaaatgcttgggaccagaggtttttcagattttgcattacacttaccagttgagtatcctaaatccaaaaatctgaaatccaaaatgttccaaagtacattttctttgaatatcatgttggcactaaaaaaatttgggattttggattttgagatttgggatgctcaacttgtacctgcttggaaattggtggtattttcacccagcgattctcattttatcattgggatgggaggccggctactgtgtaattatttactagggcatcagccttatacatttgaagtttgctgctgcttttccctgtcatgactgcatcagctagaactccgctaagatttagaaagaggattaatctttgtgttccttgcatgagcagtgtctgttgtggaactaataatgaggtataaaaaatgctagtatttgtccgacttaatgaagtcaccataaggaaggcatgaaacaagcaaatatgccatagttattttgatggaaatgtgagcaaatgttatgcctgttatattcgaggataaaattgcaattttaggtgtacagcagtatgacatgatgattaagcacacaggccctgtctgatgccaggttcagaccctgcttttaccactgccttcctggctgtcctgggggcgaattaatctccttttgcttcctaatctgaaaaatgggcctaagctggcagctgcctctgtgggttgttgtaaggcttcaatgaattaaatcccctgaagtacttaaagtggcatctggcacatcataaggactcaataaatggctacttttcttagcgttgttaatcattgcaattgcactgtggtggaggtttgactaaaatgaggcttttgtgttatctgtggatttaatggtctcggctgctttcttggttccagtgaacggatggataatggggagtcctctcaatactgatattagtccagatgctttacctgtcctaatgttctgtcttagaggtggcttatsagtgctatgagtgagtataaggcatcttaatagcagatttcatttgtggtttgcagtgtgagttgacccacatctaaatcttccttgatctaatcgtctttgctgtcctgtttgatcttgtaaatattaatttagtctggttgttcatgtggttttcgatggtcccaaggttaattactgtattttgtttataaagtactcatagatgwctaggtccattgtggaggacttacaaaagctccatctgggcttaggcctgcagagttgcaataaaacttggtgagcgttaatgaaaaagaatttccagttccttatagattcagtctgggagattcctgcttgggtcccttgtttcaggaaatattgggggcataactattttgtaccttttcctgtttgctgacagaaatgaagaatacttaatcctgtctcctgagaatgctgggggagccccagcttggtcatttaggaaatgcttcttgagggcccactatgtgcagggatgtatgctcaactgaaggccctgccttcacagcgcttccagggcagtgagggggacagcaaggaagcagatccacagggtacacagcaggagggagcagtgaggctgggatggtcaaagaaagcgcccttctgagaggcttgaggaggaggcagcactggtgagggtaccctagagaagaccaggggagagttttggcctgccccaaagggtgactgcttctgacaggcagacgtggagggtagggaggagggcaggagaatattccaggtagaaaggacagtttgagcaaaggtaaacaraacaactaggttcctaaatttcttaatctaaaaattagatttgcaggtgtgttaggctgttcttgggttgcaatgaagaaatacccaaggctggggaatttataaagaaaagaggtagtggggcgtgatggctcatgcctgtaatcttagcactttgggaggccgaggcgagtggatctctagatcccaggagtttgagacctggcaacatggcaaaactccatctctacaaacaatacaaaaaaagttagctgggtgtggtcgtgcccctgtagtcccagctgcttgggaggcgggaggatggcttgagcccaggaagtggaaattgcagtgtgcagaaatccggccactgcactccagcctgggtaatagagtgagactctgtctcaaataaaagaaaagaggtttaattggttcaccgttctgcaggctgcacaagcgtggcgggacatctgctgagcttctgggcttctggggaggcctcagggagctcttacttatggcggaaagcaaagtgggagcaggtacctcacatggtcagagcaggagcactgagaggagcggggcggtgccgcacacttttaaaggagacgtcaatatggccaggacagcaccaagccatgagggatccgccccgctcacccaaacacctcccttcaggccccgcctctagcactggggatcacattttcaacatgagatttgggcaggaacaaatatccaaactatatcagcatgctaccttcttgagtttttgttgttgttgccacactcccatattatctttagttttgattacttgatatctttttaagcagattttttttttctgaatacatttgttttaagaaggaaattttgtcacttatctaatctgttaattttgtttataatttgcatattatatataatttatatatattttttcccaatacatgttacaataaatatataaacactaaaatgagaaacagtgttcccctgagatctacccaggaatcacctggtactcaccaggggtacactccacgctttggggaactctgtatttggtgaagaggctcgactgttttgtctgaaaacttggagagaagtaggagaagcagagcaggaagatggggagtgtggcccagagttaccaagctgggtctggacgcaggcagcctggttccacagcctgcttctgctgtttcccagcggtgtgactccaggcatgttgtttcatgtctccgtgcctcaattttctcttgtgaaacgggatagtgtccaccctgtagggttattgtgaggatgcagtaatgtctataagttattcactgcagagtttgggacatagtaagcctctcaatagactttccttttccttttttttttgttacaagaggtaagcatttctgctaggtacccaaatctctttctccctggtgtactatattgagatctttggtgctcatcctaacaaaattagcacctccgtaccccattattttttcccttatcatgttttctcagcagccagcctaactcacaggtgtctgagcagccctttctttttattttttttttttttttgagacgggagtctcgctctgtcgcccaggctggagcgcagtggcgcgatctcggctcactgcaagctccgcctcctgrgttcaggccattctcctgcctcagcctcccgagtagctgggactacaggtgcctgcaaccacgcccggctaattttttgtatttttagtagagacggggtttcactgtgttagccaggatggtctcgatctcctgacctcgtgatccacccacctcggcctcccaaagtgctgggattacaggcatgagccaccccgcccagccctgagcagccctttcgtgggaaccttaaagagcacactcataaagaatggaaggtggattaacagacgattggataaagaaggtgtgatgtgtgcatgccatggaatactgctaagccacgaaaaatgaaattatgttttttacaacagcatggatagaactggaggttattaagtgaagtaactcagaaatggaaggtcaagtactgcatgctctcacttgttaagtgggagctaaataatgtgtgcacatggacacagagagtggaataatagacattgaggacggagaaaggtgggagggtgggaggggtgggaaggatgagaaattgcctaacagcgacgatgtatactattcaggtgatggttacgctgaaaccactatttttttttwaaagagagagaatggaatagacaggtaatttcagctgacttggaatgtggtgtggaaactctcactgcacctgtgtttggctgggctttgctgcagagagattttttttccctgtgtatgtatttaaatcttagctttgaaatgtgacctctacaaagagttattaggctttatcctgatagctgttacatacttcaaaaacctatatattgtataactaatagatcactactgcgtggatttaaccttcattattcaacctcaaaatagggactgtttgcagattaaatgtctgcttttgtccacagtgttttgattttgcttctgaagcagaaatttgtagacgaataactgacccctcttaaaggaaaygtacaagaatgaagttgtcttgaggcgaccttgtcagagccaggagacccagggcctgctggtgccgttttcccccttggtgttccctctctgtgttgccatccatctctgattgtcagagctatgccgctgcccacccctgtctcgcgaaatctcatgcttgggctggatgaggcaagtcacggattgaatggagccatgttattttctcctgttgccctttttcctggaacacagttgttttgttttattcatcttttgatcaactattataagctaaactttctcatcgtagttaaaatggcaaggaaagggacctgttttggcacctcagtctcgtccatcgggattcttctggttttaatgtgatatgtgacatattttctgggatcagagcagtgctcgccaatagaactttatgtgatgatggaaatgttctgtatccacattatcccacgtggtagccactagccacatgtaactgttgagctcttgaaatgtggctagtgttactgaggaaataagttttttattttacttaattttaattaaacttaaatagcctcctgtagccagtggccactatgttggacaacacagatctggaggctggaaggaaccttgggccatgtagwtgagtgcttgacctaacccttttttccttcactgtgcatatttccacagtctttatgtctagctaaggaggggcaggggatgggatagggctttgaaaagcatcagctctagtgatggggtgagaaagaacgtagagcctctgagacagggagccttggactctgtggccaagacaagccctcttttttccccaacgtagttagacttcagaacaaagtacatttggcatttgggttaatcctttcagaaatccatgtactagctagctgtaattctacccctttctttcccactcaggaaagcttactggaatgcaaatgagtggccgaaatgttattagggataaccttgaatctgatctaatttatcagtaaataattgataatctcatgtactttaactgttatcgggaacatgttatttgggacacatctcataattgattacaaaaactgctgtgtcttgacacttcatttgaaaaaggatggatccattagaacattcgctgcagtgtgtgtgggtgaatgtgcagttgtatagatgcatgtgttgagcctagggtttcctggacaagtgatgattggagaaacatgaataaggccatcattgagtcttttcagtcatccagtagttattgagtgccattcatatgccgagatgttgacaatgtagtaatgaaaaagtcaaggtctcacagccctcaccctccctcatggagcttacattctgccgggggagacaaaactataaaagcaatggcaggtagtgataaatcatgcaggataagggctacagaaagactggggtgagtccctttgatggggttgggggcaggcctgtgtggagagcagagtctgagcagaggcctgcatgtggtgtctggagagcgccttccagcagaggaaactgcaagtccagccttggagtctttggaaggcactctgctgcagttgaagctgttagtatttcttgctgtcacaaaaggggctcttgatatctataacttatattgatttcctactcttcttttccctgtgaacataatcaggcctggaccctgtctttyacagagcgactgtcttcattggacaccttcagccaaaatcaggttgttaattgccacatgcagtgggctgtcttcccacgggctgtgtcagcatcttcagtggtgatcccgtggacaagcgtcctccttagcccggcacctggaccgcccctcatctcccatctgaggccctgcacgttgccttctgtagtcagactgttccattttctgtccttggaacatagctggtacttttcagatttcccttttgttcacatggtgcctcttttctgaaacaaacttttctcctcaattcttccctgatccttcccatccttaaaggcctgcttactgtcccttctcctgggacacttgaccacacccacccagctgtggccggaacccttatttcctgatttttggtgacggattgttcggattacatcatgagcaacgccctgatatttgttgagttggtaataagtatgatcaggcccatcccatgttatatttctccaatttcttggccttgaactcaaggactctttgtagtgttaggtttgaggaaaaaaaaaatagtttaacttaaaatagtgtaaaacatacagacattccaattctggattctttagaagaaattttaccttttttgggtttctttggatttcccccatttctctttggcagtcttttcagtttcctcctatttctgagagctgaatgtgtggttagggtgatgtgggcttctgggagccagtctcgcagacagttggtgggccagagattaagtgtgcagcttcggagtgctcacattgctttgttttgttctcagccctttctggttggaaggtcctgtccaggcccaagttctctatgatgctctgtgctggtttcccggctgggctgaccgtattctgctggacattcaccagaccttgccagcctgtcccttagagctgagaggagagtgtggcaaccgtgctggccgtcttcctgctcccagtctgttgcctcctccccactgggctctagaatgaccactttaccgctgctctccctctggctccagtgtgagcacatgcctgcagaagctcatctcaggaatactgaagtttttgcttgatttttcccacagtctgcagagcctgatttagggccacaccaggattaagtaagattaccagtatcttctctccatcactcttgtgtatcttgtatgaatgtgtcctaataactattgatatcaagttcatccctccagaagccaagaccgacctttagtgtcctgctgaggttgaagttttctgatgtgtttttcttgcaagtaaaatcaatggagataaacctcagtaacttttcctgcacaatgaggtggttaggctctgctgccatggtgggctcctccatccaggccgtgtgctctttcgtcttgtscaaggttgtttcaccaaaactgattggttgctccactactcttaaaggtcatgcttaatcacatttcaggaagattgaagaagactccaaattgcccaagttccatagttgactttgtgttcccctttggtgctatttgcttttaacaggacatctctcatttactaagcagttatacctgtgcttaaagggcaaaacccagggtgcattttttatcctgaaaattggtcacagccagttgtctgtggtttagaaatggtctcttttgcccacggaaatcctaccatgaatggcatgacaccccagcatgctgccaaagccctgcccgccacccccgtgatgcaggtgtcggatgaaggacgggccgtggccacagagtggggttggcttatctgagcggttgatgaaccgagctgacaggtccagaggggttctgctgttggcctttcatgttaagcatggggctgtagaacagatggaaaggaaggggccttcttgacagtttgggaggttggggacctttaagttatgatgaatcaaaagaacagtttagttactagtggcgttctgtgtgacagcttgacattctgtaattgtccacagagaccaaactactttggaatggtgttcttgcaaatgtgtcatattaattttttccctaataaggaggaatggtctgatatgaaagttctgagtaatttcacattatttattaactatcagctgtaggaatgtttttcctctccgtagtggttgactggaggactggaaacgagtaattgagattcctgcattcaagaaacattttttttttccattcctgagagaaaaattgtgattggaaaatctataacatgacttagtatcctaagagataatgtcaaggatgtttgcaagatagaagaaaaattattattttgtaggggatggttaattattgttttcagagtaatatgtgctcattatcccagcctgaaaaacagaaaagcagaaagaagaaaaaagttatctataatctcaccacctaaccaatgtatacctgaggttgcagtttttgaattttttgcgatcagaccttggcaatgaccttgagcagtaggatataaataactcccacatgcttagtgttccaataatggaacactaggcataaatgggctttaaacaccatcagcatttttatacctccttctagtctttttttctaggtaaatgttttcgtttttagctttgttgtgttcattcttgatatgcaatgaaaactagcctcaccctgtttcccactatagcttacgaatttttatgatattatatgataatgttattatatagtattcagaaaatttggattttaaaaactgtataatattccattcagggcatgcactataatttctcataccattttcttgttgttggaaattttgtttaccactgatacacatattgatggcataaatatcttttgcttaggagtatttcctaaagatagagtctcggaagaatgattgggtcaaagagtatggatttttttttttcgtgatttggacaagctttattacaaaaccataggtcaccatttgaaccactatacaggttccaagtggactaagacgtgtgtgtgtgtgtgtgtgtgtgtgtgtgtgtgtgtgtctaaaacattatgaaatgaagcattttaaaattgccaagcagtttggccttaaactgtaaggttacctgtatatgggtggctcttttctgccattttgcagatgggaccccaactgtatttggtactcttcctcgtggttatcgatctcttatgtccttcactcttgctcctcctcccctcatctcatgctctgcctctgtctttgctgctgaatacacgttcacattccacgtggttattttctctctgggtaatactgaactgaggtgcaaagctgtaaaggcagagagatccctgaaacaagtacaatcttaaagatatatatagatatatggtcttttacatacatatctttaagattgcatgtgtatatatatacacacacaccacatacgctctctaaggtgaaacctatgcatgttcagcttaaggatgaagccaggagttcatcaactttatgaggtaacttttccaagtgcctctttttgtgtaatctctcttatacttttcttgaggctctcctttttgattccttagccaaaaaactggggctttatttgccctgctctgctgggtactttcacagttgtatttgtgacaaaactgtagcagggcagagagagaataaaagcaaggttgcatgtgtgtgtatgtgcgtatgtgcgggggacagattccttcactctcttgggactactgttcctttaactggaaaggaaatttctctaccctcaacattttargctcttctgggttcccactgcagctgctaatgccagtgtcatcaccactgctacgattgcttgggggctgggacgtgagagaatggagagacgggaaaaacccaacagatgatttcagccattactatttactcttcatagtcctcaaataactgctccatatattctgttcagcttttatagctgcattcagtggaaagtcagggtggagagtactccctctgtcttacttgcatccagaataatgtatggattttttttttttaaagactcttggtacctattactaaattgctttccaaaatagctataccagtttatattccatagcaatattagttggcctgtttcagtatacttttgtgagcattagaaaaaattgtcaaaacaatcaacacaaaataacaaaataaaactactttcatctttacttagttgataggtgaaccactgcagtttaccgtgctagtttattttcttaattagtagtgtggttgaacttttgcctgtatatttattaccttaacatatctcttttcttctctcgattcgtcagttctgatccattgcctacttgctaaatttagtgttcatatttacacgtggtcatttttaactataaaataacataaacctctcaaaatatcacagagttggtctgggagctctgtatttccagggaccaaggttccattatcctattgctttgccacatgtatcttttattcccaagttgtccagtatggctgctggagctccagccattaggctttcattcctagcagcaacctggaggaagtagtgaagaagaaggaacagagaacactcatgagctttaaggaggtttcccagaacctacagataacattttgttcacttcttactggtcagaacttagacacttggctacctcgctgcaagggttgttgagaaacagagtgttttagctgggcagcaaagaatcctgtttaaaaaactggagttccgtaactcaaaacgtagtggagaataaatactgacatgcagttagaagtggctgccatggtgttagttcctttggaattatatctgtttgttgtaaaacaagcaaacaaacataatagaggcctaaaaagtcaagggtgaatggctgggttggcatttccttcctatcctgtccctttaccactcaaatataaccactgttaatggctggcaaatagtttcttagaaccttttattatgcatgtaaaaggtgtgtgtctgtgtgtgtgtgtgtgtgtgtgtgtgtgtgtgtgtgtgtaatttcctcttcttagacattatcttcgagttttctttcattcaacaatatacatacaaatcatatgtatgtacaccatacatacaacattctattatatgaatgtactgtaatttacttaacttttcttgtatcgatagatatgttgcctagctattttatgtttacaaatatgcctgcagggaacaatcttgagtatctatcttggcatacttggtacatatatttgtctttgttttccttaaatctattaattttagacatttttgtttttttaaagtatctccccaatttgttgtctgccttatattttgttatattttcttttttaaaaacatatacaaattttaaatttcatagccaaatctgttggtctttttcttttcacctgtctctttgaaacttagtagttgtgagacgttcacatctgtttttcctcccatatttctctgtgatttgatttcatacttttaactctaattgatctaaaattacttttggtgtacggtatgaagtagcactccaaattaaaactttttcctgtttttaatgtatttccactgaattaaataaatttcatttttgacttgaatgataagagttctcattaaatgaaaactaaccagaaatgaaggggaaaaaaaattagagtgtcttcatttgattggcttctacagggaattttccagccatggcattgagggtaaaatgtggactgcttttgatcactgaagcagatacagagttgtccttcagatgtgaggtcagcagatccaactgcaaagcagttaaggataaacaaagttagcttacacactgaaaatctggtgcagtgggcggcctggctgccggtagagcacccacccagggaagaggtgaagtcggcctcgtcttcaccttctgttcgtgttgccccttaggacagagcatctcatggttactctctccatctctgtctccttctccctctccctctgggagtttctgatgcaagatcactgaaaaagcgctgggagtgagaagtaagaagcgtaagagaaagaaagtttatcatgcatttataaatgagcaaacactgtgcaaggtgcttgacacaattgctgaacctagaagcaactccatgacgtatgcattattgttcctcctttaatgaggagaaaacagtctagagagttaggtggcccatgtcaggtccctcagccaccaggcagtggagccaggcttgtgtctgcccccaaacttcagagtacttctcccttccctcctcccctccctatttctttcccatctaccctttgtccctctgtgactttttttctcttttcctttgttatctcatgagggactttaaaaaacatctcaaattatcaaagtaacacatttattatataaattttggagaatatagcaaagatcagcaagaagacatccctgccagttgacacagttgactacggtgtatgagtctcatttcccttcacggtttgtcagcactgggtatggagatgagaagacagtctttgccagttgccctgaaggaaggtgggacctgcatgtcatcttttgcacattgtaagttcatgccattgccctttctgcattgcttggtgtggcatttttttcttattgatatccacgctccttccacctctactatactgtagagctttggttcttttgccctaagaacctttttcctggatcataaattccattaccattaggaattccttattaaatcagttaatgtgagttttaattgaaaattatttttttcagtttactcttttctgaagcatatattttcattttatctctgtaatagtggaattagaagggttttttcttttttaaattacaaaagattttatgtatgaaactatatatatcatatatgtgaaatgcagatgtataataaatgctcatgtacctgctcccagcttatgaaacagagcaggcagcagttcctgtgcgtgtgttatgagcccctcctcattctccctctctccttctagttcctccaatgtaccccacctaactgaattttgagtttattatttcctgaagacagacatctttattcctttttttttttttaagaaaaaaaaaaaatagaagccttaaaaggtcaagtaagttgctcagggtctggcagtgaaaataactgtgatgctagcacccaaatcttggacttctagtataagtgttactttttctttccgttttgaaacactgtaatacctcctcattgtgttgatagtattgtggtttttttgaccctcaccctatatagatttaactttattggttttaactatatagattttttctgaagagtcatttaaattttggggaagcagtgctcttattactgagagttttacatttgcctactccagatgttactagaaaacttaccttgtccctcaaaaacaaaagtacctatggtctatgggatatctgtgtattgacctctctaatttgttcccatagctagagttggcaaaggtaatgtacacatgattaattggtacgtgatcacctcttttatacaatcaataccatggttccaaatgaataaacctatcttgaaagatggctagcctttcaaaaagtcaaatgctggggattttccactggctctagttcagtttttgctaatttttataactcacatcaacattcaggtcacagatgtggattaaaagtgaagcccagtgaaataagatctaacttgcaatggtggtgtgtgcagcagggtccactcatagatctaagattccagcatcagaaatgcttagtgttcttcttggcatttccttcagtgctgactcacggtgaatgcagattgtggccactagactgtggataaaggaggggcaggaattgtgggatcttcagtcccagaggtccctgggcagtatggcattgtggttatgagtgcagacgttgaagtctcatacctcttggcacttcctttttgccttgtgacctgcagcaagtgactttacctcgtgaagcctgttttctcatctgtaaaatgggggcaacatcagtatacacactttcgagcataaagagtttatacaatgtataaatagggtgtccatgagactgtttcagtgaaagccttttctccgtgcctggcacacagcatgggttaataactgtagctgcyggtagtgatggccgtcaccatcatctttgtcatccttaagccagcctcttcatttgtagaggaagaaactgagtcccagatcctgtggccactcagcagcccagctgggacaagactggcagcgtctgtgcttcccgtgccgtgctctttccaccccgccacctgcctgtctccacatatctctagatcacgtactttgtcacctcccctggttctctgcagtgccggcagatcctaacaacagatggtcctgttttgaattaaaacaatttaactcaagatccatcaactgccaacatcaaacacccttaaaagaaggaaagaaactcattatcaagagtatttaagcaaagtaggtatttaatctatcttaatcatttgcattcttgagaagaagaaagtcagcggcagctgccaccgtaggccaggccccacgaacgtgtttgcacgtaattgcttctcccttttcttctttgccataccgtactgatttggactttggcccttaagaacaaatttttcagcacactgactatttgactatttaaaaatttaaaaagtaatctctttcattttgttccatacatcctgtgactgtccatctttcagtcgagctttgtcacaacacacatgggcactgcaggccttctgacgccgtgtgaggctgtgcttgcagtgcccgacaggaagatggggagcgactgagctctgtggacgctgcagtcggtagcatgatggttactgtctggcagaactgcagtcccctatgttaaatgttcatttggtgctacccctacatgccatacctggttcttcccaaagcttggtgtctacagaatgtttccttgcacccaaatcacagagctgatggtgtgagagtggatgtgtgagccatgaaaatatgcagactctttagtcgtgtgtgcgtgctcagttcagtccactcaagtctgggctctcagcatgactgtctactctcccactttggaccctcactgccatcctctctgctctgttagcgagcttgtcgtctccctcacagcccacattaggtgctgagggacacagaggcagttgttgacaaccctctttttccctttgctctttttgtttcttctctctacccctctttactttatttcctctttcttgttcttcccttctgctcttcttctctgctgcccgtggtgtggtctgatgacagctgccagcagggctgctgtgttgcactgcttccagataaattgtacgccttgcctctggagtggtgagatggcagtggctctgggtcctggctgcgagtgcagcttaactctttggaaccaggctgtggccccctcccctcccctaatctcaacatgagggaaaatgatggaagcacctagttgtttgacaaagcatatgggaggaaatcaaaccgttgcctgggccttcctagaatatcctgccgtgtgtgctggtgcttgagtgtgcggtgtgtgtgcacgtgcacagggcgtaccggcagaaacagagatgtgctggtggagccgagcactttgtcaccttgagtgctccttgctgggaccttcatgtccttgaccagattgaagcctgatgggctggaaggtctgggtgtagttaagctctgccgtctgctcccagctaaaagtaaacatgctgccttagtatttgttttccacaccacacttttgcccaatgtatagatctaaagccctatttatagctttctcgtgacatttgtacgggcagtctctcgtcaggtgatgccttctctgcatgtggagccgcctaagaccagccagccgctctccacggccccacctctcatcccaacttagatttctctgtgtataaatggctgctcttaagcaacctgccatgcggtttcttacctagtttggtttaaagtattctcccacagggaaataaagcaaaaaggtgatggcatttgctttttaatcttttaataattcatttccccgccgcagggaagagactgaggcccctggtggctggcagcagctttgtttagtgctgggcagcccatatgcggggactgatgctgagcacgacaaggtgaaatctcacaggtcatcaatttgtagctgacagcattttgaaaagtgatgtataaggagctgatattggtgtagtggtatgagtgaaatttatcatatcgtaaagtgtatgtgaaaggggaatattgtgtattttctctttatcaaaatgtcccacttttttattgatacttttcacccttctatggtcttatgaaacaagacaacaaaacaaagcttggaatcatgaaatttcagaattagcagagaggccacagaagtactatcttttataagggagggacctgcagtcacagaggcgagtggtgtcctttgtagccagtgaaactcctagaggcaggaccctgtcttgagtgtctttttctccccagggccagcactgaacggagcacacagtggcggttaaggggtaggagggattgccaagcaggtggactctggcttcctgggtcctcttccactcgtccttgggacacagggtgttcactcactctcctttgaagtagggttcccctccttgaagtgtaccttggatccagtgtggcctttgatggcagacagactggcggtgaatttagctcagtggccgcttgtgagacccaaccttcttttcgctcagtacctcgggatggagtcagtactggagctgcactgttacgactcataatgacaatggccggcacttattgagcacttgccatgtgcggggcaccatgctaggtactttgcgtgaattaacacatctagtccccacaagagcctggaggcgtgtgtactattattattatcgttctcacttgagagctgaggaaactgaggtgcacagagcttcagttacacagcttcctcttcactagcccctgagttctcccgcctctcagcagagtgcccgacacatagcactcacgtggtaagtgacaggtttgatgataaagttaaactgtacggcaaatctcttaatagtgttctttgtggtttctttgctttcaagcttgagaacttctccatctagaaatcgttaactctttattccattgggagtcattttggtttatggaattccttgcaattttgaagtccaggttcaaggcaaagagaccaaaatcatagtgtttaattgcatttgaagccataatgaaaccaggttgacctccatrttcttgtcgtagccctgccatggactggctggcttctccgctctgctgcctgttctctaccagcaggcagagtgtcatttagcaaggacagttaggtcctgtcactccgttcgaagccctgccacggcacccatcttatccagaggaaagcttacaatggcygccctcacccacctcagctccttccttcttccctgtctcctgctgattcaaagccattccaggcacactcccatctccaccttagagcttctgtgctgactcttctgcccccaaatatgccaaatacctagattctcattttcagatcacattgcaggtgtcatcttctcagtaagcaccacatttaacattgcagcccactcccatgccctgcacatttgaaaaaccataacatgttctatcttctaatatactgtatattttactttaaaaagagtgcttactgggaagtagcctttgtttatttcagtgatatttctcgagtgcttagaaggatgcctggcggccgggcgcggtggctcacgcctgtaatcccagcactttgggaggccgaggcgggcggatcacgaggtcaggagatcgagaccatcccggctaaaacggtgaaaccccgtctctactaaaaatacaaaaaaattagccgggcgtagtggcgggcgcctgtagtcccagctacttgggaggctgaggcaggagaatggcgtgaacccgggaggcggagcttgcagtgagccgagatcccgccactgcactccagcctgggcgacagagcgagactccgtctcaaaaaaaaaaaaaaaaaaaaagaaggatgcctggcacattttagcgattggcccataaatatttgctgaatgaatgaatgaatgaatgagagtgtagccttggtgaagctgctttctctttggggccttaaaaaaaaaaagtagaatagcagcttgtactgctgtagatgacatacaccctcccaattgtaacttctgttgattccttgcatattggttgcgtcaatgcatcacaaatccaccctcacgcaccctaggatgtgagattcgtggggcaggcagaattcagctggtgttggggaggcagatgacatatcctgcattgctagatctagagatctaggtgcagctcctgtctggggtcgggacatgttgtgtgtcagccaaagctcatgtgtcagaaacacagcacttttcccagtctacagctgcccggtgaaagcctgactgttttgcccactttcatttggtgatgtttccagagcctctttgcaatgccattgtcatttcccatcaccagcagggtagctccggttttctgtcattgccaccgaagccagcccaagcccattgttgctgtggatttgtttgcatattgcacagccatctgttctctttaccatccaagctttagattttgaaatatgaattaccaaccgctccaaggatttcaatggcttactgtttgttttgtatgccagtaactagtctttcaactgttagaatcaccgttttaaaagcctagattactcttctgttgtgtaggcgcgttgggcagtcactgtggctgaatgaactagtacctaggtatctgactgaaccatgggcttgaaaaccaccatatgcgactattactgtccatgctttcatcctgatagggagcattaaatcagaaagttgtttgagaaagataccagtrtatagtaaccgtaaatatagtaagctcatggattaggattacacttcaagcgtgtttattcgcrttgtgacttcagcttactgttctctgtgataaacggaggggtctgtgagcgtgattgtgtgtggcgcgctcctcagtcctagcagcagcatctgttgttactgccatcctttgctgagcgttcacctgtgcccagcgcagtgcttcaacatttcgtcttccacccacagcttctttcattttctttaacatgccaagctctccttgctctgctctttgggctgtctgtctttctctccgttgctgtcactttacacggtcacaaattttacaggcagtgcctctgcttttacatgttgttccttcggcctggactgtccttctggcataggctttcagcacctatgwctttcctttgtggcatttgacacaaaggtcattcatttttagtgtagggggttacctatttaatgtctgtcaatacttacaggctgtaacctctttgaggttccaagctttattagcacctaacactgtacctggaaatagactgagtcatgtttctgtaataaatgtgttttcacagacaaccctatgaaacgtatgcatagtataacttctgttttacacgtgaggagactgagataaagagaggttaaatcacttgcccaaatcatccaggtggtaagtggtagagccatgctcttttctcagctcttcttaagaagcagcgcatgccggcacgagtgacatatgaatgaccaagacagacagaaaacagttaacggccagacgcagtggctcacacatgtaatcccagtactttgggaggccaaggtgggaggatgtcttgaggccaggagtttgagaccagtctgtgcaacatagtagacctctctacaagaaaatagaaacaattagctgggtgtggtaatatgtacctgtggtcccagctactcaggaggctgaggcgggaggatagcttgagcccaggagttaaaggctgcagtgagctgtgatctcaccactgcactccagcatgggcaacagagagagaccctgactataaaaacaaaaaaacaaaacagtaatacatataaaccaaaagacctgcattctgagtctatcaaaatggttaggagaaagagatgttcctacttaataaacgttagccagggaatatttttgttttcttgctttttcatgtttctaaaatgtctgtttctctgctttaaacaacccagcaccagaatgggattgagtcatacaaaggccccattctctgtggtcttggggttttttttgtgtttttgtgttttttagagacagggtcttgctctattgcccaggctgggggtgcagtggtgtgatcagagctcactgcagcctccacttcctgggctcaagtgatccttccatctcagcctcccaagtagctgggactaaaggtgtctgccatcatgcccagctaattttaaaaattttttggtagagatggggtcttgctatgttgcctaggctggtcttgaacccttgggctcaagcaattctcctgccttggcctccaaaagtgccggggtgacaggcatgagccaccatggctgaccaggccttggagttttcactgtcgagatgatcatttgcattttttcccctctgtcagacggtttccttgattgcctctaagatgcatttgcatccttcgggtttcagctcaagtggtcccttcgcaggaaagccttcctttaccacactatttactattgcggccctctcgtcaccaccccccatctgcttccctgtgcgtttttcatggtcctcctttttgtcactgaacatcctgcatgttgtacctattcctttgtttattgtctgtcctatctctcctctagagtgtactctccacaagcatggatgtctgtctgttttgtttgttgcttattcccagtactgtccttagagcagtgccaggcacatttgactcaggatgtattaatattcattattcattattgaatgaatgaaatgctgtttggctagacaagttagctttgtaattcaacctgcaggtattgggctcatttggacctgggatcagctgtgtgactttgggcaaatgacagcttctctaagcctccttcctgattggtggtgtgggttgtaggaacaccttcccctttattgcattgcaaggatttaatgcctgccccacagtgaacasttggaggctattgttaccgtttcaaaagttacgtagcctgggagtcttgattggtcttttccgtttacatactactcatttgaggggggtgtctgtttgtgtgcacatacatatgtatggtccggtgaactgattatggtactcggtgaataaactaggccactttcacagatagttttaagagttgaagtctcagcacaaatgctccccactttttacacgtaacaatttgatgttttataatgaagacctacatgtcacatccccctaaccttgagtttctttctgkttgacctgtgctcatagccagtcgagaaggtgaaggccacagtcagtgcatagtctggtgctcttcctgaaccccctgggtgccagggaaggggctgtccctgaattacatgagattgctgaggagacaggagggcgtggctttctggtaccgtgtcagaaacccaagctatcgcgctgaggttccattcttgatcacgtgctcagttttagctacctttcgacctaaaagtgagatgtaccttgtgattcttctgcagacatctttccagaacatttcttaagttgccctttgaccttggacagagcgctgcaatagcatcaaagcgaagggcaggctttgttagggttgtagttcttggagacgtgaggactggagtttgtcttattgtgatagtaggtgactttagtgaccctcagtccttgagtctgacatactttgatgaatttatgatctttatttgtccatggacacttttaaactcctctttctttgctcccttgaatctaataaaggtaatcacttgttttctgcttcagatctgtttatatttatgagacctaatgatatgttatgcctttggggaagagaggaaaaattcctcttgattcttgagctgggggagggggagagcagtaagccacattctttattcccatatgtttaataaagattgcagcggtactcatgactcctcatctattcatacggggctgtattggtgctgtgttgctgcttctgagattggcactgttatattattaatagtactgatcacacatgcctcgcatttaatacagaacataagagcctcacctggcatgaatgaaaaatctcaaattgaaagtgtagatactataaaatttttaaagaagggaatacattatggttgaactttcaaaatacaaatagtgtatttttaataamcaagttatgaatgtccttggattcttgtgttagggaggtggagaaaggaaagaaagtggcttcctcttacctttatgcgaaatagaatctggagacacacagaacaccaaagatctaagttacactgacaaaagcaaaaacaaaaagcccaaatccacaccggagtttaggaaggcagcattccgttattaactcatccagttatgccaataatggcagagatctcagaacagttggaagtttatatacacaaatgtatgtgctgaaataccacactctgatgacattcgatggagaggtaacctttgatgatgaattttcttgccctttttaggggagtgaaaggggaggcgggtggtacttcacaagactctaaatttaccaaagtttttcaaatttaaattttcttagaaaaaaatgtcaaatgattgtagatccaaaaatgcctttgttggcattttaatggtgctttttgagcccagtatggagtgtaagtgaaaagaaaagcagtttctttcttggtaatgtggtattgaatccgaagcctcggaccatacaatgtcccaggaagcttcgtgatttrtatattgtatgtgatcttttcttaaacattgttaacctgtgccctttacagacaataccaggtcagaaaatgtcaggggagctttggattgccttcataattgtgtaaagaaaattattgtcctcaaaatccagagactatgacaggcgttcttaatagagtgatatgtttagagacacaaacagcatgtatggggctgcttttagctggcggggtaggaaaaatatttgagtgatattttacttttggttcagaccaattgtggataagaaaaaatgttgctacctgtcaggctgttgtagacacctattaaatttgttggaaaggtgaattctcaaagcaggaagccttttgaaatgcttattcacactcagacaatttattatagacctagagagaggcttagtgtggagcrcgggactaggtgatccccatgagaagagtggcttgggcgcagggctgtgagagggaggggcaggggaggccaagagagtggctaggtgacaagagccatcacttaaagccagtggaagcaggaagtgggccctggtgatctgtggcattctgcattccttcctgactggctctgcctcctgggacctgtcaacccctcaagttagttaagagctacatttgggaacgaacacattctgttacaatcctatttgcttaggtgcaaatgaaaatgtgtcttcttgttcctcttatcatttaggtcattaaagaacaagatttaagtgaaaatgagaaaagagacagttctttggcagagcagaaactgtgtaactattttcaacccctgtgttttgaaacaacagtggtttacttcagctctgtcagaaagaagaaaaaaaaatcaaatgtgtgggcttgacaggtggttttgccaaagtacagaccagagttgcattcagagtgccacatcatttcttctcaaaaagttcactttctcggtaaacaccaaataagaacctataaaaaggagcctaaaaacatgattttatttcatgagacttaaaatgccttgcctgtctaatttttctatggtttttcagctttcaaggtggttggcattacgttctttatctttatttgcagccaaggtgggctcggctcgtgggcttgtggcagagccgtcccccgtgcccaggctcccatggcatgcagctagcagcggccaagcttagcgcctcgcctaccacatccaccttctgatggcagtgcccaccagtggaacgaactctctccacacctcattatttctacaaccttgagtgaatttgcaaattaattgatgtgtgggagggaaggcatctgctattgtaaaaacctttaactgtggcagtaaaacttgaaataaaattaagtgttactatagtaaactaatagtccccaggtgataaagcacattttgtagtgtgtaggggcttccattttcaggatctgtttaactttgaggccctgttttttttttcctggtatagtttttattttcatccaaggaacataagtacgtagtttaaaaggcaaataaataatactacaagatttataccagatgtgttggtcttgcccaactctgctatgccactcctcagaggcaactccttttaagtctgtatttcattgtttattttttttagaggaggggtcaggctggactgtaactcctgggctcaagtgatctcccacttcaacctctctgaatagctgggactcaggtgtgccccaccatacctggcttctcttaactcttttagctctttccttggatacttgcccacattttcctaaataacctgcttagactgctgttttagaagttatctgttgcctctgccatggaagatgaagatttaacttttatagaccaccatcttcccactgcattgctttaattgatacttggtttttacattattatgactatgaaatgttttttatagtggagacatgtaggatactgtgattgctatttctgttggtgaaggctgaggtagagggtagctcaccatttagtgtgcagatttatccacctgttttcagctgtccctaaaccctgagcctctaggacagcctctccagagaggacaccacctggcttctgatggagcagggatctgggtgttcaagaaagatttaaccagtccatctgttttatgcctacttgacacctggccttccaggccaccgagtgtccccacttcctcagtctttggaaattctgcagtgcagttcagcttgctttttaaaaatcgacttctcccaccctcccaaccttcccttctgttcagggtaggtgtttagtatacttcactctgcaaaggtagtgctgttccacttacttcctgtcttctgaaatgtagttgacctctctttctgttgctgtctcctcttctctttgtccttgtaggctcatactgtgagtttattcatttgctgtcattttagtggtttggggagagaatgcaggtgaacatgacttcattctgccgtgttcaacaggaaggcctctggctcctgtttttgatacattttgctttcttttacacataggtctatagcatctttgtatttcaaaaagcacattttgatttaatgggtctatatttttcatgaagggtcttcttttcatcacatgattctaagaaatgtgtgcagacatgcacattgctgctttgaaatagagtaataacgtctctgggtctctagtatgctttctaagaagatccgtcggatgctagtatttcattatgtcgcgggagggagaaatgataaaacacgaagctcctgaaaagaaaggactggcctttcttcccctcttttaggtgcacgctggttttaaaaacctctttctcagcagtgctcttactattttggctctcagcagttagcttttctggagcggaatagctgagggcaagagtacctggtgtgtgatggcagtgttagaagctgaatttttcaaagaagcagagactccactagacttagagccactcccttgggtcagggccttggagagccaggcagcgctgtcacgaggggcaccgctgtctttgagacaacgtggctctggcaccagtgcacactcccctgaagagggggcagaggcccgaatcccctaacaytggtcaggcttgtgccacctccaacagatggaccagtaacaccttttcacatccctccctgtctttgaaaaccaggacataagtcaccagtttgttgtcttctgcctttgggaaatcctcacattttctgtgtrggaagcacagccagcccatgtcactccacccttttctacctcctgccactctagtagcagttcacataccatagcctgtataccttgatttgcaatttttgggccatgctctgctcccctcccccgcccccacacacaccgacacttttttttgcaagggtaatacaaaatgcagctcacaggcctatttcagactttattaaaacatcatttcccctgccttgttcccagatttctgtgcttaatcatagaaagccagcttgttcaaatatacattattcttgcttggaaaactcttggcttgtcttcctccccacctccttccctattttgtaaccttgcttcaccgaggcccttcttattaaatatcataatttgctcattggagagttatttgtaaacttaattaactctctgtcagtgtttgagttaattttctccctttcgttttagcctccctggccatggtttttcatactctgtcctgtgtctgttaaagactttgtaaatagttttgaaatgccagttggtgatatatgggcctctttaacatttctttgatttatgtgcagtgctgtggaaaaaggcaaagaaagcaaattatatggcaaaaaaatgttgccaatctttacttttttactcttagttttaaaaagtatacttatcaatcaaatctgatggattttcttttttataaagattgaaaatttaactatttgaagacttgtgcaatgcatgttctgtatttgcttaatcaagtaacttggtactagagtagggtttcagaattctaaaagctttcaatctctactatttgttcctatcctgctccctccctgactcttcaacaatacatgcatgaaatggccagatttttgataggagttggaaagaaggaatcctctcaatactggaagtacagtgctgaatctttctggtgaaccaacaagagctgtgtccttctcttagttgaccgtgacttgtctgaggcttctctccgtggcatctctgatggcttccaggtctcaagagactggcctcctgaagctaccggtgaatctgcaaatgttaattttgagagtgtactatgattgtgctcagattttagcgcgtcttggagctgcctgggggtgcttgttacagtgtgaattcctgggttcctcagtagaagttctgatcccacagattggaggtgggcccctggaatctgcacttttggcaagcactctgtagatgattctgttgcagatgatctctggctgtgttttgaaaatgatttgaaggctataatgtccttgattataccactcccctgttcggtatctccaatgacacctctcccccaattgtctactacatgaagtccaaagaaggtataaaaattccatattacttgggagcattgggacttgtcatttgtgtaggcagggtatataggtctggctgtgcagttatgcaatgcctacagacctctttggattttttttttttttaatttatttgttcattcagccatggctatgtgccaagcactgtcctaggtgctgcagctacagtcatgactaagaagcctctgtcctaatggagcttatattctaaggtattctaaggtatgggagacagggagaaggtgagtgggagaagttgaaactaaagaaacaaaccctctgtatgtaatacctagccagctttactactgtgattcagataaaactgctgtgatagaaagcacccccagctcctttaggcggccagaaaaggctctcttagaaggtgaagttcaagttgagacttgcacaacaagaagtcaggtatgcaaagatcagggtgaagagcgttccaggtagaggggacagctagtgcaagaggcctcaaaacaggaacagaaaggaagccaaccagagtggtagaatgctggtgaggcaggtggaaggaggagctggggccggagcacgtaggttgtccggctgtgtgtgtgccctgtgactctactatggctgtggttgctcagatcagagatgggcacctaggccggtgactgccagcagttgatgaggtcccagccagcatgggtgctgtgcccagtacactcaccctccacggcctggcacaggttcacagctccttatcaaagctttgggcatctgaatgtgttttggattttacaacattttatattatagaaaagtagcatggctcatataccattaatttctccagcagggtctggagcagtaccctgtaatcaaattttgtgcagcaaaatgtatgactattcacactaagtgagataaattaaggtttaaatagactcacatcagttcacgtcaggttttgctgccacatgagttttggcgcctacatcgatgagaaggctttagatgttcagaactttttatacattttatactgtgctagggaattatggctgtgtactggcagattcttggcccttcctctgttctgggtgtgaagcatcagaaggcagtgagtgggtgaaaaggtgtgtgcacacgagtgtgcctgctcaggctgcagcaggcagagtcccagagagagcagaggcgagtcaggaggagttgattgtggtggagttggaagaagcagcccagaagaatccgaatcccagaagctgagtagggcaaatggccggaagctgctggagcagttgggctgcggtgggctgcattctggtctctaagaggcctggttgtggacacggctcctgcgttctcttctttctcacagagtggacccttactacctgggtaaccagagcacaactgtgcttgttgtaacctgcagtcctaactggataataagagcagtcgttagatccccaccatcctcactccgttgattcagaattcaaattcctaccatactttgaggtttacttacatcccctcaggctatctcctgccagctaatgtattcatttactcatttatttaaaaaatacttattgagagcctgctaagtcctggagaggcagttgagtgtagtggttacagagcaggggccccagagccaggctccccggataccagtcctgaccctgccgcttaacgtctgtgcctcaattttctcatctgtgaaacagagatgataataatagtacctacctcacagggtggttgtacagattaattaaatgaattagaatagcacctggttcatagtgagtcctgtatacacattagctaatgttattattwttttttttattgataggccaagcactgttctggacactggggatgtagctgtgaggactaggggagatatctactcctacggggcttacattctaggcagatcttgaccttctaaaagcagagggtttctttgtatgtccattcatgtccagcactgtgctttgcatccatcaggccatcccattctcagcacatttttattgaatgctcacgtagacccttctgctaggccagtaaggcttctaaaatggagtacaagacagttccggcgctcttgtggaatacactttgggaaaagagtaaaggtagatacacaaaaacccccacactgtcatgtacagtggtcagccttgggaaaggtgtttcagaaaggcttctggtctggcttgagcaacttcagttcttcactgctccctgcttgccaggtacttaaagggaaaggcagcctacttattgggtattgaggaccaaaaggacacatgaggtgttgcacaagttgcctattcttattttctcactcctggtcccaaagcaggctactttccatatctgggctcttcctctggatggacgtggttggtgatggatgcgtgaatattccttcttggacattcccagctggctgctgctgctcctcattttggttgctcggcttgttcttcacagcagatttgggaaagtttgagtaaggctgctgagcatcattggagttggagtagggaacatgcacattggagtagcccttctcgtattaggctcaactctcttatgactcagccattcctgtgcactccccttccccaaatccacaggaacagacttgtttttgacttgtctatcttttctaaggtttttttcatcagatacaagttcttccagttattgacacagtcactcctaagacttagcttaagtgttaatggctcaacaatctcagccgattaacaytaatcataataatatttattgaatgtgtgctttgtgccagccactttgctgagcccttttcatgttcttaaccctcactaactccaataaccagagtatgattttgttcagtgaaacctgagattgtttctagagtaatcagatagtattgagtagcagtgttatccccaatagtagaagagagccaaggcttcagaaaattgaagaactctcccaaggtcatagagttggttaaggagagggcctctgttgtatatccagatggttgactatgaacccacattcttaattagattaagagtagtagaactctttctctgcctagctcttgttgatcagtagaaaattcactcagggctgggcgcggtggctcacgcctgtaatcccaacactttgggaggtcgaggcgggcagatcacctgaggttgggagttcgagaccagccttaccaacatggaggaaccctgtctctactaaaaatacaaaattagctgggtgtggtggcgcatgcctgtaatcccagcaactcgcgaggctgagccaggagaatcacttgagaacccaggaggcagagattgcggtgagaggagatcacaccattgcactccagcctgggcaacaagagcaaaactctgtctcaaaaaaaaaaaaaattcactctaatctgttgtttcttttaaaccaaaaacatgcccattgttaatatgtatgactttagctttttttttttccttccaaggggaaaagccgtagtcctgtatttatgtgggaaaatcctgacacacaggcttccacctgcattaccttttctcatacttcctgtgtgtagataatcacaatcagaatttaaacagaccgacagaaatagagtgctgtgggagtctggagagagactttgatcttctagtaccgaatgctttgctagatgcctaagaagcactccttaacctgattatttcacgtgtcaagcttgagccaactttctgggcatttaggttgtgtgtagattaaaaagaacaatctctacagtatattagaaggagctgtccaactaatcctcgggattgcctttcatttagagcacttaccttgtttctgcaggccttagacgattgtccttaggatttgatgatgccaagaggtatcgtcttgtaatagattgtcttccacagttgtatgagaagaattctgagttagatttccttctcaatatagctactcatttagaacgacctagtgggtacatttttcctattttctcattacatttatcaatttrttatctgacatgcttagggtgacaggatttgatttaaaaggtgatcattctcatcaattttgtgaaaattcagtcattcctggtgttattggaggaagcgaatttctaggtatggcacttgggaaaatcacaagaacagctctttttgcctgtttgcagtgtgctggacactgtgcttaaggcttttgcacacattataccgccaaattccaacaacaaccattcttcatctgtaaaaggaggccaacaatactgccccccatggatttgttgtgagatagggaaaaggcacttttaaagcctgccttagggagtgtgcccaataaacgcaaagacaactctctccttacaagattgaacgttgcctttcttattgagctgataaagaaagtggctcagaagggaggaaaaacacccagaatcactcatgttgagctggggtttgaactcagggccatctcactgcaaggctccatcttctgtgcattgggccacactgcctccagagtgtcagcctttgctgcttcatggccaagtacaaaggaaagcaggtgcctccttggacccgttgcctcctcgtagtcctgagccaccacgccttgttcttcctgttcccaaaaggacaatgcagttgttaaaatgatcaataaaaaaaaattccttcttaagagctctctcctatttcctgatttctgttcttgcatgcctcctaactaagcagctgtctcacttccactcctatacttttttgtttttctgacatcatcatcatatatctttttccagtcagtgattatatggctccctgttttcctgtctccttccgtgtgagtttctcttcactgtctttccttcttccttgcctcttctgactgtatatccccagtaagcagggagtaaggggatggctgatcaaatccctgatttgtagccaggtgtctcccagcagactgttggtttatggagggaagccaaggaggctaatggggctgcatctgaccataatgaaaatggtgcttaaagcagaaacaggcatttcatgacactggaataaagaagagctaaataaactctccagctaaatctaaatggactaggaggcgcatagaaactcatttttctcttctgagaagccatccctttttcacactacccataaaagaagaagtttataaaatatcagattggcaattttcaaaaaatcatgtttattagtttattgactggataccttggcaatgagtgactgatgcttagaattcagtgtttagaactgagacatagaaatgtacagtgatggttctcattgtactcatggcttagttgaaaaccatctgttttcttttgggggggaaaaagagaaatattcagggtcatatttcttatatgggaatatttagttcttcccccatgcctcacctatgaatgtttggaaagaaaaaccaataaagtattgtatgtcagtaaatgctcaagtgcctattagggctctagcattgcatttgatttcaacttttactaggcctaagacatctcaaggagccctttcccaactgatatggtttggctgtgtgtccccacccaaatctcatctctaattgtaatccscaggtgttgagggaggaatctcatgggaggcaattggatcatggggcggatcccccatgctattctcatgatagtgagtgctcatgagatctgacggttttacgtttggcaagttcctcctttgcttgcttctttctcctgccgccatgcgaagaaggtccttgcttcccttatgccttctgccatgattataagtttcctgaggcctctccagtcatgtggaactgcgagtcaattaaacctctttcctttgtaaattaccagtctctggaagtatctttacagcagtgcgaaaatggactaatacaccaacccctcactagctgccttaattggagacttttggtgactagtaaaatgtttgcattccatatttaaatttcactgatgttgatttttgtactaggaagtcaagcgcagactgctcaaagtaatatttataatacaggatttcagtgttaggacctcagacataattctagccttcctttgtagacttttgattcaggccttaagtamgtgtttaaaaactaatgtcctacatttctggtagaaatataaagataatcctgagatgtgtcattcttccctgttacttctgtctttggttaataactgaaagatcagatgcacaatctgtttttcttgagtccagaagtataatatgcaaatggataaggattctggggtggttcaaccttagctggtgacaagaacatgatggtgcatctgacgtggccttcttcccccagtagaaacataggcaaacaagatagcccaccatgttgtccctcttcagagggcatattctcattcattgtcaccgcctgtcaataatctgtcatgatgctctcattactgtgttgtcaaattttgcattgatcctatttatatttttggcctgcatcttcttaagtggccatgtgtcttagtttaggccactgtaataaaatgccatagactggggtaaacaacaaacatttatttttcacagttcagaaggctggaaagtccaaggtcaagttgctggcagatttggtgtctggtgagggctcttttcctggtttgcagatggtcaccttcttgctatatcctcacatggtggagagagagaaatctgatctcttcctcttcctcttcctataagggcattaatcccatcatggggccttcaccctcatgaccttatctaaacctgattatctcccaaagtccccagcttcaaataccatcacattgggaattaggccaatgtgtattgaaacagaagaattttggggagacaaaaacgttcaacccctgacaccaggtgactctccaacatgatctttctttatgaccctgtccattgctctctcagaccatgcaaggcagatggggtgagcacctggtgtgaagtgagagggggctcctgggagacaggaaaacaccaatttttatataccctcrtctgtcttttcttagctgctcatcttccctttttttccctttcttctgttgtctttctctttccctttacaaataawccctatgatggttgtttcttccattgttagccacattttagtttgctttgttagtgaattcattcagatatgtgagtcattctccttctattggactggcacctttgaaggatgataacatgcatacagctgtagtgtaaacaggagcagttgtggagaaagtcctattaataaaggtgcaaattctggggagttgcagtagaacaatctaaacaaccctaaccattacagatatttaagaaagaaaagggctgctatccatcgtctctgtttacttcttggatagcttttgaagtttggacatttgagcactaatatgtagggaagaaagaaactcaaatggcatttagcatataaataatgccacagtggagcaggaagcgcagccctgatttgctgtcctgctttcctagtaattgaaggagctgtgaaaccgagcttccaggagagaacaaataggcaagtaaattggaggcttccttcttatggtttattgatgctgttttgaccaagtaaaaagattatttacccataaaagctcaagtctaaggtgtttttttctaaactattggctatttgaaagaagcattaggagataaaaggaggaaagaagctaatatcattatctgatatttagattaaaacccaagcaaaacaattagatttatggtatttttctgtagctgttttccttggcacagataataccagacaagcttgcctgttttttgcttggagttatgttcaaaagaagaaccagaactctattgtaatacatgattctttctcattagctggaaacaaaacatatttcagtaatgaggggcaaaggtccttgcaactcacagtggtgacaaagtttcctgatgttgcagaaatcttagttctagttgaaagcttaatggtctggggaaacatgactatgtgagactctcagattagcaccctaccttgcagtgtcgcaacacacatcccagctgtatggggtgtgacttgattcaggtgtacacagtgtggattgttccaggtgtcatgggtccttaggttgtggctgtgggctttggtgtgttctgttatacattggaaggattttcagtgcacttacgccagccacctctggctgttttggtcagtgatctacaggggaagtggcactggtgtccttgcttgctatcattatatataacatacatttgcaaagagaattcttcagtagaaacagagtatacatgtggaatctcctagaaacccgttagacagaagcacaactgctctgtgacacagccatatcaaaactgctaggaaggttcaacatgccactgtgcatctggaatttagattttctgatgaaactatggtttcttgatttcttttctctaaagtatttaactgtgaatattaaaacttgaagacaacagagtttaaaacttcttcaaactcaccacctaacacatgactggagtcagtgggagggaaaagcatgcaacgtctcagcgcctgcaggagggcagagtgaagagttctatcatgacaagcaggagccaggagaggctggtgatgggaacgtggctgcctgcttggcatgggccagctctcatccaggggggatcgctgtgttctgttgccgaagggaagataaacatcagtacctccagttagaaagatgcagcatacctatccccgcgggacagagctattaaggcaaaccctgtatggcccaccgtcctcctgcgaatggtgtgacctgaggtcagtgacctctttaaggctggcatctcctctcatgtgaaatggggttgtgggtaggggggaagattggcatctactatggcctttctctattgttaaattctgtgatttgaagtcatctaggggcagtccctatggaccccttttcttttgagcttggtccaagctcaagcctgtgaacatacccactttctgggcaactggaataagaggaaaaaaggtttcttctgtggttctatcttgacagtgagcacctagaaagcagtgtgtttgctttcgtaagaggccagccataagaggactgtcagatggaggcagtctgttctagattggttgcagtgccaagccaagccagcattcccatgaatctgccagtctacttgttagctgacaaattcattagcatcacctgtattcaatgcactatcctggacattgtacagaatagagtcatcaataacaaggtctgtgccctagagataagactccctgggtggcagcttcactcccagacccaggaataacacaaggctgtcttttctgggcgtttttcccagtacagaccggagctttgtgcttggagaaggaaattggcctagagtgactggcagaggagatggtggggctccctacccccttgatctcttctgccctcctgtgggtcctctggtctaagccagacagaatttattataacttaattctatgccattctttgcctttatatgtaattatatgcaaagtgatttaaaaaaaaataaagtgaatcataacttacgtccaggagagctcttttttcccctttacccttaaagaagcctttggtgaatcttgagaaaggaatagtgattttcatagtgagaagaatcaaatcttgattgatctggcttataagttttgaggttttcaaatgtcaggttctcttaaagtgggattcgggccagatggcaagggtagagcagtgctgcatatgatgggatgctgtagcagggaccccagggaggctccagcatacacttcagcttttaagtactaggcctaattgaatgccactggcttcattagtatattgaacatgatcggtgtgatgaatttccttctgttctcttttcaaactttggtccagtgcaaaacattaacctatgaatattttggggcgggtagaagcattcagaacaatgcagaagacatcatgcaagtggagaatgaacgggagaggggtgattgctcatctgatttcttgaactcaagatttaagtcagaaactttgcatttgaatcctgtttttatcatttccttttatatcatttgcttccagtatttgttgttatttgtaatttgaagcgtattaaagctaattgaatttggactcccagtagtttggactctttaaaagaggattctgtaaagaccttggctatccaacagaaaaagatttgttaagtctcttgtattaatgttgtagggacattccttcacatcaaatacctttctacctttagaaatacaaaggaattgaattttagagtttgggggtcctcagagaaaatgtcatgcatattttctagagagggacaggagatgtgtaaggtcacccagtttggtagcagcaaagcccaggagcacatttccaaagaggctgctggttacagaggcgcttcctctcccacttacatttcgtcaggaccctgcctgacaacttggagcctcttacgtgttcaataagactaaaacagcattattttaaaaacgattcagtagatcaaagttttcctaattttaattggtctttcctcagaccattattaattgttaaaattttctcaggtatagaggtaattagtagatataattggttagaaagggctttaggttgagaactgatagaaaaatcctaggtcattcatagaaaatagaaagtggaaattaatggatagtgaaattgtaactgagagaaatactctaaaaaatccagagaacactgcaacacggaaatggctgttcctgtggagcagtaacttaacagtaaatcacgaaccttcccctccaactcagcacataaacactcccattccccgcacttgtaagatatgaaagttaaaagaatagatcatttctctccttctttcatttttattcctcccggttagtggaggatctttgatagaaaaatcacaatagaactttgataagttgctttttgaaatagacttgtttccatgctgcagacatttggagagaagtatgtttattgaaatatatttttatagaaaatattacagaacctgtaattgagaacttatggcggtattttggggagttatatgtttctaatgttaatttgtagattcactctgaactcccttctgctgttttagaaccattggctgagtgaacattttccaggagcctcttcagatctaaactgtgttgcatggaatggagttttggtgcttaaataatgtataatccagttggacaggagctgcctgtcagttttattaactttgaccttttctcccattataaaggtggttcagtaaatatttaatgggccccttatagatcttgacagtcagagccgtgttcctggaaactgggatacatatatatgattaacaagtgctgcttaatccttatgagtcagctctcaagggcagattttgttttgggggaagaagagtccttccacctatgtgtgctgttagaggtgcactgtacactgagagcatccaagatggttgaggtttcagaggaaccctttaaaagacagatagcagttagcgtacatttctgctgttttgggtttttgtttgtttgtttgtttgagcaaatgatcaaaatgatgccgggtgggcaaaatcaccctgccactctgcatagttagcaggcctcctccactcaaagagtcagcagggctggaatggctgarcttgcatggaccctagtaaatacaaaggaggaaagccaaaaggagagtcgattccttgagccaggaggaggcccctgccaagctgtctttccctgtaattccataaagccccatgcatattgcactcattgcaaattctggcagggaagatcgaaacccaagtagctgacattttgaaacattgtctttcaaacttgtactgtcccttgcctccattgatttcccatttaagaaatctgtaggaaaaaaacaaatttgagcaaaattcattggtctaagatgagttgttagagccaaattatgctcccccctttctaccctgaaaagagctccatctttattatgaatgtgatgtatgtttgtcttgtattgggcacctgtaaggctcccacagcaaatcgaccaagtaaatcaagagcctgttaaaaagcagtacagatgctccaaacacagatacttctgtcatactggatcactggatagcctcatttttatagccactttccaggagcagatcatttcaattggttttgttgtctttgctctctatttgcatgcagccctatggctttaggtgaggccatttatttttcagaacattattgccctttgcatccaaggcccagccccttttatatggtggtcgccagtttcattaccgtgagctgtaatgcagctgactcggcaaagaaaatctgtgccttggaagagcattttgagaagaaattgattcagagctttagaatgaattactatttgtatgtttagataattctaaataaatgtttgaaagaccttgcttaatctgagaagagaggaagaaacatattggatgttataaatggtctctatccaagttcttagcttggcattttcacatgtgaatcttttatttacatctgctcaaaattgggatacctttcaaggataattttattatagcgatattgatgacaactcttatgatctaaaatacaaaagtatagaattagaaagggaagctaaaagttattgtcacacgtcaaattggatataaacttcatttagcaaggagtgagaatgatgagttatattttaaatcagaatttcctgatgttaggtgctaaggggattgactgcgttagggcacaaatgagctttctgtaatgatggaaagttgctttgtcttgcttggggtggtagttatacaggtatatacatttgtcaaaactcattaaactgttcactttaaatgtgcatattatattttacgtaaattagaattcaaagttttgtttggtttagaactgggcagtatcatttctctttcccaataagaaactgaagtatagagaagtaaagttatctatcctaagtcaccatgaagctcagcagtttgtccagggatcaagtaagggatgctggcaccagacacatttaaagcatgctgcttccttacctccatgacattgttccaattgcatgtccatggacttgaaattggcttctccattcgattcttttcaatgagcctatatccatttgtatacattgttgtaagatatattcataagcttgttcttatgattgatatttgtaatttaaccattgaaaagatagctcagtggttctgaatgcagactgatagtatgtttgaatctgtgtatgataagccatgtcgtggtcatggtgtactgcggtagactacaaattctrtggtttttattataagcaagatatggtggtagcaagacttcccagaactaactttgtctctaaggaaaacctctggattttcttattaaaaaattacgtaggctttaaaaccatttacataaagcatatgaatagtagtcaaaaataaagaagaaagtaaaaatcactcgaattctactactgaaaaatacagttagcattttagagaacattttttaaagtgcctctctgtttacaatggaaccttttttcttttaattcaacaaaatggtgttgtgaagttctttctctattttaatcaatttcacagtcagttgttggacattccgactgcttccagtttttcatcatgaggtaatgctgtgatgaacagtcttgttcttgttttgtttcctgtttgtctgattatctttttatgggtaaattccttgaagcagaatgtgagcagttgtatttgaagttacttaaaatgttctaaggggataagattatcaagcattgctagtttaataccatttgtcctacttttaccaaatgctatttttcttccccttttgttttgtttttctctgcagttgcagtaccatgcaggactagcatctggccttttaaatcagcagtcattgaagcgttccgctaatcagatgggagtatctgccaaacgtagaccaaaggctcagcccacaactcttgtcctaccacctcagtgagtgatggatttgaaaaattactttagtactgggtgaacttttttactttatacttgtttttgggtagtggaaagttactgttttcttcaaaattccctccctcccttcctttttttgagacggagtcttactttttcaccctggctggaatgcagtggcatgatctcggctcactgcaacctctgccctcccccaccccctcgagttcaagcaattctcgtgtctcagcttcccaagtagctgggattacaagcgcacaccaccatgcccagctaatttttgtatttttagtagagatggggtttcactgtgttggctaggctggtttcgaactcctgacctcaggtgatccacctgcctcggcctcccaaagtgctgggattacaggtatgagctaccacacccggcccagaattatttctttcttttaaaaaggcatctattaggattagaaaccaagcatgatggtaacataatttgcatagatctttgtgaaacagctgtaatgcagtttattttacatattttgtatgtgacttttccacctaggattttaagagacctcacggcttattatttgtttccttatcacattcccaaaggtggtagaatatgagtacagttgtccttattttataaatgagacagctgaggagcacatttggttaagctgcagaccacctagagaacctgctagagctgagattagaataaatgctaggttcattcgttcacatttaaaaatagtaatatatgtgctcttctttttcccattaggaaggataacagatacagtaagcttcacagagcatacagtttaatgattttttcacactcatgtacatccgtgtagccaccacttccagaatcccataagggttcctcctcattgctctctgtctatacctgtgctgccctccttcccaagtttaacaccattctgacttctttaaacagttaatattgcctgtctttgaacttcatttaaacggaatcatgcagtgtcatttttttgtatgagcttcttttcactcaacatcatatgtgttagattcatcctgttgtcctttttctgttgcagtgtagtcttcctttgaatatgccacatttgattcatccacttggttcgttcaacctgttgggttcttttgtattagaagccctagtaggtgagtgcaaaggctcactcagtgatgtggaatgagaaatgtgggcacatcagtccatttcctgtcagtgtgcacactcctctgggagggccagatgcccgagaagcgttccttcgcctgtcctgctcaccccttgtaccttcttctgattacatcctcagttacaaacagcattcttttctagtccaagggagtgttggcatatatgagttgattgtttacctttgctcaaggtctcatttgctgtttggttagcaaatatttattgtacctactctgtgtcaggcatgtttctaggccccaaggatataaacatgggcaggacagacattgtcccatctttgttaagcttttcatttcgggggtgggaggagaccaaacaagcacccctcaacaaattaataaattaacgccataatttgtagttatgcttagtgctaggaagggactacagagtggggtaaggtatgggagtgggggatactgttaaatagggtgatcaaagagggcttctctgaggagccaatatgaggcagagacttgacgaatgaggaggagaaagaccagtgaagagccggggggatcccaaggggtgactgctctggggatcctttctctagctggtggacgttcttatgccaccacttccatgattttcaggctttcttcacagttcacacttgcttccaggataggaggaatgtaaccagccagcctcgacaagtagcttgtgtctgttgcttgcatgcacaggggccatatttttcaaaaagaaggtcactacagggacagctgcttttagtgatgcaagccagagttttgactatttggcagaatgcttcttaagggccattattctatctgttgtttctcatgtgtcgatttggtgattctgcaaatctcaactttcagctctctaaagtctaatgggccttgtaacttgtcattttccctgcatggattgtctactgaggcaagatgtttggcgagaagtaaaagactttctaatggtcccataagactggagccaaaaagtatttgttgctaactctctcttgacaaaagtcagttcttagtccatctgttcaccatttgttaatttgcattggcttgaaacctgtttacaggtgacatgctattgtgaggacacttagaaactattttaggcattagggcaatcaacagactgttctcatgccaaaaaaaaaaaaagagcgagaggtgttcacaactgtcattataaatttataataaatcactcaaaatagtttcaaagagaaaagtggttactgtgtcctaagaatacaacatagaaatgatttcctatacttagtagcctatttcctgtgaaaattgactgctgccttttcacatcattgagctttttgggcttacattatcctggaatccctttatagaactactgtccagtaggcagaagctatatctaaaagacatcaattgcctccccaactcccctttttgtttctttttagaggcatgtttttcctctgtcacccaggctggagtgcagtggtatgatcacagcttactgcagcctcaaactcctgagctcaaatgatcctctcaccttgacctttgaaagtgctgggattatagatgtgagccactgcgtcccgccccattgcacttccactgagcacctactatgtgccactcattatgtttgatgttggctagaaatgcaacacggctgcctgtctaaaaagttttgtttttcttttttaagctaggaaatagaacaataatagtatatacataatgtagattttgaaaaggtaacaaaaacattaaaaaataatgtttttgttatctgaaaaagttattaagattaggatggatattgttctagactttttctgtgcatatgtcatatatagtttttaaaagcaatagtttttttaaagcaataaataggttttaaaagcaaaataatctccaaaaaggagtatattatagtattgttctatttcatatctcaaccttttattgaatatagttgtgacatttaagggagcataatttgatctatggactattcaaatttgcatatcaatatccatcttttggttgtattctatagaagactccttattacaaaatttttttattatactttaagttctagggtacatgtgcacaacctgcaggtttgttacatatgtatacatgtgccatgttggtgtgctgcacccattaactcgtcatttacattaggtatatctcctaatgctatccctccccccttcgcccaccccacaacaggacccggtgtgtgatgttccccctcctgtgtccaagtgttctcattgttcaattcccacttacgagtgacaacatgtggtgtttggttttttgtccttctgatagtttgctgagaatgatggtttccagcttcatccatgtccctacaaaggacatgaactcatcattttttatggctgcatagtattccgtggtgtatatgtgccacattttcttaatccagtctatcattgatggacatttaggttggttccaagtctttgctattgtgaatagtgccacaataaacatatgtttgcatgtgtctttatagcagcatgacttataatcctttgggtatatacccagcaatgggatggctgggtcaaatggtatttctagttctagatccctgaggaatcaccacgctgtcttccacaatggttgaactagtttacagtcccaccaacagtgtaaaagtgttcctatttctccacatcctctccagcacctgttgtttcctgactttttaatgattgccattctaactggtgtgagatggtatgtcattgtggttttgatttgcatttctctgatggccagtgatgatgagcattttttcatgtgtctgttggctgcgtaaatgtcttcttttgagaagtgtctgttcatatccttcacccacttaaatgttagacctaaaaccataaaaaccctagaagaaaacctaggcaataccattcaggacataggcatgggcaaggacttcatgtctaaaacaccagaagcaatggcaacaaagccaaaattgacaaatgggatctaattaaactaaagagcttctgcacagcaaaagaaactaccatcagagtgaacaggcaacctacagaatgggagaaaatttttgcaatctactcatctgacaaagggctaatatccagaatctacaaagaactcaaacaaatttacaagaaaaaacaaccccatcaacaaaatttttattataagcacaacataactataaactaactttttgtcattaagaaaatcctttcaacccccttataaaacaccgaaatcctccaaggttgctatgttaattatctattgcttcataacagattgctctaaaacttagtgctttaacagccatgaacattatctctcacagtttctgtggattaggaatccaggagtggctcgtttgggtggttctggctcagagcctcttgtaaggctgcagtcacctgaggtttggctgggattaggagctccacttgcaaggtggctcactcacatggcaggcaagttggtgctggccgttggcaggagatctcggttcctctccacctaggcctctccgcaggctgcttgaatatcctcatgacatggcttctggctcctccagagccagcaatctaggagaatgagagccaggcagcagccatcctttttatgacctaatctcagaagacacacagcgtcagttctaccccattctgttcatttgcaatgagtcacgaagtttgactggcatgcaaggggaggggatgaggctctcccttttgaagaaagacgtgtcaaagaatttgtggacatatttattttaaaaccatcacatcgcacacaggaacaatggctgagcctgtaaaccccattcacttatttattcagtaaatatttactcagggcctacaaatgcttggttctatgcactgtgctggggattcggagatgaataagatataatcttggtttttgggaagttctgagtagagataggagcaaacaaggagcagagcatcatagcaacatggaccaagttgactgacatgaccttcttccagtgcctgagaaggccacgggcagagtggggagggaggtccacttggggaagcccagccgcccttcaccagatttatctgctgctggctgtgaaggatgggggccttatttcattgagaatgctagatgctttcttgcataggcttacaggattctaaggaaaggttttgtttttaaacggtggaggaaagcagtgaagggctagcgtctgggttcctcacacacctttctctgcaaccctgtgcgtattagtgcagtgatgggtaggtttctgcgtggcttgtgttagcagttggatggcactaaggctgctacagcaaaactactagttctgcccaactgtgcagagagcacaggcgtggcaggaatgcaggagctgtgtacratgtgtttgtttttaaaatgcagggctctaacggtagtctctgaagactcagattcctccctgagctcccataggatgagtgattcatgggattaatgattcatatctttctccccctccaaagaagcttgatagaagataaagatcttgttcatgatgaaagatattttatcacttgttagcgttcagagggcactgatgaagtgacctcacttctaggatttccaaatgctcaaattaaggtttttgcacaaggggtgctatcgtttccgtaaagaggctgagaggctgtgtccactgttgctgtgcaaacattgttgggcttctgagcctcataggattgggatcagcctggagagtggctatatcttatttaattgatctatgagttatatattgagatatctatgtatttattgagagatgtagctrtgtttacctgtgttctatcttagatagcagcctcgattttctaatgcagtgttgtgtgcttttgtgttaacatggaatattgctttcaatcagtatggccaggctgaatggcctagcactcctctgagtttcaacaacttggcctgatgaaatgccagctttcagtaacagcagaggtgactgtgttcatatccagcaaacctagatcttatttaggtttgagggaaaacaaatagtttttcagaaagcttacattgaaaactattacctccatgccctggaagttgtggggacaggcagtttctcttgcattatattatcttccatgaaaagattctgtctgcttgattaagggcatacttgtttcccgggctttgttctctgtggtccctgggggtgagctattcgtgctccaagctaagaacagcccatctacttgctgatggatccctctcacctactcctggccttgtctccattggtctcctttttccgtcctacaccataattatttcccttttctcctgatcattctcattcatagacaaaacatgcttaccctgaaaactgtctcctgtaagaacacacatccatgactgcattctgcctcccagctcccacctcgtgtctctcctctttatagcaaaactcctccaaagggtggattatacttgtctccaatttctctcccaccccaggcaactactgttctgatatctatacttataccttagctttgcctcttctggaacttctgtataagtggagtcatgcagaacataatattttccttctgatttcttctactcaacatgtttttgagattcctttatgttgcatgtatcagcggttggttccattttattgctgaatagtattttttcgatgttctttggagcttactggtgccatttcctcagcgtttgcatttgtttcagtatcttgtaatactttcaagagagagagagtcctcactttgcgtttcgattcttggatgacttgcctctcaggtttgagtaacaataagaccacaaaaacagcatgcagtgacaagtgttgctggaaggaagtgccacccattcaggaggtaacagggataatgacacagcactcacacctagggcttccagtgtttgaacaacagattgcctttggtacggccactgatttggctctgggagtttaactgaaagaggctcattttctgccaccgccttgcacattaattcccaagaagatcattgacttgaaattacacatggtgcttatccagatgattggatcctttccaagatgtgtggtagatgctgtttctgttcttgaaagtcagaggctcatgttgttttttgcttgatgtaaaaccagtgggaatcacagagagcaaagcagcaacttgaatccgtctttggcaatagtgatgcatgaagggggggtgatcgtcattgctgtttaaactgagcaaggcaaacacttgccaggatgaagctcattaaacaagtctcttctcgtagcttcctggccattatatcattatctcttctgttgctcattttgagaccttttttaaggttgttgtttttttttttcctctgccatacaggtataaaactccaggtttctgcagttcgattacaaaaacctggctatagacaccatttacatagtgactgtgagcatgtgtccttgcagggacttgattttcttcttgattacctggggtttgttttgttcctggactcttggtattttgttgagggcagaatttggttatatgctgattcatttatgttaaattcttcaactttgaagggacaggaaccttgaacaagaatatctggcatctctttttattggagttgaatttagtttgcctctgagcaaagtaacagtgaataaaccatgaatgtgatacaaactggttcattgccacaagccttggaaatgcagagcgtttcctcagtctccttttccagggacactgtacaaagggagcaggctggctcaccctgagcttgggctggtgggcagagatgtcgcccggcttaatgtcccacaaaggaaacagagaactttgcagctgtaagtttcctgcgttttggaaaaagtcatcaaaacttgggtagaaatttgctaagtcattctttcccctactggcaagtattaagtaacagtattcatkaaataccacagagaggctatgtaataaagaaataatcctaggcctaggtggcgataactctctagaagagttgaaattgagaatataattaaagattaaaacattgtttgcattctagaacatggagaaatcttttctctccattgcgggaccatattaataaggaggagatcagtttccaataactgacactacctaagctcgtttattaatatcagtcatgtttaagctgtccgactgagacagctgcttttgcctttttcctgcaagaccggagctgtctccaggaatggtgagggataccactcttatcccagatatttatccgtatcaattccatgtcccgagtgtgaataggaatgttttagacagcaagggttacccgtattgggatcttagatggaaaattattcagttgccaaaagagagggatacaatgaatttcaagatttaagatcccaatttcggccagtttttttgcaaaagttaaaagattggtaggaactaggatacctgccaaagttttataattgtggctcatgaacggtcaggagcactatagacattaccaggccaccttgacacggtgacagaaagaaacccttcgtggtcaaatacctggcattcagagctccttgaagccagcgtacactctcagactcacacaggaacagagaaaggccttgcctggttggattgtaaacatttaacggcccaagcactgtttctttctccttctgcttttttgttccatttgccttgaagtagactcagaaggcattttgaggccaagggtatgggatcatcttccttatgtgtgccatctccagtgtcgccttgtcctcattgctctttagagtttctcatstgaggcgtcagagaagtcacacccagtaatagttgctgaaatgtccgtttttatgtatttattttatgtactcctgttattggcaggtagaagaggaaagtgtctctctcagtctgtctttgatgagggaaggaaaaatgtgattcagtgattgggcagaaagaaaccttcagcttcttactcctataaggtttcagttttgtctcttccagggcagttgccactttgtgccccatgttgtgagacttcaactccttgaggactggcgctgcctgtgtctcttttacggcctagtcttgactgtgcactgttggttgaatgaatgagtcctgaaggctcgttcctctgtgtgctgctcacctggctgatgaggctcaaaacatcttttcacagcatgttctggacgtgcgttcctactgcccgtggctcttagtggattggaagtgtaagtgttgggtatttgaatggccgggaaccaggtggaatttggacagacagaaatgcctatgggtagggctctgtagctgcaggtctgtccccagtggcagtggcaacccttcctgcagagtgaggatggatagggttggatctagaggtactggcagcgagcagggccccagagccaggcagaggtcttgcagtgcgctgctacagggagagcaggcccccggggcttgtgagcaggggctgatatgtggaaagtggtatattaggaagattaatcaagtagcagaatgcagataaataagatagtcctttgtaactgtttaaaagataattggttcatgttacttatcttttatcccctctctttgggcaagagaaaaatctctgggagaaataaacgaggaatccctcataaatattaatgcaaaaatctgtctatggagaataaatatagggacattttgttttaaatgctctctgtcgttatgcttcattagcatatatgttgtaaaagttacttttctccccttgagagaaccrtactcagttcaataagccacagactgaaatctgtagcctgtcagggacggaacactttaggcggacaggagaactgattcgctcccctgctgcgtcccggggggtttcctcggttccctcatctttagaagcactggcctgtggcagaaagctaggaggaagtcctggtgggggagagagagaagagagagacagagtgaggagagaatttctgtgtatgtgtgtgtgtgtatgttcactctgaaagcctttatgtactttccacaggccagatgtatgtttgaccacaccgggaatctaaaggtgcagaaagtactactgcatttaaacagaaaattaatgggtttcatttgaagcatgtcaagtttgaggtacccttaaaccttgggtgaaatgatttgatgaaccagattcactttaaaatactccaatccccccttcccaaaagtactgggtggtggggtgtgaaagaggagtatggagaaatagttgctaattggttaaaactgcatgatgagagcgggatactgttcatgagcacagggagggtagaagtctcagagtggatatgttgtgccagcaattgtggagggagaccagaagagcaggcagaggagttggtgacagagccctgccaccccatcccacctatccctgcctccccgtctagccttgctctagccaacccttcaggcccaactgtcacgtgccccttgtggcccttagtgtctggttctgatcctggcctcactctcagctaacctgacytgggtttgtctcagacccatcgtgacatagactaaaatttaaaacccagtgtcttccgtagatactgagtcaaagagaaattgcataaaatagaaaactgtaataaagaacctggccattaagcactaagttgaatgtggcagcctgcagaagcagtctgaaaattatatttcattgcatcctctaattgcatttctcctttacaaggtgattttatccaggaagacagctgtctggtgtggttattacatcactggccattattgggcaaaggaagaaaagaaatgggtggttgtgtagtacagctcatcacatagaagctggatccatttttttttttaaatctctctttgcataacaaagagcttcaggattgttaatayttcacaccatgctgtcccccaactaatgctggttgtaagtgaaactcttttgtttcagatctttctgttctttcttggaatggaaagtaattttaatggtttcttttctttttcttttttyttttttttttgagacagagtctcactcactctgtaccccaggctggggtgcagtggcgtgatcttggctcactgcaacctccacctctcaggttcaaacggttctgctgtgtcaccctctggagtagctgggattacaggcgtgcaccaccgcaccaggacaatttttttgttatttttagtagagacggggtttcaccatgttggttgggctgctcttgaactcctgacctcaagtgatccrcttgcctcagcctcccaaagggctgggattataggcgagagccactgtgcccagccaattttgatggtttcttgatgcttttttctttctgtctctgtgccatatagatttcggcccagaaagcaagtccctggttagggttataagtcatcaagaagcagtaagccagtttctctttcacctgtgttgaagattgcaccagctctcacaggtacagtgacctcagtaacatgagaataggcatgcatgggaagtgggtttgtctcctagcttgagtcttttagggcagaacagattttatcctagttgtaccagtcactctgagagtactcgtttaaaatagatacacaggaattcttaataataacatgaaaaacctgttttcagtgcagattatacttatttctagcttgcggagacrttaaatctctaattttggttagtgtggaaagaactggacattctttgtgtttggaggcagtggtgagggggatgggtactaaaggtgtttctaaacctcagttacgctctgagctcagggcctgctggcccttaggaggagtggtcagggccagtcctcactttagggacatctgacagctgaatagtagtagtagactataatgggctgccaattaaagggactagccagctgatgcagggccacagctttgctctgcaggtaagggggactttggaacaacagtgactcccagccctagctacacattagaatcttacggggagttgtttcagggaagaggcccagtcatccatatttttaagcagctcccrggatgattcctgcatgcagctgagactcagaaccactgctccagaaggggtacgaggattgctccagcgatggaggctctgggccaagagttgtcagagcatctataccgtaagggaaatgagcattgtggggggaatgttggcagagctgacttgctcaaggccacagatgggaacctgctggaatttagaacttagaagaaggtggatcctaactttgttgctgcctcatcagctctggaatgtatctggtatcatcaatgccaatcattttcctgacctcttttagcttattatgctcagatccacagaaaaggataggctggtgatttttttgytttttttcttttgaatatattatttcattttataatagtggtttgatccctctagttaaattggtatctatgactaagcataatgcattgtcatttatgtaaatcagaagtatacagtttaatttattgtgatctgatgtgtattgttttttcctttatagctgtattttttcaggtttatttgaggctacaaaaatataatcaattatacctgtttaaagtatataaattgtgacacatgtatatacctctgaaactatcaccttactcaaacataatcaagacaatgaacatatttcttaccctgaaggttttctcatgcccttttatcattcctttcaccctcaccccaagcaaccagtgatctgctttttgtcactatagtttgcattttctagaagtcatattagaggaactatacagcatatactttttttttctttttttctctttgaggcaggatgttgctttgtcgcccaggctggagtgcagtggtgtgatcatagctcaccgcagctgcaaattcctgggctcaagtgatcctcctgcctcagcctcccaagtagctgagactacaagtgtgtgtcaccacacctgactaatttttaagttttttgtaaagatggcctagcatatactggtttgtttgtttgtttatctggcttttgactaggcgtggtagctcacgcctgtaagctaagcaatttgggaggcagaggcagaaggagcacttgagcccaggagttcaagacaagcctggacaacatagtgagaccccatctctaaaaaaaaaaaaaaaatttttttttaaaatctgacttttctactcagcatagtcattttgagattcatccatattgttgcatgtatcaataggttatttcttattattgctgtatagtattccaccaattggatatactgcagtttgtttatccatttatctgttgatggacaactgggttgttttggctattaataaagccagtatgaacatacatgtacaagtctttgtatggacatgtgctttcatttctcttgggtaaatattgaggagtacaatagctaggtcatatggtaggtgtgtgtttaacttttttaaagatattgccaagttgtttttcaaaaggttgtgtcgtttttaccttcccaccagcagggtatgagagttccagttgctgtgcttccaccagcacttgacattgtccatctttttaatgtttagacattctgactggtatgcagtggtatctcattgtggtttaacatgaatttccgtaatgagtaatggtggtgagcatgttctcatgtgcttatttgccatccgtatatctttggtgaagtgcagaaaaaggctaaggctttttttccatgaagggaaattctgaaaacctgtatttctcaaaagtgattttacttttgatcaaaagtgattttacttttgatcaaaagtgattttacttttgatcaaaagtgattttacttttgagaaatacaggttttcagaatttcctttcatggctttgaaaatgccttaatgtagagcctgtcttagattgattttgtactgattgattggtgagcgtcctttggacacccactgtctgctcatcattccactagttgctgtgaggagttcagaggaaacagtagttgtgggctggaacaccaacaagtccaaacactccaagttttgcttaagtatttcatggtgtttcttaaccttgtcacctcctttcctgtacagatgtgatagctgtggggctggagttggtgctggtgacaggcttttaattagtttgtcctgattttttattttcttttggtagaaaaacttatctttgaagcactgaagtctagattcttgctcttctttatctgtaattgttattttattggcactatgctttttattcatttttgcaattcagtaaataaaatctaatatctacagtgtttggtgctggtattcagtgatgaataaccttcccttaaggagcttgcaatgtaccttggggaccagcaaagaggccttttggatccagaagaaggcctttcttctggggtcaatgccagggtgacccccattgtcctgttcatctttgtcccttagaaaccttgtctttaacccttcrgtaaccacaccaagagacttttccagacttgggtctcacatgaaacttacaaaagacctagtctctgacattgatggacacatcatgataggacaggaccggctttgggaactttttcgtggacccggcccatagatagacttcattatggatggttgagcygaaacttctcctcaccttccaactctctcttaccctgctatgttttggggctccggcaaagatattcccaggtatgtcttttaaaggaatggaactctttctttgcagcttcaggtccccacacagggagttcgatttgctgggtacttaatgtccccggagaagaaaccttggggcatcacagtgttccaaaggtttccttagaagtctctcacagtcttaaatttttgtttcatgttttatcagctccttaaactagcatgaatcccaggcacagtagctctagaaagctgtcctttccctatttgacaggtaacaaaatagatttagatttttttttttttggtggacttgggcactgtggaaaaaataaaacaattgaaattaagtaaatacattaagtaaatcaaagccaccaatttccttttccctccttcttcctgtcagttaacatggacgtgcctcccaagtgtggcttgtacaggacctgactttacacatcaaatgtggggctaggattggtttktacagacctcaccccaccattctttttccttattaatactttttacactttttaattttaaacaaaggagcacttagaatttaaaggtctcctatgaccaattaattcagtgcagtttattgagtaggcatttagacggtagatggaatttccgtcacccctaaggaacctctgacatcgttgggtagtrtttagagcgtcatgaaaacccagacctggaagagccagaaggcatctcctttctaccctcatttcatagtgaaggaaataaggatgcagataagtgaagcatttttctccagtgagttctgagacttttcagtaacagatccaggcctggaacttcttggtttcccgctcctataatgctcccactgatcatctaccactgtcttcccttcttggaggataggaagtgaccaatggaggaggaaggaaaaaaaaaaaggatattaaaaatgtgtcttttttttttttaagatgatgcttttgagtggtattatagaatcactaccctgttttgctgttcgtagctctccccaagtgcgctccttccctttttgtttctgagacttgcgtgtgaacctcgcccattccttctggttctttgcaaatggaggggatggtttcagcactcgtgtactaagaattagagctttctgctttggtgctctgtggccctggaactctgccctgttagcagtgctttttggcagagcagcaagactttatcagccagtgggaacagatatttctgttctacaaatgagcccagatttatagactcagagttcaaagaaattagatgagagatcaccaaccaaagcagtctgcagtgagggaaggaacaccatcggactggttaataatgaaagccaccgcatagagcactcatgtagtttgaacgctgtcctttgagaggtaccgttacttgcctcagctttacagaggccaacaccgaagctcccaccttgtctggaggcccccagctaggaagtgctgggactggaattcaaacctgggcacagagaacccggaatctgtatgtctcagctgtagtacaaggcagaggattaggttctcaggaagcagaggttgagttggaattgggctgcaatatatttattagggatcaccccctgtgaaagaaagtgggaggaagcaggactgctgggggagatggcagcctacagtgcagggstggcaacgcctcggtcaacccaggggatctctgcagcagggttacctgccttgtcctgtgttggccaaaagtctgggcctttgtacccctgcctcactcagtcaccatatgcaggtggctccaggaaggctgtgacctcggtgagatagctgtctgcagcagaggctgaccctgaacatgccgatagctggaggctgtatgtcgatcgctgtcctgtagccagacagcaggttcttcctggaagaggatctgccattgcatctccttgtctaccctgatcttcatcagctgtgatactattactagatggctaagctccagcatgctggaagttaattctttattctccggaagcggcagatttgtacaacctttcaacatgataagataagggcttacagaggagaaaaacttggcttttaattttaattttattttttacaatgaatacccactgttaaactacagttgacccttaacacagcgttaggggtacccatcccccaccatagtcaaaaatgtgcgtgacttttgactccccaaaagcttaactactaatagccttaccaatggcatagttgattaacacatattttgtaggttgtatgcattacatactgtattcttacaataaaatatctagagaaaagaatatgtcattaagaaaatcataaggaagtgaaaaaatatttactgttcattaagtggaagtggatcctcataaaggtcttcatcctcatggtcttcatgttgagtagagtaaggaggaggaggttggtcttgctgtctcaggagtggcagaggtggaagaaaatctcaatatttaagtggacctgtgtggttcaaactcatgttgttcaagggccaactgtgctgtgttcttcactgccagacacttatgtatcactgcgtctccctgtcttctcagctatcctgtgttgctcagttctacttctacaattctactacgtacatttgaggagctgcccctccaggagtccagtggggcctcccttcctgagggagagcttagaagcttcgtgggatcaagatcaactatagcctccacctctgcagttagtctcgttctctctctcctttgacatccattccagatttggctcacccttagctgtgacctctgccggctccagtggctcccatagtggcaagacccagcacttcatccctggcaggtctgagcccctcatcactgtgcctttctcaggccagagttgctatgtcttcattcacggtcaaaatcgagcaagggagtatccaggggtacccaggctccacaatatttgtctctgcttccattgtgtaacagcagcccctgcttcttacgagcagaaccaatttggcaagatggtgactcttctttttgactactggtccctagaccaggagcccaaagtgcccaggtggcagccatagcttataatgcagtgagatccctgctattcccaggcaaaagtatggggatccagacttgggctttgcagaccaggatctctaactctgcaaagcccagagttctggaagggggatgcttgaagtctaccatgggatatcaggaattatggagtgtagaggacactcctgcttcctccccttgactcccagacccaagtattcttcctattaggggagagcaccataaaaaggtctttgattcagtgcatatactgcatcctggaggatggtaccccataccccatctttgctgagtagtgtctccaagctggtgcttcagctgtgccttcagcaggctagaccacatctgctgggtggtagtatgtgatgtgatcaatgaattccatgatcatgggcctactacagaaaggggtttccttgatttgatataatattatgtgggatccagtgctgttggttcaaagattgtcactaagcccttggatggtggtgctgactcaggccctgtgagtcagaagggcaaacccttagttggaaggcgtgtctatttctgttggacaaatatctggccttccaagatagaaggagtccattaacttgcaccacgttgatggttgtgctccttgaggaatagtgccattttgggaacttgatgatggtctctgtcattggtagatgggttattttttggcattagcaactagatcagctttaataagtgcamgtccatgctgttgggtccgtttctgtcactgtggccactttattcatgggtctatcatgctaacaatgggatggctgatgtcaactggttgggtcacttttctgcttggttgtttaatgccttttccatggtgggtgatgacatgtgacacaaagcttttccacccttcgtgtcccctccccatatgcccatgtacatgtccatacctcatactttcttgtcctgactttccaatctttttccttctaggaccttgacaatctgagcagaccactcactgctgcccatgagtcttcctgtagtctagccttgagctgctgcttttcccatataaagggcactgcttgaagccctacttcttgggaggcttttccctcacagctgtcttttctgtcaccccgagtgagtttgtaatgcagctgccatggatttttggcttttacccacatgccagagtgacctgtctgtaaaccaagcttggacacttcccccttcctccgtatgctcatgtaggattcccccaggcaaccacaggcatgagctggggagggccactgggactactgtgatgggtgttatatattataacaaagggcaagagaacttgccctaagtcagaactctaagtgtatattgtctatttcatggaaatatgaactgttcctgagtcttgtttttgactgggatagaaaaaaaggcattcactaaatcagtgatggctttgtatgacctgaggccatattgttctgctctagcaaagatgccacatctgataccatggtggcaatcagggctccctgcctgattgagctcgcagaggtctgcagtcctccaggattcatctggtttctgcagggggcaggctggtaaatgaaacagacgtaaagtgggaccactgccccctgcgtcctttagatccttccaggtggcactaatctctgccattgccctgggatgcaatattggtttttaatgcagtattgggggtgggggaggcagtgcagaagcagggtgtatcagagacttccattcggccttccctactctggtagatcttaccccatagaccaaggacctaatgtggttgtagaaattgtcaaatacaataagttctcatttagcatcatcgataggttcctgggaattgcgacttgaagcaaaacaatgtataacaaggctaattttaccctaggctaattgaaataacaagagttaagttcctacagcaaaacatcaccaaacttctaaattaagaccaaaacacttctgatattaaacattgaagtaaatgtgagctatacatacatttaagaaagattaatagaaacaagataattatttacctgcttgttccatttcagggccttgggtggctggcagctatcccagcagcttagggtgccaggcagaaaccaaccctggacaggacgccatcccatcacagggcacactcacacacacccgctcagactgggacaatttagacataccagttcacctaacgtgcatgtctttgggatgtaggaggaaatcagagtgtacggagaagacccacacagacatggggagagcctgcagaccccacacagacagtggccccagctgggaatggattttttttcctgtcatcgatgttaatgaaatgtgttgaacaaaacattatttgaggacctgctgtatgttggtctcagttagtcatgatgagatgggtctgtggacccagtggatggatccactgtaaactagaccttggccagggctccatttattacctgctccccatgtgcccccactcggaacgggggcatcctgaagcctcaggtctctgagaatcagtgttaactctaagaagtggctctctgcagctgacgctgactctgcgtgagctgacagctggagcccacgtgttgactgtcctcccacagctgggtagcattcctgagggggagctgagcaggcgtctctgtgtctcccaccctctttcgtcctcagctgtgatactgttgctgtatggctaagatcaagaatacctgtattcatttctcccccttcccctagtattctttttggtacagcctttcaacatggtaaataagggtctgtaaggaaaaacttgaattttttwaaaaaaaaaaacatgaataacaactgatgttaaactatggtgttatttatccagcagatttaggtaaggcacggtggtagactctagaaatacagagagcccttgttctcaggaatttacagtcaagctggggatttggaacatcctgcatatgaaaataaagatgcataggctaaacaaacaggttctggagtgagatttcttgggcttgmaccccgggtcacccatgccccatatgtgtgcctttgggcatcttattcaacccctctcaccattagtcttctcatttgtcaaatggggataataatggaatgagagtaccgtgtttgtgatacagcgatcactcagtaagtgctagctgcttgtgtattataattattgttgtttagagtggcagtagtatgtcccagctgaatattgtgggtggtgagtttctcagggattccagcaaggggcaaggaggaaggcttatggggcagatgggctctgaagagttatcttttgtatgaatatgtgcattcctctttaaaagtaggtactgggccaggtgcagtggctcatacctgtaacccagctctttgagaggccaaggcgggaggattgcttgaggccaggagttcaaaagtagctgggtcaatgtagttagatccccatctctacaaaaatttttttaaaaaatagcagggtgtggtggcacgtgcctatagtcccagctactcgggagcctgaggagggaggatcctttgagcccaggaggtcgaggttgcagtgagctgtgatcacgccactgcactccatccagcctgggcaacagagtgagactcccatctcaacgaatgaatgaatgaaggtaccaaaagaggtgcagtatcgacagatgggaattttgtagatttttatccccgtttgaattgagatgttttccatgttcacatctcaaagattctgttaatggtgaaagaaatgataacaaggctttcctttcctttttttctcattggttcaaactgagataaaattatgtcacctataatcaacattgatattttccactgtgtacacacactctcatatttcttacacgtggaaggacattgttttcttaacaaataatatgggaattgggcaatgaaggataataaaatgtcctaacagatgtcaccaggtgaacttacacaaagttcattttgggtaaatgtcttggttattaataattcatgtggctgagcgcggtggctcacgtctctaatcccagcactttgggaggctgaggcaggcagatcacgaggtcaggagatcgagaccatcctggctaacgtggtaaaaccccatctctactaaagatacaaaaacttagccgggcatggtggcgctcgcctgtaatcccagctactcgggaggctgaggcaggagaatcgcttgaacctgggaggtggaggttgcagtgagcggagattgcgccactgcactccagcctgggcaacagagcgagactccgtctaaaataaataaataaacaaacaaataaataaatgattgatatctccaagacactgaaaactattagttccttcctaaaccttcgaagaaaaattaaatttcatgctatatattttgtgttgagtttcatagtattttaattttgaaaattgtttatttatgtatgttaagtgtggtgccttaaaacaggaaattagattaaaaatatcacagctttatgagaggacagatcatttacagagctcagtaaagatttgcctgttacagtgattgagtttggttcacatctttgtagggtgtgggcagggataattgctaaaggtatttttcttgcttctaatagtgggatgaaaaatagaggctttgaatttctacagcaactaatgaaattagaatgttcctatctattttctaaggaattcctggcttggttagagaatatagaaataataactctgctttaaaattaagttctgagcagttgtatctgagagtatttctctctcacaggtgcatttaggtccctgatggcacttgcattttttgaaacgcagctgtactttaacatagcaagtgtctgttgttttgtatggctgcctcaaagatatttgggtacaagtagcagctatgagaaaccgtcaaggttgtcttggaagggaaaacaggctcttgttttagtgctctcagttatgttttaaaagacaggacttgctatgctccactctttagcatagctagtcctgtctttcagcaagaaccccgcagatttctcattgtaccctacccctgtaatgccagttacattgattaatgaattgactacaagtgttatggatttcccgttgcatatctgattaatgcatagtgttatgtgcccttgactatgaggagagaatactgttcctggtgatttgcatagaggtgggccatgggattattgcgagccgcagtcctccaggaggtgcagttcagccacagctgctgcactaatgggaatcctagatctggtcagaacccacgttcctgggacaagactggttttcaggatgtggagcatggagtcaagggtgaactgagagaccacatcctcctggggtgacactgaaatcattggccaggtggggtgtgcaagcaacccacaggtccaaaaggactggatcagtggttctgaacgttttatttgaggatgctccataaacactctgggatgactgcagaatgagtgttctgagtactcytccaggcactagggatctgggcctgcacaacaaaacaaatccctgccctcatggcagtgatagtttttgtgaacawgtaaatagtgtgtgcaatttcaggaccccaggacaaggacctcagagttggtcagagagagacaattcaggtagaggctcataggtaaaacagaggatgaaggaatgttccagaggggttgactcctcggagcatcactaaattgatggagatgagcctcaggtatttattacatggtatctttgggctcaatcatgggaagaaaaagcattgttaagggccctgacccttcgcagacaagactggagctggactttgaaggaagcaaagactttcagcaaacagagaagctgtggggaagcagtggtgggggtgggccagggaagcaccgtctgggaaggatctaaagtggggcaggttctgtgtgcgggggaaccatagtgaacagcccaggtggtgtgtaagctgcagtataggagggtagtggctgaatttggaatgccttggttgcaagctgaagttagattttaactagtacatagtcagtagcaaggtattttgagcaaggctctgctgkcccagtgacttgccaggtagatacattgcttcctaacggcaggtgtttgagtacagctatatcatagctgtaggttataggcgaattgatagtgatgccaggatttgcattgttcctttttttttttttaagtatgtttatgtggaggggagggatacatgaaacaggatggcaacatggataattgctggagctggctcacaaaagtttattgtatggttctctctactcttgggtatgttcgaacatttccataatagagttaaattaaaaataatacaactggtttcacaacagtgtgaatctacttaataccagtgaactgcatgtttaaaaatggtgaagatggtaactgttttatgtgttttttaaacaatttttaaaaatggttaggatggtaaatattatgttacagatattttaccacaattaaaaaatacatagcttacctacaaagggggtaatcagaccctgtccagcagccacagaacctattgccgaagcctctcaagacacgttttcatggaataaaaggttaggagaaatcctaggctcctgctgtggtcctgaaagggaagttctaggcaaaatattagaaccagacctgtttcctagcttgttttctaagaggaatcctgaatagtgggatcctttcaaagtgttataaataaaagcgttcttttctagcattcaccagccacttatataatgctataatccttagtttcttcatctacaaatagggataataatatttataccttatagtagttacagagtttaagtgagataatgaatattttaaaatctagcaccatttctctctccacacttctgaagatcctccttcagaactaggtttgcctagatgacaggttggtaggtgcagcaagccaccatggcagtcgtgtacctrtggaacaaacctacatgttctgcacttggttaaagtaaaattaaaaaaagaactaggtttgtaaagtacagttgatctttgaacaatgcaggggttgttcaccctcgcgcagccaaaaatccacatgtaacttttaacttcccacaaatttaactgctaatagtctactgttctactgttgaccagaagcttttctgataacaaaaacagtcaattagctgggcacagtggtgcatgcctgttatcccagttccttgggagaccaaagggggaaggttgagcccaggagttagagaccagcctgggcaatgtaagaagaccctggtctctcccccaatccccccgcaaaaaaaagcaaagtagttgattaacacatattttgtatgttatatgtattatattactgtgttcttacaataaagtaagccagagaaaataaaatgttactaagaaaatcataaggaagtggaaatacatctactattcattcagtggaaatggatcctcataaaagccttcatccgcattgtcttcatgttgaggagcaaggaggggttggtcttgctgcctgtggggtagcagaggcagaagaaaatctgagtataagtggactcatgcggttcaaaccctcgttgttcaagggtcagctataaatggcttctttttttttattttttcaaatggcaagagccagaataaatggctcctttaatgaataggtaccactgatacattaataactattcctttgtagacaagcatggctaagtagctaacaaaaactatttctcaatatcatgttgttttctgaaattaaaaagattgagtagccactatgctataggaaattttgaaaaaggcaaaagagctcacaattttaggtttttaataccatgattttacttattgactgttgtatttacggaagtgatttttgtagctcacatttttaaaaactgtaaacctaaaaatcgcctaaaccagtccttgtcttaatggacacagactgtggctttttcagacagtttttgctgcattggaccttggagcacactctctttgtggaactggagactctgaggcccagggagggccagccgccccaactaagagaggaaccgggggccatccccagtgtcctgattcctacttgactgctttccccactgccccagtagaattaatgaggttttcttgtacccattccagcagggagaggaccagtttcacgcataattcttcatgactgcccatagcattttaattgcctgttattgcgtcaaaatattgtcctcctgacagctaagataatgtaaatagaaagcaagaggagacagaaaattgaggaaatttgcaagaaaataagaatgcctttgaaataccttaaagactgacttaatatcatttgaataaccgtttgatctcttgcattgccaggtgtgattatttagtgggaggtagtgatttctttaagacagactctatttagaatgaagtttctctcagttttatgcagctttggaaagagctcaagatcctgcttgtccacattcccaccgctccccctccccgcattgagtaaatgactccgctttgctactttagggacacaccacatcgcatgagacttctgacccttctcatctccacatctacagatactctggaggctttatgttagatggcagagttaccccagattctgaaatcttcctgttcatacacttagtaaaagaaacaaaaaagaagttaaaactagtaaaagatgcaccagcattagtcagtcacaggaagggacttaacctctttgagaacgtgcagcaagggaagttatcacagaagattacagttccacagctgtcatttaataccaggaggcagtggagcagtgcaaaatttgggggaaagtttgacccaataattttatactgaaccaagttatgtagaaagatagtagtattytaaaaaaaaaaaaaaaaaaaaaaaaaaaaaaatccatgaactcaaggaaaggcccatgagtctttctttaaaaaactactcagtgacaaaatgcagtgagtcaagggatcaacgaagtcagttcattcattcagcaaatatttattgactgcctgttacgtgccaaaccctgtttgagacactggggatgtaacgattcattagcttacattctgatgagaaatggtgaagtgagtggtctgtttaaataaacagccaaggccaagtaattgtcaggaataatatttcagaaggtaaatacagtcatgcatcattaggctcttccatcattgtgcaaacatatatttacaaaaacctaaatggtagaacccacggcacacctaggctataaggtgtagcctgttactcctaggctacaaacctctacagcatggtaccatagtgagtactaaaggcagtgtaagacaatggtaagtatttatgtatctaaacatacctaagcatagtaaatgtatagtaaaaatactgtataaaaggtaaaaaaaaatggagctgtgtgcagtggctcatgcctgtaatcccagtacttgggaggctgaggtgggaagattacctgaggccaggaattcaaaaccagcctgggcgacatagcaagaccctgcctctataacaaacaaaccaaaaagaaagataaaaaatggtacacccggacaggaacttcaccatgcatggagcttgcaggactacaggttgctctgggtgagtcagtgagccatggtgagtgaatgtgaaggtgtagggcattactatacactgctgtagactttacagacactgtacactcaagctacactaaatctgtaagaacattttttcttccgtaataaattagccttactttttcactttataaacttttacattttgttaactttttgattcttttgttatgacgtttaccttaaaacaaatacattgtacaactgtacaaaaggattttctttatattcttattctgtaaagcttttttctattttttatttttgttttattttatttatttttttcttactttttaaacttttttgctaaaaccaaagacacaaatgcacacattagcctaggcctacacagggtcaggatcatctgtatcagagtcttccaccttcacattttgtcccagtggaaggtcttcaaaggcagtaacacacagagctgtcatctcctatgataacaatgccttcttctggatccctcctgaaggacctgcctgaggatgttttacagtcaactgtttttaataagtagaagtagtatatgctaaaaaaaaaaaacaattaaaattatagtacagtaaattcataaaccagtaacagtcatttattatcattatcaagcactctgtactatacataattgtataggctgtgcttctatgtgacaggcagtgcagtaggtttgttgacaccagcttaaacacaaacacatgagtaatgtgttgtgctgtgactttaccatggctactatgtgataggaattttccagcttcattataatcttatgggaccactgtcatatatgcggtctcaccaaaacactgttatgcgacacttgactgtgttataaaacatgggaatgcaaaaatattcacaaagcacatagaatgaggagattgggatgacaaattttctcatcttatttgggagcaggagatatatctaaacattaagaaatagaggttttagtgtattatgtaaaatttgaaagaaaattcttaaaaagcactaaaaagaaaggggatgccagagtcttgaagaaaacagtaaagacttagagtccgcaaagcaaaaggcaaagaaccaaagcaagcatccagagcaggacacatgaaataagacataaaagaagataaaacaaaacagtctcataagaccaccaaattaggccacacacctgcaatatcaataaataccaatgagataaatatctactacaggaaaaagactcagattgtccccaaaattaaaccctgctatgtacaacataaaacagctgttagacaaagacagatcctgtatttctaactaaaagaaaactggacttgtaatagaaatactagataaggttgagctcaaggcatatggtataaatggctgcaaagagaagctttataaggacagaatgtaagtccacagtgaggccataacaggtcagtcccaggctcaaaataccagcataaatgtataaatgtcaggaagcgccaggagaaacagggactgtgactcacctcaggagttcacagcagaccagcaagatggaaaatcagagaagcatgtggaagatttaaatactttctccttattgtagtttttagctgaaatgacacctcctcagagggaccttccctgactacccaatctaaagtagcttccccagtcactttgtatcatacacctttttaagatctctgtagcgctctgttccgctgttctcttatgggtgtattatgttgtgttttgttttgttatttggcccaaatccctgtgaaggagggaccctgtttgttctggtgactgctgtaaccccagtgcctagaacagtgcctggcaaacaagtcgatcttgagttcatagtcatctgagtgcctgctaaatggcaggcactgttctaggagccctgagcacttgagtgaacagactcctgcccttgtggtgcttacattctagtggagaatatggaagacaaacaatcagaagtcatgtacagaatgtgaggaggtgattagtgctatcggggaaagtggggcggatgtgaagagccaggagagctgggcctgtgggaggtgggcagcgactttaaaaagaacggtcagggaaactgccttgaaatggtgacatctgagcaaatgtggggagggagttagctgtgtaggtctctagggtaggtgtcccagacagagcaacacagaggatggggaacagtgacataagggggtaaagacaagttgaggccgtgaacaccaaggcttggacttactcttgagacgagaggtcagaaagtggctctgatcaaatacagctggatcagttggagctgcatgaggaatttcacctgatatgtgacctggagccaagctactatcatggctggttttgccttgttgtgtaatgtaaacaatagttcttgttttgtaaattgttttgaggggtatagtatgtgctaatttcaattattaagatatccatttagaacatttattagcacagatgaattcggttatttcaaatatagaagcaaaatattgtgtagaatgaaaatatgagatataattagactattagtgaaaacacctacctctgcatgattgaaaatgaaaggttgtctcaaaagtatagtgctaaatatttacatatctgcctgaaatgcacatttttagatgctaaaaatattcattgttaatgattggatgggaagactaggtttaatatagtaatacgcttccatacatttgtctctcaccaaagtcaaagccaattttgtaaagtattacaggagcctttgaaataggggctactgctgaaataaaaggaccctcttccctatttagtgacagaaagtttgcagaatgacaaaacactgagaaagtttgcttggcaggttagccatcattaaagttttttgtgcatgtcttaaaattttccttctaaagtgtggtgttcttgaaatgtgaagagtaagttttattgaatccagtaacaggagccatgcagtgagggaaaatccatggtagctttcttcatgaaaagatctggcccaggtgactttaatccttttcctcatctgtaaaatggggataaaaataaaacttacatgattgtaaagagagaggaagcatagaaagtggttagtattatgcctgggacaaaataagtgctcattaattacatgaggcacttctgagtgtcaygagtcagaaagtgtggtctgtggatcagcagcatggtctcctgggaacttgctgaaactcagtcacagatcctcctgaatgcgaatctacattttaacaaaatcctcaggtggtgaatatcattacagttggaaaaacattgactagagcagtgattggcaaaccaaggcccactagcctactacccgtttctgyaaacagagttttattgagcacagccatgcgcattcatttccatattacatatggctgcttttgtactacagttggagatgcacagaggtcaggcattgcggcagatcctgtagccagaaaagctgacaatatttactccctgggccttcaagaagatgtctgttggtccccaatttagaggaccacctctagtgtcccaccgactgggttcaaatccacctccccatcagtagctgtggaccaagttacttgtgtgctgttttcccatctgtaaaatggggataacagtatctgcttcatgggtagtcatgagaataaatgaggccatacatgttgaatcatttatcgtctgcctcatagcaaaccatgacaaaacttggctacttacaacaaaacattttatttactcacgattgtgtagtctggtctggcccagctgggtgattctactcctgatcttgtcagtgatcattcagggagttgtattcagttgtgtggttggttgggagctgattctctttccctgtagcctcagagcccctccctctccrtgtggcctctgcacgtgatctcttgagcagaagagctggacttcttaggtggcagttcagggttcccaagagtgcgaaagcaaaagctgccaagcattcttggggcttaggcctggaactgacaccatgtcaattctgccatgttttattgtttaaagcaagtcacaagactgtcccagactcaaggggaggagactccacaagggcataaatactgggaagtgttccaccggggaccatgagtgaaacagactaccaacgtggaagaacatgggaagtgcatgataagtggtatctaccacttctgctactgctgctgatagaaacatatacatggcgggctggacgtcaggggagggtctggggtagtaagtgcctttccctaggtgctttcctcctgactggagtcccttttcttaccctgtctaccacttcaaaataaagtaggaagaaaatggagtcagttgtcaaatctggttggaaattggaggactgtttttgttagagagtgcgttgcctccttggccgccgtgtgccccctctccctgagctccgcttgctggcttggggtagcagtgtgatgactgggtgacagggctgactatagcctcctgccccatctcctggctttgctctgcaattgtgttgacgtggtaagttgccttcctgctattgcggatgcacaccagcttcaacggcccaggctgttgtaaattatatgagccctttctgctcctcctcctcttttggactagcagtcccttctcctgggaatagttgaggaaggaagaactgtacagcttgcctcagttaggattggttctcacaaatggccacattttaaaataaactgagagaggaattttggatcatctgtgcattttcttatgtgtttgacttcttcacgatcagagatcgtattttagtttcatttgagcacatgggcccagattccatggggctttacacatgtcttacgccagttttgaaggaaaacgtctttagccatcaccctgtgcaaaaatcagaaggatatgatttattgtaatttagccaagacaaatagtggttttccttaaaacttgtaacaattgctgtgaatgagcaaatgtttatacaaggtgtgaaagtaagtttcatatagtcacaaaatgtgcttctagccaacagctctgaaatcatatttatattttgggtaacaatttcagtggtgttctttgttgcaattaggagtcctgctgcttcaagaaatgataccatcatccagatttagctcttgataaagaaagctatactgaattttttttgtgtgtgtgaaaacctggagtttaatccttgctttaaagatgtgcaaattctgtcaaaaatttggggtgactgaaactcttcctccagggttttatttcctaatctgctccattgaactgtttcttcactaacaagaaattcaactgtgtctatgctgcctgctgtctgctgcaggaagtgtcagaattcattgaactaagaaggctctctggagcagcagtgaagtggttaaagcgtgacatttttgtaccttttttttttttttaaatgggactagtcaggctcatgtttccatacagtttttccagcaaacagtcaaagcccgttttaaaacagttttcaagaagggcagaatccataaaatgatggaatattgtgcgtttatttttaggaactaattgggaagcataactgtcttctgtcaaatgcttcctgataagtgaagagtgatgtattattttgtaccccttacctttttgccctaaggtcccatttgttttatggaaagacaaagtgcagacacatgaaatagcatgctgtgtccgtgaggggtgcctgccagtctgttttcagctctcgcgaatactagaatctctcaatcactgaagccttctgctgattgcacaatagtctttgttttagcatcagaatccggtgtgttctgaatgtgaggaaaaattttgcctggtccagcatttgatttttaatgaacttggtggctggtttatttttaaggcagttcagtgcttagagcaactgctcttattaaatagcacctcactttcctccctctcccccccgccmcccgcctcccattttcccattgtaagcttttatacatacgtgtgtgtgtacatgtgcatgtgtatgtggcactataatatatacacacatatatacacacacacatatattaccttcccccatcccccaagaaataacaattttcttgttagaggtatatctgtgcttttggcaattcatagaccaaaagccatttaaagaaacagttaaggtttgagcttaagttctgaattgaaaatgtatacagttttattatgctttaaataaaaaattaaaatgttaatttaggcaaaccaagtagcctaaggaaagaagtcccatagaatctcgagggtgagttctctccagccagccagccagccagccagccagccagccatcttgttttcaggtgccactctacaaggagttagcatggactagtagacagaacccatccaaggtaaggaatattttggcataagtggctttgccactgagcagatgtccttatggagatgtcacatttctaaaatgtaaactctccattcctaaaatgggggagtttaattaagagtgattccttcattctttattcaatgccatatttcattgagcacctgccatattccaggccctctgcaaggcggatggcagatagcattaagaccaggctccctaggtgatctagtttcagtactaaaatccagattgggttattgtggggttttttttttttttttttggaacagcttttaatatttagtagcaaataagtagtgtgacttagttagaaaaacaaaatgtttgctcagatctatcatatgctcctaatacagaaaggaagatacataagcgttggttacattctctaatctgcttaaaacgagattgcagagatactctggatcttacctgatttcattcattggttgtgctgatgctgttctttaaaatggtgaggcaaagagggaggtgttaggtcccatatttgacctagattgggtctgctgcctccagctatgtgcctcgggagagccagataatgtccagggagctcccaaggcccaaggcatgggtgagagggaaaaagaaaaaggcaagtgatgccaagtgacacccatcatctctgcggttcatcacttgcctgtacaagcttgtgcaccaaattgtcaccaggtagttgtagctaatcttatgtatgtaaagatgataattcatttctttacataaagggctcttccctgacataatttttagggctttgtagtataaaggaagagcaaggaaagtgggagaaagggtagggatgatctagccatattatagacagcarggaaattttctttgctccaagttctgtacatacacaattgaaacctgaataaaacgccctcttgcgatggtttctccagctctgcagttgttctgaagagtagtgtgtttcagcccatttggatccagtgcagaatggtacaaggttaaatgtcagggcagagtgaaaccatgcttggacagtcatttttcttaagagttttttttgttgttgttgttgttttaactttttaatggagaacttcaaatgtccacacacatagaacactgaaataaactcatatggactccggcatccatcagatccttatgctatttcaaagcaaatctaagatatcatttaatccataagcatttcactatggacctctaaagtttcaagatacataaagtgtaaagactttcaagaaacaaaaccataatactattatcccacctaaaataaaactaataatagttctgtaatgtcagctgtctagtcagtttataaatttctggttgtttcataggtgtcataatttttttaagcagtttgtttgaattgggatccaaataaaatccacttcttgattgatatgtcttttgtgtctttttaagtgtatgtatatataatttttccttccacatctccctttttttccccctgaaattttgtcgctgaagacaccaagttgttttccatagtctggattttgctgacttcatctccttggtttcgttaaacatgtgtctgtgcttggtctatactgtagatttggtggctgggtgaagatgcttgatcagagtcatgtttgatttgcttgtttgttttcacaaggctgcttcatcgatggtattgtgttctagcaggaggcacaaaatgtctggttgtctctctttttgatgacgttagctgccgcttatgctcagtgtccacattcctcagggtgcagggaggtgatatagtcatgccatcttcccggttcatctatcagctggaacacgtctacaaagacaaacttccccatctcaaacaatttggttgctctgtggtataacttttacaggacaggcagagtaaatgcttgattggtttctttgtgttctagttttcagaatagagctggttgtctagcacccctcaacaatgaccaatttacttattttctaattattcttgaaatgaacataacaattatttttggctaggaccattcatttttgcaatgacctaagccctttacatgaaccaagagcagccccaggctattggggtgctgctgtttgcactgcattccagaaccccctccagagagaccaggacacagctctcagggaggggaagatctcttcacagccagccgcagagcagagtggtccacgccacccagagagttgactgggaacaagggctgtgttggagaaatcaaatcagattgccctaacgatggttttcaaggagtcggacactccttaacaatcatgcagaccaacttactcttacagacaaggaaaatgaggcccagaaatattgtctaaggctgcagtagtaatgacaagtggtaactagagcctgaattttctcactttcagttcagtactacttcccacaaaccaggctttgacctgactgcctttggttccagagccgccacttccttatttggctgccacctggctgctctatgatggtcaccattctgctctgcgtaggggcttcaggcagagaatgtggcacacgcggagttcctgaagaagcaacttttgaatacggttccaggaatcatgattggaataacgagtggctgaagggttaactggactggtgactggctggcttggcagggccataaaaaattctgttcaagttcatccttgtaactgacatcaaagtagtacagctgctactagagccccaattagtgcttttcctgtttaaatggggctcctgcaagtagaatcttgaaataaccgtgttgtgatcagggtttgggagagcagaaagggggaaggcctcttttaattatagtgttcttaaagcgtaatgatctgtttttcagtctttcctgattagataatagtgttgtagattagagacaggaccagcttagtttactgctgtattcatttatttggttggatgtcttttggtagctattttcgtaatcattgtaaacagtttatatttacagattttcttaaagcaaatgaggaagtagttggtcaaaagttcagtttgtcaaggaagaaacaagactttgtagatatttctttgctaacttccctaaattacctgccttttcctggcagtatttgtttaaattcattggcaaggcctatttgtaatgggagattggattagtaataacatttgctcttcacatttggttacaggacctgcactcagggtcctgggaataatcctatcactcatctcagtaataagataacctactaataatacacccactgcccagtgactgtttttattgttattttcttggcctttgattttaagagcataacttatcagctgattaggataatggagaggataattgaatctccagcattgcagcattttgctggggtatgctttgatgcctggattgagtaagagaccagagtctgggttcattctgggctttcttgatttagccaggtgaccttgggctcacctgactttagttcaccgccattttttcccttataattaccaggagttggattaagcaagtcccgaggtgtctttgaactcctctgtatgatacagctctggtccacacacaaccttctctttcctggagatgacacttgttgcctctgtcagtccttctctctgtgcccttacagcccttcgtggaaaactgcctacctcacaccccatggcctttgatcacagaccctgctaaatggaggacaggaaagggaatgagtatgtcctagagaatcaaacaaagctgacagagaaggacagagagatgctgcttagatttctgacagtccctcagtttgtagttcctctcccttggagagctggcagaattcctgatgtttgaatctgtgaggacatttgggtgtcctgccagtgaaaccccacatccttttttactcaacttagttttagtgggttcctgttctttgcagccagttgatcctgatgacatcttctgtatcctcataatgcattgtgtttctccatcgttcctttctcatcagttattacatatttgcgttactctgcttctctaagccgttaactctttgagggcagggattgtgtcttcttcatctttgctcccccagcgctaatggcagtataggaatgtggtcaatggtggtcaaaagaatgaatgactggaccactgctgcttaaaacaaaattaaaacaaggaaactaacccagcgagatgatattcactgaaaattgatgaagcttgttcatttagaagcagaaacaagatgagaactcaggacttacctactgtccttgcttctgcccttgtctgttgaggtgtgagtaagcaacgaactgttcagcaagatgaaaggaatagtaacttggtctggatgacctactagccaaattcctacatattcttcataacacagagagttgactgtttgcaatttttaagaagtaggtgaacttctcatagtggaggtacaatgctaagctgctatttatttgattataaaattggagatacattccttttgaaaaagactggctctaagatgtaatttgagtattctccmaatcacatatttaaaggaaaaagagataaataacagcaactaaaacaagttttacaaatgactacaaagtaattatgtttcttttcgtggctttttgctttggcttaaaggtcagcatgaaaacagatgagagttaaacttagaactgagcatatcaggtagagaatcacttaggttccatcgaacacccactaccagccaagtttttgggtttactggtcttaaaaaaagatatatgcccttctgaactgagggaaagaagggggagatgtaggaaaacactgaggaagtgacagcaaatgaggtaactggtgaaagtgacagatggaggatactcactggaatacagctggagtgacaagagcacatccaaagtcctgcctaacaggtgagttgggaggaaagtttacagtcaaagtcaagtataaccctccaccacattcttctctcccgtgttccacatttcaggcaaatgaacaaaggaggcccctgtgagtgtaaaacagtccagactcctgatttctgtccccagctctgtctkacccactcctcttctttgggcaggtcatttctctccgggcctgagtttccttactttttaaatgagagaattaaactttgcaatctccaaggccccttctcactctgaaaacactatctacatagtcagatataatcacacatccccagtgtcctgggatcrttaaaagttcagtctactaacagaactgtgtggtaagaatggtaatgaggttgctggtcagtctgacacaggagcctcagggattcctacttgatctgtatatccgttaagcctggtaccttcttctgcaagtatcagaaaccctgcaactgactaacttaaactaacttaacagtagaactaatttaactaaccgaaacaggacaatgcatttataacaagacagtttattataaaaagaaattccaaggtgagggcagcactagggtgaactgcagtcaactctgagatgtcaccacctgtaagatgtgccctggtactatgttccactaaggaaggaaaatctctgccagttacatgatgacatactgcagcttagaaaacacatctgatttcagagattaataaatgtggagggaaatgtatcttagaatccagtaggccgggcacggtggctcacgcctgtaatcccagcactttgggaggccaaggcgggtggatcactaggtcaggagatcaagaccatcccggctatggtgaaacccgtctctattaaaaaaaaaaaaaaatagaaaaaatcagccgygcgtggtggcggccacctatagtcccagctacttgggaggctgaggcaggagaatggtgtgaacccgggaggtggagcttacagtgagccaagatcacgccactgcactacagcctgggcaacagagcaagactccgtctcgaagaaaaaagaatccagtaatacagtaattcagtagctcaaggatgtcatctttgtaaactgctgttcttcctcyggctgctcccttgatggctgcaagacggctgcagcccgtccagtcagacaagacaaagccaagtcccaggtaactctgcctctagaatcgcttgaacccaggaggcggaggttgtagtgagccgagatcgcgctactgcactccagcctggtgacagagtgagactctatctcaaaaaaaaaaaaaaaaaaagaaaagaaaaagaaaaaaagaaaagggaagcctcttccagaagccctgcggccgatttcttcatgtctcattggccagaatggtcacacatcacatgcatgcctgttggcatcccagtcattgccaaggacccagagttatcctggaggggatagtgtcaacctgctcaggatccctacagctggggataggcccttccctgaaaggggataattgtcacaggcagggttttgttcataaggaggaaagagggaatggacagggaactattaaagcaagaaagtgtactagaaagttaaaaagaaaaagaaaagaaaaaagtgtactagaaagtttataatttcttctaggtaggaattggtgacaggaagatggttcatgattaatgtcagttatcttcctgctctgagcatttgagtgtttgaaattttcttgtattgcttccctcatttataaattctgtgatagtaattactttctgcattttaatatagagaggtacatactcagttttggaaatagttgggtttacaggtgcacaccatcacacctggctaattttttgtatttttagttgagatggggtttcaccatgttggccagggtggtctcaaactgctgacctcagatgacccacccgtgtcagcctccctgttgttggttttctgaacaggactgatggggcaaactctgtaggttactctgtgttgggattagcctttttggtataacagttcttttccatgaatgttaccaggggtcttcttgaccttgttcccatgaaagcattacccctacctgagtctctcttcattcagcccagggacttggagagttcaggagagaagcgggacaattggagtcaaagatttaatactcattcattcattcattggacatttactaaacgtgaatgtatacagggctgagtgctagattctgggtggcagggacataccacctgagactttagtgtggcttttgaagaatttcttgctggaggttacatttgctgtctactgccttaggatatttctttgctttgtccatcaactgcatgtgtctgtctctatttatagtgcagaacctctgaagaatagcatttggtgtaagaataagtgagcaaaacctgcctgctcaagctattattttttttttggtaaatctaaaagacactattttgtattggggacttgctccaactgtaaattggaatatgaaatttgacctcactttccatgtagggaaaaggaatagatcgttttagtactcattcctccagaaagatctgaaataaatattcattgcttcaaacctctcatatttgaaacctgtatgttctaatcacaacaaatccgattagaagctgtctgtactagaattaagagggatagagggaggcaaacagaaagtgccaacatagatttttttttgagagagagtagttagccttgcagtaaaatcccttctgtcagttgcctgtgtagtctgcaagcttatcactgtaatatctatatggaagagtgacctcagtgaccacacatgtaagtcagacttctgaaatggtttaaatctgatagtgcttttgaaattcccttttagagatgcagactcctttgtatagagataaaccatagaaaactgcaaagttttcctctcatttctgggaaaaggattaaaatcagacaggtaattaagactggaatccaaaaataaatgtctgttttcctcacctccccgccccccactcccagtctagcccacaagcaatatctctagattacatctcaagtcctgctcttctccccgtcaccactaacggggcccaggtccgggccaccctcttttggcacttggggtccggccaaggtctcctcactggactctgcttctactctggcctctacataaagcagccagagcaacatttcacgacataggtttaattttgcccctaattgttaaacccctcagtggcttctcatcacattcgcgataaattccaaactcctcttattgctggtctgcaaaggcttccatgatctggcccctcctggctccgctgcctcatcgccttccacctccctctctctccccctgtccttgctaagcttcttcgctgttccgggaaatctccaagtttgagcccacctgtgcctcagcactttctgttccttctgccagctgtgctctcttcacagtgtgtcaggtgtccttcttcccagcatgctttttcattattaaagttttaaagtccataaaagtagaatgggaaaatgaactcccatgggataatcccccaaatcccaaatcaccaacatttggctgtgttttctttatctatcctttgtttctttcttttttgcttttgcttttttgttgttgctactggaatgttttcaagcaaatcccttgtgtcatgtcattctacccccgaacacttgtttctgcaaaataaggacattcactgttataatcacaatgccattatcacatgtaacataattagtgattccttcatatcatcaatactctgcctgtattcgtatttccctacttgtctaaaaatgcctttttacagtttgttttttatcaggatccaaacgaactccacatgatctgtttggtgtttgtcttctctactgttctcctcctagcctccatttatcttgctgtgctttctgtgatgtctctttgctcttatgtctcttttaatttggtctttatttctaacattgttttccttcacattttactgagttttgccagttctcatttcgcatgttcttcttgtccagccatctcgcttctgagaacgtctattcctgatttgtgctgttttttcaaagyagcagttagttgtttccttaatttctttcagctcagtttgaaataattggttacagttttcaccggcttgtggtccctgtttcgtggtgtggactgtcctgttcgggttcaccttgttttctcttgtagtactgggtgtagtgtttctgtgttggccccgtggagggctcttccgtggagagagcatggtagccagggcggcctcctggcctcagtgaggacgaaggtactgggtacctgtctgcactctgtggctgtcctggccttcaggtgctgtgctggtggccctgccaggccctggacagcccaccctccttccactccgggcgtcccgccggctttgtttgagttctgctcccagccacgtgtccacagaagaggagctgcttttctgagtggaggttcgctgggtggttctgcagccccttggtgacccttttgtaagggtttgtgggcatctgcatgcacaccctcagaggaccttgcccaatttgcttgctgttcacagacccacttgtcaaggctcccgctgcagggccctgttatggagatgagtatctcctggagatcttgggatcttgtggcactagggcaggtcatttgtcctctttcacctccctcctatgcccccacccccccccagccctccagcctcatggctgctgatgctgggtggtgctgcccacctatatgctgtggatcatggggagttctttaaatctggctttactgaagagttcattcagctctcaatattatagctgctttgtctggtttcccaggaggagatttagagagattccaaaattatgctggctccatcagatgagaggtnnnnnnnnnnnnnnnnnnnntgcctcagggccttcctgacccctccagtagccactctcatgcgctgccctctcaagcctctgagctctgtgtgtggcgcacatcaccccggtacctgctcttcatccttgcagtctgccagggccatctggctccctctccaatccctcttgggctagaatagcagcggcctagtataaatgatgggcacaacgggcttatcctcccttgccaccaagaaactgggaaacttttcccaaaagctctcaacctctttattatgattatgttaccctgaaatatgagtaaaagaaaaatctttttctaaaatgttacgagagcacttaatgtacaaaatgcaagaagaaacctccattgaagatgtttaaaatagtaatgaaatatacactgaatcaaccgtcaccaaaaactaaaaatccaggctcaccctgtcccagcaaagaggactgatatcttggtttctgtctttcctttatggagtccctgatatctaagactgagtaaacaatctctagatcagcagtccctaacctttttggcaccaggggctggttcgtgaaagatactatttccatggacagaaggtgtggggggcaggagcggggggtggtttcaggatgattcaagcacgttacgttcattgtgcgctttatttcatttctattatcattacattgtcatatataataaaataattacataactcatcataatgtaggattaatgggagccctgagcttattttcctgcaactagacagtcccatctagggctgatgagaggcagtgacagatcatcaggcatttgattctcataaggagcgtgcaagctagatccctcgcatgcgcagttcacaatcaggttcacactcctgtgagaatctaaggcggctgctgagctgacaggaggtggagctcagtaatgtgagcaataaggagcgactgtaaatacagatgaagctttgctcgctcgcccaccactcacctcctgctgtgcggcccagttcctaacaggctcagactggtacccgtctgtggcccaggggttggagactcctgctctagattcacaaatacaatgttttcaagtgtttccattagggagtcctgtaaaataatgggaagaaagatggacttagagccagaaacaaagcaagattcttgtcccatctctgccccttagtaatgatgcaaccttgggcctatctctgcatgcaccagggtttctactgtcagtaaaagaagagggttgggtccctttcacctcgtagtactacgattttttttttttttttttttttgagacagggtctctctcttgcctaggctggagtgcagtggtgtgatctaggctcactgcagcctcaacctcctgggctcaagtgatgcttccacctcagcctcccaagtagctgggaccacaggcatgcaaaaccatgcccagctaatttttgtactttttgtaaagatgaagtcttactatgttgtccagactggtctcgaacctcggggttcaagcaatccctcctaccttggcattccagagtggtgggattacaggcatgcgccaccgtgcctggtctcaacattcttataagcataaatatcttttagcttaagacccattctaattcctgagtataagaatcatgaggccgggggtggtggctcacgcctgtaatcacagtgctttgggaggccaaagcgagcggatcatgaggtcaggagatcaagaccatcctggctaacacggtgaaaccccgtctctactaaaaaaaatacaaaaaattagctgggcatggtggtggatgcctgtagtcccagctaatcaggaggctgaggcaggagaatggcgtgaacccaggagacggagcttgcagtgagccaagatgcgccactgcactacagcctgggcggcagagcgagactccgtctcaaaaaaaaaaaaaaaaaaatcatgagaggctgggcacagtggctcacgcctgtaatcccaacactttgggaggccgaatcacctgaggagggcggatcacctgaggtcgggagtttgagaccagcctgaccaacatgaagaaacctcgtctctactaaaaaaaaaaaaaaaatacaaaattagctgggcttggtggtgcatgcctgtcatcccagctacttagaaggctgaagcaggagaattgcttgaacccgggaggccgaggttgcagtgagctgagatcgtgccattgcactccagcctgggcaacaagagcgaaactccatctcaaaacttaaaaaaaaaaaaaaaagattcatgagaggaaagtgttttctgagctggagactctgccgtaagtgcaacctgataatgaaagcagaagtaatcactttaaaatctatacttcagtttaattttaaaattatccatttgcaagtagccattgagcattttttgttgattcacagtggtggtgtcatgggggatacatttaagagagatttattgggaaggtacagttccgaaaattgtaccatgcatttctgaaaattttgaattaacacccacaaattggaatggcctagagtttatattttgaataaacttatggcatatttattcaagcacaaagatttttgtacagagtaaagaacagtgtaagaaagtattcaattactgatagaacattaatgatagctactgcatatcaagcacatatcatatgctagaccctgtgccaagcacattacatgcatggttatttagcgatgctgtgagtgaaatagtattgttcctctttatcagatgaagaaactgagatacaagaaagttaatgccacacagctagtgaagagtgaagatggtcatagctctggtgagcatccagatagtacttgctacgtgctagagtccaagtactctgcatttttttagtcattgagtcttccagaattcctgtgaggttgatattattaggtattttttgtaaaggaggaaactgaagcacagagaggttaagtgacttggctagggtcacatagctagctcaggtcctgccagagcaaggacttgaacttgggcactgaagcgtcgggagtccgggtccttgtccactagatcatgccacccagcatcagtatagtgactgacagactccaaagctcttgctttcaaccatttcattaaaagtgatactagaagagtacaagggatcctaagtaaagacattttaaacttgttgttttttatgttagggataacattgggtttttagccatatagcatgtaacctgaaattcagcacaaataaagcttcctcttgcctggtctgtgaaatcttgagtttagggaccattagtggaaatacacttccttttccttttccctttcctttccctttttttttttttttttttttttttttttgtgacagggtctggctcttttgcctgggctggagtgcagtggcacaattatggcttactgcagccctcctgggatcaagtgatcctcctgtcccagccttctgagtagctgggactacaggcacatgccaccatgcctggcaaatcagttgcttttggttttgttttgttttttttttttttttaaagaaacaggctctcactgtgtttcccagactgatctcgaatgcctggcctcaagcaatcctcccacctcagcctttcaaagtgctggaattacaggtgtgagccaccacccctggccaaaatgcagtctttattcttaggcgtcagaccatactgcaaggtggaagtcctctctgggatgcgcatggttgcgagcactaaagactcccgggtctctgaaggtcacctgctgtcttgctgatgcttggttactttccaatggtgcgttatattttgcaaaacaatactctgaaaaagtgttaatttaaaaagagaattcccagcgggtggtggtggtgatacaggtctaaagttagtgacatgtttttatcaaaaatttgaaataacatttatcaagaaaggggaacagcctagggtctgttaagtggaatcctttattttttgttcaagaaaaagtgaggtgatgccttgcaacataaggtatcccaggactttaatcgacatgtagactcctaagaggcaaagccagactttcatctcactcagctctgctgtggtgtcaccagagagccggtggctctgaaccataagtgacagagaaggaccaagagcaacagatccagcatcactgcctctccttgtggttattgagctgatctcttggaaagtctttagtggcttttcaacttgaaaagaacagatttgaaataaataaattgatccattaacctgttacaggaaggttcccactgtgctgagtacccccaaatcatctctgataaggttgactaagccacactctaatagatttcagagtagtatgtggaccgtaaaatgaccattaaccagcttgctttgttcatgagagtcaggcacttaatgccatggcctcgcgctagaagcacattccactgtggtatgtttcaactctgtgaagtcattgatcagatgaaaatgaccagttagcaagtaagtgtttcctgggctgtaggctttatgaataatgtgnnnnnnnnnnnnnnnnnnnnnnnnnnnnnnnnnnnnnnnnnnnnnnnnnnnnnnnnnnnnnnnnnnnnnnnnnnnnnnnnnnnnnnnnnnnnnnnnnnnnnnnnnnnnnnnnnnnnnnnnnnnnnnnnnnnnnnnnnnnnnnnnnnnnnnnnnnnnnnnnnnnnnnnnnnnnnnnnnnnnnnnnnnnnnnnnnnnnnnnnnnnnnnnnnnnnnnnnnnnnnnnnnnnnnnnnnnnnnnnnnnnnnnnnnnnnnnnnnnnnnnnnnnnnnnnnnnnnnnnnnnnnnnnnnnnnnnnnnnnnnnnnnnnnnnnnnnnnnnnnnnnnnnnnnnnnnnnnnnnnnnnnnnnnnnnnnnnnnnnnnnnnnnnnnnnnnnnnnnnnnnnnnnnnnnnnnnnnnnnnnnnnnnnnnnnnnnnnnnnnnnnnnnnnnnnnnnnnnnnnnnnnnnnnnnnnnnnnnnnnnnnnnnnnnnnnnnnnnnnnnnnnnnnnnnnnnnnnnnnnnnnnnnnnnnnnnnnnnnnnnnnnnnnnnnnnnnnnnnnnnnnnnnnnnnnnnnnnnnnnnnnnnnnnnnnnnnnnnnnnnnnnnnnnnnnnnnnnnnnnnnnnnnnnnnnnnnnnnnnnnnnnnnnnnnnnnnnnnnnnnnnnnnnnnnnnnnnnnnnnnnnnnnnnnnnnnnnnnnnnnnnnnnnnnnnnnnnnnnnnnnnnnnnnnnnnnnnnnnnnnnnnnnnnnnnnnnnnnnnnnnnnnnnnnnnnnnnnnnnnnnnnnnnnnnnnnnnnnnnnnnnnnnnnnnnnnnnnnnnnnnnnnnnnnnnnnnnnnnnnnnnnnnnnnnnnnnnnnnnnnnnnnnnnnnnnnnnnnnnnnnnnnnnnnnnnnnnnnnnnnnnnnnnnnnnnnnnnnnnnnnnnnnnnnnnnnnnnnnnnnnnnnnnnnnnnnnnnnnnnnnnnnnnnnnnnnnnnnnnnnnnnnnnnnnnnnnnnnnnnnnnnnnnnnnnnnnnnnnnnnnnnnnnnnnnnnnnnnnnnnnnnnnnnnnnnnnnnnnnnnnnnnnnnnnnnnnnnnnnnnnnnnnnnnnnnnnnnnnnnnnnnnnnnnnnnnnnnnnnnnnnnnnnnnnnnnnnnnnnnnnnnnnnnnnnnnnnnnnnnnnnnnnnnnnnnnnnnnnnnnnnnnnnnnnnnnnnnnnnnnnnnnnnnnnnnnnnnnnnnnnnnnnnnnnnnnnnnnnnnnnnnnnnnnnnnnnnnnnnnnnnnnnnnnnnnnnnnnnnnnnnnnnnnnnnnnnnnnnnnnnnnnnnnnnnnnnnnnnnnnnnnnnnnnnnnnnnnnnnnnnnnnnnnnnnnnnnnnnnnnnnnnnnnnnnnnnnnnnnnnnnnnnnnnnnnnnnnnnnnnnnnnnnnnnnnnnnnnnnnnnnnnnnnnnnnnnnnnnnnnnnnnnnnnnnnnnnnnnnnnnnnnnnnnnnnnnnnnnnnnnnnnnnnnnnnnnnnnnnnnnnnnnnnnnnnnnnnnnnnnnnnnnnnnnnnnnnnnnnnnnnnnnnnnnnnnnnnnnnnnnnnnnnnnnnnnnnnnnnnnnnnnnnnnnnnnnnnnnnnnnnnnnnnnnnnnnnnnnnnnnnnnnnnnnnnnnnnnnnnnnnnnnnnnnnnnnnnnnnnnnnnnnnnnnnnnnnnnnnnnnnnnnnnnnnnnnnnnnnnnnnnnnnnnnnnnnnnnnnnnnnnnnnnnnnnnnnnnnnnnnnnnnnnnnnnnnnnnnnnnnnnnnnnnnnnnnnnnnnnnnnnnnnnnnnnnnnnnnnnnnnnnnnnnnnnnnnnnnnnnnnnnnnnnnnnnnnnnnnnnnnnnnnnnnnnnnnnnnnnnnnnnnnnnnnnnnnnnnnnnnnnnnnnnnnnnnnnnnnnnnnnnnnnnnnnnnnnnnnnnnnnnnnnnnnnnnnnnnnnnnnnnnnnnnnnnnnnnnnnnnnnnnnnnnnnnnnnnnnnnnnnnnnnnnnnnnnnnnnnnnnnnnnnnnnnnnnnnnnnnnnnnnnnnnnnnnnnnnnnnnnnnnnnnnnnnnnnnnnnnnnnnnnnnnnnnnnnnnnnnnnnnnnnnnnnnnnnnnnnnnnnnnnnnnnnnnnnnnnnnnnnnnnnnnnnnnnnnnnnnnnnnnnnnnnnnnnnnnnnnnnnnnnnnnnnnnnnnnnnnnnnnnnnnnnnnnnnnnnnnnnnnnnnnnnnnnnnnnnnnnnnnnnnnnnnnnnnnnnnnnnnnnnnnnnnnnnnnnnnnnnnnnnnnnnnnnnnnnnnnnnnnnnnnnnnnnnnnnnnnnnnnnnnnnnnnnnnnnnnnnnnnnnnnnnnnnnnnnnnnnnnnnnnnnnnnnnnnnnnnnnnnnnnnnnnnnnnnnnnnnnnnnnnnnnnnnnnnnnnnnnnnnnnnnnnnnnnnnnnnnnnnnnnnnnnnnnnnnnnnnnnnnnnnnnnnnnnnnnnnnnnnnnnnnnnnnnnnnnnnnnnnnnnnnnnnnnnnnnnnnnnnnnnnnnnnnnnnnnnnnnnnnnnnnnnnnnnnnnnnnnnnnnnnnnnnnnnnnnnnnnnnnnnnnnnnnnnnnnnnnnnnnnnnnnnnnnnnnnnnnnnnnnnnnnnnnnnnnnnnnnnnnnnnnnnnnnnnnnnnnnnnnnnnnnnnnnnnnnnnnnnnnnnnnnnnnnnnnnnnnnnnnnnnnnnnnnnnnnnnnnnnnnnnnnnnnnnnnnnnnnnnnnnnnnnnnnnnnnnnnnnnnnnnnnnnnnnnnnnnnnnnnnnnnnnnnnnnngtgcaactacaatcttcattttatgaatgaggaaactgatgctcagagtgattaattacttccccaggttcactggagcccatatttttaaccctttcagcttctataccaccttctccactctcctcacaatcagatcagtacttactctgggtgggtagtcaacatcatagaagggcacactcacttattcactattcattttttaacccccgtaataaattggaacgcagtcaagaaccaagaagtatggagaggaggcctaaccgaaagtgctgttatgggtttcccatactgtcaaagaccctctcacaaagcccattttctccgggttgtcagggtaacgaatttggaaacatgcagcrcacatactaacaacagctaggagccaatgcttatataacaagagaggagatggacagaactataaatataaagcacaggagccgatgctcataacattcacaaaagttaagttgttttctcgttaggaataaatgtaagtatatctttgttttaaaaagatactcataaaaatagaaaaaattaagcgtaggcattcgaagagataggcatgaaggatctgaaacctttgctaatgagaaagggcacattctccagcagtggtggacaaatgaggggaggctggggcactgagcctggctccttacagctgttagtgtcataaatacttttgccatgatataggtgtctcccttgttcccatcttcttctgcttgctgcttctgggggctttaaaaattttcatgtttaagttagggggcctgccactttaagctagtcacacttgaaatatatcccttgaaattatctaaacttaatttctggccattttgtttcagaaatgctaacctcagggggtctttgttctctacgctaaaacttaatctgtttggaacaattccatttcctctctgtagaaattgactggccatggctcctgtgaatgatacggttgctattatccctgaacactgtaaaaatgaactttgaaacagttgggtaggacccaaacagaaaatgatgtatggcttggaaatagtttagctgaacattatgctttaatattttactggccattgcagcacaggtttagaaatttatgttcggctttttaaagttttatttttatattagaaactttcttgcaaaccaaaatagatgaatcaagtgtatttgaatcaatgctgaaatgtcgtccacatctgtggaatgaaaatcattagccagttacttaaaattcagataaaatgaaaccatcttactatgaacttcatccagctttcctcttcactaaaggaaagaatgccaagaatatttacaaaaatttatttaacaggattactgttttattccaaaagatttaaagaaaataccaaaacagatactaattgagcataaaatagcacccagccgggatggagttgagtatgtccaagcatccactttaaacacaaactcatgatttcttgaatctgtgtttgaaaatagatcaagctttctcaaaacctagtgggataatttcgattacatgtaaactatgaccagaatttattgctggaaaagtaagagtggatcagaatataatactcctatcacaaaaaaaaaaaatcacacgccaggcacaatggctcacacctgtagtcccagcattttgggaggctgaggtgggtggatcacttgagcccaggaattcaagagcaacctggacaacatggtgaaaccctgtctctaccaaaaaaatacaaaaattagctgggtgtggtggcacatgcctgtaatgccagctactcaggaggctgaagtgggaggatgacttgagcctggaaggcggaggttgcagtgagttgtgattgtgcctctgcagtccagcctgggtgacagagtcagaccccgtctcaaaaataaatacataaataacagtggaaacttttctccatgtggctgtaagagtatcttaaatctgccttttggaagagtttattggttcacaatgcttatcagtagccacattttaaatgtctctatctcagactagtgtatgggggaaagaaaacattcagaaggatctgagttccagtcccagctttgcctaccactagatagaagtctttaaaccagtcagctagcctgtccatcgagtaacaaatttagactagctatcctctcagttgtcttctgtctccaggattatatgattcctttggagattatcattataattcttaaatctatcaacttttggaatatatttccaaacatggattgattcactgaagtgcctttcacttcatggagaaaatagcgctaagggtgcacagcacatattgtcatctttcagagagagagagagcagaagaaggctttttagctgtagagtgtttagggcccctgtggatatggccaggctgtgctaccctaagtgggaagggactgtagaaagcagcgcctccccagcatgaggctccttcgctagttcacgaaagcagcggttctgtcctgtgccctgctgccttcatcaggccttgaaacacagaggccaatggtcagccattatttacagtggaaatctggaaaaacactatttcccagggctgtcagcggaccctcagaaccttcatgaagatgatgaaaagtttccaagtcctgctgatactcatactacagctaatcaagtgtaaatgctttacgttgtttaacaacagaaaacatgctatactgttctgaactcaacaaagaaagaaacctttgaattaaggctgaaaaatatcagagagcatttcaggcagggaaaaaatcctgttctgtgtttgggatgtgattacccagagccgccgcccagacagcttcaagcttctgtctctgaaacaagcagccattgtgttgccttcttgcctgctgcgacatatgccacgtgcgggccatttttacgggcatgtgatgggtttcagtgtcaagactgttgcccagtgggcaaaaccctcacttactttggagggttaaaaatgttgataagcaagagctcagcctccttgttttcgtacccatttagatcagcagagacctctctaatgacactcttctccagtttccctgagctgtggcaggaataattccactcataatgaggcaggtgtccagctttaaccctgcatgcctctacaggcggtcatttcttcgactctcctggcagcctctcctctgctagcattcttcccattgttacgttttgcctaatatttaacctcagtgtttcctgctgtcactctgtcttattattctcatcgactgaggataattgatctgtcttcactcagcaacttccatttgcatgttttaggagtrgctgtgtcatctcatctcttattttgtggtagacactctccccttgttgttaaggctttgtatacctgtgttcaaagggattactggctgtattcatcttctgtacatacgctccaatttgtcatccctcattattattcatgttggtactacacgtgtttttaccaaaatggaatgattatctcccattttacatgtaatcctttatattaacacaattctaagcagttgactttaacgctgttgcattgttgactcattcacagtgtgattcactacagtctctgtcaagacaaaggtgagatctgagtgagagagactctttgctggatcattatgagccacgtccctagctcttgaactgtacccactcaaatatttcttgtgtgcacgagcgcacacacacaccccacttcacaagtcagagcgtcaagctacagccttcatggggtaggtgcatatggtgatatttggagcattaaacggagtgattgatacgacacaactgaatctgagttacagctgcatctgttaattgtaacagatctcctgtttacaagagtgggtgtctgaaatttaagaattcgaagacctgcatgcttatattcctggcttctatttctaaagccgttgacatttaagtaaataattgtttttatctgttctattctgagatcctcaagtgaaagacagatgaggtatgtgccctttaattacacatgccctctgagcatcctacacagccacattagggcagcctactcagctacagcaaatattcatttgtgaactgtagtgttcctgtaaatttccttgattacaaaatttgtttcctggggttcttgttaaaatactcatctttagtcctcaggcttagttgcaatagttccttctagttacaagtttcttcagaaatttctagtaatgggcccccctagatagtggcaaagaacacgtattttatgccagaatggtacttggaattgttctgctgttatatactgatagatttcactgaaatctatcaagcataatagattccagttattcccagaggttaagaaatagggtattctgattaatttgagttttctggaataattaccgtatgtaccattcaaagatggacagtctttataactgtataattgcttctttgtgcatgtagtaagctttaggaaatgtgtatcgaactgactagagctggaaggacccttagagattaccttgtctaaagaagaggaaaccgaagccagagggctgggtgatttgcccgctgtggccctctgtacaaggaggagggccaggatggaatctagacttttccagagcggcgccaggattttttcagctgattacactgccctatatgctttgggttaaggtgaggtggtggagaaaactgtggcaaaagacccagttacttggattctgggtcagagttcaatgtactgagtnnnnnnnnnnnnnnnnnnnnnnnnnnnnnnnnnnnnnnnnnnnnnnnnnnnnnnnnnnnnnnnnnnnnnnnnnnnnnnnnnnnnnnnnnnnnnnnnnnnnnnnnnnnnnnnnnnnnnnnnnnnnnnnnnnnnnnnnnnnnnnnnnnnnnnnnnnnnnnnnnnnnnnnnnnnnnnnnnnnnnnnnatgatctaaactacagcactgtcttcctgttttattaattgttcccattcaacatgaaaagaattttctatccaaaaattgttttgagggaaatatcttacttcagtagtaatgtacaggtttaaatatgtcaaaaatgttttctctattcaaacacatgtgaaactcttaatagtccagacaggcaaataaagagccaaagggcttcacaggatgaggttgtcctgctgaaattctgctcagcacgtggagtctgcgtctcctctccagctatctctgaacacgttcacgtccattttcacccaggtcgtagctgtaaagaccggtcacaggctcagatgggaatgcagcaatgattataaaaccaagcttggtgcctgagtctttcaggactgtagtttcaacaggcacaggtgatacagcagctgctgaacctcatctggtttggcaccacggtgggagctgatggcctccctagcactgacacagcctgcagagcaaagcaacctgagttctcatcacctgagtccctaggrgatcctgtctcttgccttgtctaaccaagacttattaaaaaccacttaatttggccgggtgcagtggctcacgcctgtaatcccaacattttgggaggctgaggcaggtggatcacgaagtcaggagttcgagaccagcctgaccaacatagtgaaaccttgtctctactaaaaatacaaaaaaattagccaggcacggtggcgcrygcctgtaatcccagctactcaagaggctgaggcaggagaatcgctagaactcgggaggcggaggtgtgcagtgagctgagatcgcgccattgcactccagcctgggcaacagagcaagactccatctcaaaaaaaaaaaaaaccccactgaatttgactctcatcctattaatatttgagattagtgctgagaattcaatgcatgttccragcatgttttaaaaaatcaacttgaagtataacttacataaaataaaatataccagttttatgtattttatgtttatgaatgtacagttcaatgagttttgacaaatatatgcatctatgtaaatatcaccccaaataagataggataatcaccccagaaatttcttcatgctccaccccagtcatctgccccctcccagtctgcactccaggcagactctggtctcctctctgtcactctagattaaatgtgtcttttttttctttctttttttttttttttaaatagagacagggtcgtcttgaattcctgggctcaagcaatcctcccaccttgacctcctaaagtgctaggattacagacgtgaaccattaagcccagccagatgtgtcttttgagagttcatatatggtgcatggaagcatgttttgtgtcccagctgcttttgctcagcataggttctcaagattcattcaagttgttcaggcattgtatattctttttattatggagtagtatttcattgtatggatataccacaatgtgtttaatctgttcacctgtttacagacatgtgggttgttttagttttgggggtaataaaaataaaactggaccaggcacatggtctgtagctcatgctacattgtaatcccaatgctttgggaggccaaagggggaggctcgcttgagctcaagtgttcaagatcagcctgggcaacatagagagaccttacctctactaaaaataaaaaaaattagttggacatggtggcacacacctgtagtcccagctactcaggaggctgaggcggagggattgcttgtgcccgggagattgcagctacagtgagctatgatcacatcaccgcacactccagcctgagcaacaccctgtctccaaaaaaaaaaaagaataaaagaataaaactgctatgagcatttgtgtacaagtgtttgtgtagatataacattttacttttcttgggcaaatatctaggagtggaattcttgaatcttatgttgtatgtgtatatttacctctataagaaactgctaaacagctttccaaagttgttctgccactttgtactcctaccggcagcgaatgcgacgtctccttgctctgcatcctcaccgacatttcatattgccagttcttgttattttagccattctagtgcaggccaagtacattttgcattttcctttgattattgatgttgagcctccttttaggtgcttactggcctgaagattggcatgtccttgttacaaagtaagtatctgttcagatcttttgccctcttctagtcctactctgctgaaagtgtgtatgtgtttttttttttttaatcatcaattgggtgttgaattttgtcaaacgttttttctgcatttattgaggtgatcaaatgattttcctttattttaatatggtaagttacatggcatggattgatttttaaaaaattcttattaagtacacataacagataatttaaccacttttaaatgttacaattcagtggcattaagtacattcactttttttttttttttttgaggcggagtctcactctgtcacccagctggagtgcagtggcgtgatctcggctcactgcaactgctgccttctgggttcaagcaattcttgtgcctcagcctcctgagtagctggaattayaggcgcctgccatcatgcttggctaatatttgtatttttagtagagatggggtttcgccatgttggccaggctggtctcagactcctgacctcaggtgatctgcccgcctcggcctcccgaagtgcatttacatttttgtgcagccatcaccgccattcatcttcagaactcttcatcttgcaaaactaaaactgtgcccactaactgtaacttccaattcccactccaccatctcctggcagccaccattcwactttctgtctctatggatttgacctctgtawgtatatcctaaaagtggaatcagacagtatttatttttttctgacttagcgtaatttccccaaggttcatacctttagcaggtgtcagagtaatatttcatggtatggctagaacacagcatgggttgatttttgaatgttagtccaattttgcatttctggaatacacttgatcatgatatattatcttttttatatattgctggattctatttgctaatattttattaaggaattttgtatctttgttcatggaagagtattgtctataactttctttttcttttgtagtgtctttctctagtttcagtatcaggataatgcttgatccattaaatgagttgagaaatattttttctctgttttctgaatttccatatgattgatactatttcttccctagatagttgatagatttaactgagggatctgtgtgggtctggagttttcttcatgggaagatttttaataacaaattcacttttagcaaaatagatgtaaagctttttagatgtttatttcttctcatgtcagttatataacttacatctttcaaagacatccacttcgtctagctgtcgaagagattggttcatagtattctcttctaatgcctctagaatctgagcgatgtctcatcattcattcctgatattgataaattatcttccctctttttgctcttgatcagtctaactagcgacttctcagttttgttgatttttatttccataacctgctcttggttttggtgatttttctgtatctgtcttctatttcattgatttacacacattattgcctccttgtacttaccttggatttaattttctcttctttttctttttttaatggaagcttagatatttgatcttcaagtcttttttcttttcttatataggcttttaaaaactataaatttccctctgagcatggttttagctgcatcccacacgttttaatatatttttatcattcagcccaaggtattttctaatttctcttgtgatttcttctttgacccrtgagttgtttaaaagtgtgtttaatttctgaatatatgggggctctttatgttatatttttgttatttatttttcacttcagttgtggtcagagaacatattctgcatgtttcgagacccggcttatggtctgtcttggtgagtgttccaggtgcacttggaaaggatgtaccttctactgttttgggatatagaatatatatgtcattgggttaaccctgttcaagtcttctgtattcttactgactttctgtctacttgttctgtcaattactgagagaggcgtggtattgactattttttaggagcatacacatttaggattgttatgtcttctggatgagctcatccttctaagcttttaaaaaaataataataattcttatgaccttccttgcttataaataatgggtttcgttcacccctgaagttgtcccctttctctgggcagaggagtttctttggggtggcatgctatgggagagaaataggtagtagggctcagagggtcagtggtagcattgatgagcagaggggtcaaattgattcactttctttctcctctgatatacaatataaaagagtttctgccagaacttgaaagactgccacaagacttctcagcttcaggagatcacagctgaggctagttaatggtttgttgaggccaccttaaacctgtagagggcaccctctaaaagtttgttcagggcattgcaagcatcaatccacctgtctcaggtagactcctagatttggctccactgagagaagtatgttctggtgtggtttttaactcctttgaaaagggcaaaagggattttggagccactgagcgtgcatgctgctggctgtgggaaagacattttctatcaaggaggccctcctcctgtgctcacatcacacattcccagacatgcatcccagtgtggtcagctcccagctgattgatcactggcagcccttgcttagtggtgctgcttacctaaacaccctggccactcctagggtgcttgtccatttctccttcttcaatatatgcaaatatatgcatgaaaacttttttaaaaagataaaaaggctgggcatggtggctcatgcctgtaaacccagcactttgggagactgaggcgggcggatcatctgaggtcaggagtttgagaccagcctggccaacatggcgaaaccctgtcaaaaattaaccgggtgtggtggtaggggcctgtaatcctaactacccaggaggctgaggcacaagaatcacttgaacccgggaggcagaggttgcagtgagccaagatcatgccactggcactccagcctgggtgacagacagagactccatctcaaaaaaaaaaaaaaagatataaaagtgaagatttatttagagtgggggaaaaaaaaccccacaatttacgaacaaggcaaaacccttttggaacgaagctgtttaattacctgccttactgtaagatagtgtttctaaactcagtcatttgcaaaccaactgtagaatttttgccataacctttggccagctgttctattatttgtatagtatttttaatattcttaaataatgtaattttaattataatttgtataatatttgtataattttttaaagcctagcctctgtggtaccatgactgagcaatgctatctatgaaatcacaggttttatttactagttgtatattgttctatacctacagatattgaaatgaaaaatgttcatccatatatcacctaaaaccacttttatgtgtatgacattttggaaactgttagtctgtgcaaattcacacctgcaaatatgaacttgacagtaaacttaaaggaaaaagcaaactttgcagtggcctgagaaggactactttgtggctacagtttggaggtgccagggcactttaggaaggaaggggaaataagagaggcagcagaaaaccagactggggtacctgtttctcagggaggcagatccttccattatcctgtttggatgtcttgaatttctaaactagccgcatccacagttaaaatactccaggggaaaattattaaatgaatgttgttcagttaagcagagcgcatgtaaattttgtttcattactaatctagaatacttatatcactgttaccttcagttggtttaaatattcttcaatttaccatgtttcttactctagcagggttggttttaatgtcatgtgttttatttaggaagaactttttgttctgagaagaaattgtctaagggaacgatttccagattgaggagactttaataaagggactgtttccaaaggtgtgggcagggtataaggaacccataagggactagggcagtacctgggctagtgcccatgggcggagctgttactatccttcccccaggggtaagaggagggcatacttactgcagcccagagtgagagagagagctgcgtggagagggatcctgacagagctatgatgagggttgtagccagttcctggggaatttgtaggcaggataaataccctgacctcactgcttttccaccttccacatctccctttggccaaactcagccagagggcaaaggagcccatggatgcagtccacgtgggtcagctttttggggcacagaccactgtggagagggtgggtctggagagggtgaaggctctggtcatttcccacccaatgctctttacataaggtagtggggcagggggtggagaaacagtgaacatgaaacatagctgctgctgcccccctgccgccaggaacaaggtctgtgatgtcattggtcatgggtgacttctgcttccccccagtccatgtccctgttatcctctgctgctggtgcctctgctgaatagtggaatgaaccagacctttcctgctgtaggattggagaaattggtgttttgctgttactgagttgtcacagctagccctcaaggacaaggacccttggcctcgtgcttctcctgccctctgagtctccggccagtgcctagtattggtcagaacacagctggaagccagagagsaaaaaggcttgttgatgtaatctgtgtgtaggccagcctcctggggcacagtgcgggatggcagagggacaaacgaaagctctccagcatagtccctgttctagaagccagatccatttactccagctcacttcctgactaggtcatttcaggatcatgccaaatatgaacagtctgtccactctctcgttggccttcttagaaaaataatgaaaagaactgtgcttactaactgaaatgcattgatgtagtaaaatgaaccagaaacctgaaagaacatccctgcttttaaagctcatgcttcgaggtgttttcatgactgcaattaactttttgaggctttgtatttctgtagacacaaacagaagttcctaacctttttgtgcagaaaaagacaatgtttgtacacataaaaggaacagctaataccattatttgcctattttgtgttaagtgctttatrtgctgtgttcactcctttacttctcataatgattatgtgaagaggatagtgatgctaccttatttcacagataaggatgccaaagcttagagaggttaaagtaacttgtccaagatgagggcactgtgagaacttgagcatctaggtccctgtgattcctaagccccagcttcagactctgttgtgctgaatagagttgtaaggagtccacgtgcaagattcatttatcagttgtctgttgagagcctgctgtgtgctggacagtgtgctgggggctgatggcagggagaaatatggcctgtgccttccccctgtggagttctcagtctagtgggcaaggtaaacaaataaacagtcattcccccacatgtgtgagatagactgtgatgtgtactatgaaggacagggcaaggataccgtgattgatgacacttgtctggtgtgcatttgagggccttggagaaggcttctctactgaaggttctgttcagtagacacccgaaagcaattcacttaagaggttgggggatgagtcctgaggtgggaaaatctggagctccagccgaggcacctcgcccaggaaggtctgtttttgtgtgagttactttccgtttgtcatcatctcagtcctgctttataacccagctgccctacagtaatgccctcagtaaaggggagaggaagggcacaacttcactgtgtctgttcactttgttggatgacattttgtgattaagaaatttttactacttgtagaagaaacaattacagaacaaagttgtgtttactctgggatctttatttctctttgattcagtctacttaaatcagtcccgttcaccacatgtttattgagtatgcattatgtgcaggattattgcaggaattaaagacgtgagcctcagactctcccctcaaggagttgattgtctgatgaatgackatcaaacttactgtcatacaaatagcgtgtttgtcccaggaggggttctgcggtttcctcagatgtgttgactgtttctgactctgagtgtgcatttgctttaatgtatggttatgactagaacaagtcgttcagtgattgtgatcattctctttggcgtttctttttgtgaaatctaccatgtagattctcagggacgttaaaaaaatcaaatggaaatgaaataatggttctacacgtgtgcggcaaactgagtaactggaagcagtcaccacatccgagcattgccaagaggtgcyacagcgacagtcctcagcccttcctgggcacgggagggaaagccattggaatgtgggaaggcaggcatcatctgccctcgccagctcctggttgaatgtctgccgcccacaggttgctttgctttaactccatgtgaattgttgcatctcagttcaccatctatctgagctccaagcgtcatttcaccagatctgacagaaatggctgacttaataaccgttgttaattggtgttgctggaaagctcaacacaggtgttttattattaggggttttttttcttttttctctctcgtaaagatgtaagggcatgcagagcaggtagctgttgagtgacattaaaattctttcccaaacttagtatgttgcttaaatgttttagggaaaactaggacccacaagatacctgagtaaatttgtaatgcaagaagaacagaaatttagaaattattaattatattaatatttttagttattaatataaaataaaatgcaaagcaagtattcactgtttcactcctccctgtttcctgccaactttgcacattaattgagagtcacaaaatcaaaaacccagcaggagaacttcaggacgtttaacctggttgtcctgtttctctggagacaagccttctgccttgaagaaactggaaaccccatgaaggcagagactgccttagtcatcactgcatccctgagctcacttaggcactgcatgaatatttaccaaatgactgggaagaaagaaaaccatcaattgatttcattttgttactacactactaaaagatttctcagttgttttatgagaaacctgaagaatgacaaaaatgaaacctgctttttccaaggaatcctcgcagacctaataaaagcactgcggtgtgtaagaaagccctagaatggggaatccagagacgtggattctgggctcagctgtgccactcagccatagtgtcttcctgggcaagtcacttagccttcttttttctgtcatttgtaaaacaggagttttctgcttgccctgcttacttcccagagttgacgagagattgagcgaggcaaagagtgcaaaagtgctttgaaaactggaaaacagtgcctgctctgtcactctccctcctctagcagaaaggccaagctcgggccccgccatcctcccctttcacaaggcctgtgagccagctgccataattgttttctatccttagtacttaatgtcattcctagaacacagtcattgttgaggagtaggcactcaaaaatatttattaatagatactgtaggaatagtaaacaattcttctctaaatcatgctaagtcatgtgtaagaagaactctattttgtgatggtatttgtcacgtgttctagttcatgacgtacccatgaactcaaagggcgacttgacaccccgtagcaggaagaaggtaggcaggttggtttatacgtttcagcgtgtgctgggcccttgtgcattgatttcgacttctggaaatggaggggtagcttttatttgcttgcctgggtgattctcctacatttcatcaggtaatatattcacatggctcgaaattcaagagctactaaggagaagacaggatcaagctccccatctactgctgcctggtcaccatttccctcccaggaagcagctcttcctcatcttgccagctctgcctgcctaagtgttgagttgccataaagagatcttgaagtttttgagtgtctttccttggaagagaacaacacagtagataagtagccagttgtgttaggatgagaagggtgtgtagtgagagatggtgtggaaatttaagctagtgtgtgtttatttctgtctgcagtacgtctagtcttgcttttagttgtacggttttgttttttgtttggttggttggtgttatgttttggttttttgttttttttttttgtttttgtttttgtttttttgagacggagtgtctatcacccaggccggagtgcagtggcataatcttggctccctgcaacctctgcctcctgggttcaagcgattcttgtgcctcagcctcctgagtagctgagattacaggcgcatgccaccatgccctgctagtttttatgtatttttagtagagatggggtctcaccatattggccatgttggtctcgaactcctgacctcaactgatcctcctgccttggcctcctaaagtgctgggattacaggcgtgaaccactgtacccggcctggttgtacagtttagaaagtatttttgattttcttgagcaaataatcagaaatgtttcacaaccgtgatataaatattttataaatctgagaagtaagcaaatttgacctaagcttccaatctctttcttcagcatcttgagattgatagttgtagtttcagtcaatctcatctcctgaagtaattaaacaagccctcgtctgtttccacccactgtcaaaggcctctcagtctcatcactgcggacaggtgtagaggaaaatcttaaatcattttcagatcatgcaaatgattcccttcttgatatctactgggcattacccttttccccaaaaggtggtctattaatatatgcattcctaacttttagattttgtacgggtggagaaaatgaacagcatatattttacacattgtgtggggtaagtgctatttaaatccggctcgagctgctaagcatcacactaacatgggatcactggctagggcccagatttgttgtgtgtgtgtgttttttttttcttttgaggagggggtcagtctttagagaactaagccatctgtccagtaaattattttaaggttttaataacaaatagtttgcaatgtatttggatgtgtggagtaaaaaattaatgttttgcaaaggcgatatctttagaaatgtcttccacattctgttttgtgatcattttagtattgtaatcccaatttggtagcgtgcatctttgtactaatgttttgcagaattaattagttcattaaaagcaacattttaaaattggcatgtcaataacagtgtgtttctttagaaggttttgcttctaagaggcactgagcttctactaaaacacatgcagggattctggagctgcatatcaagctggaagactataaaggagctctgcagctttcttcgaggtttgttttgtggagttctctggttgctgttgttggtgacttttgatggctaatgtaatggacccccgacacctcacatcttcctctgctaaagagaactttgtattgtagttgttttataatggcctaatttgggtctccgtggcttacttttaatgtacagtctgttcattcaggaaatatttaaggcatgcttagcgggtgccagatactgtgacaaggtgctgggattcagcatcaaagaagacagtcataggttcccatagaattctgtaggggagttaggtgttgaataatcactcaaaaaattatttaatgacaaaggggacaggagcacaaagcaaatttaaaagtaccatgagagataaaatggggtacactgactgatggggtgccaagggaagtgtgagaccgtacttccctgaggaagcatcatttaagatgaaaactcaaagacggaagcatgaataggaatgacccaggcacgggggtgagaatacttgtgagaagaatcttccagacagagtgtgcacagtgtccaagatagagtgagcctgctcagggacgtggaagaagcctagatgaggctgtaacagtcactgcagctggagtgaaggtctccttggccctcctaggacttgagactttagtttaccactgagctgtgccttaacagtgatacaaaaagtagggagccctttacttatacaaacaaggagcatgggtgtaaagcatgagaaatgtggctttagagggcaaaagtggttaccccaatcagatgacctctgaagtcatgggggtaggtctttgattttgttggaaggatgagtaacagtcagaggcaggtgtttaaaaacagacacaaaagatacgtgttggcaagaatgtggagaaaagggaaccctcacacagtgttgatggaactgcaaattagtacagtcattatggaaaatagtatggcggttcctcaaaatgttaaaaatagaactaccatatgacccagcaattctgctactgggtatatgtccataggaatgaagtcagtgtgtcaaagagacatccacatccctatgttcattgcaatattgttcacaatagccaagatgtggaatcaacttaactgtctattagtggatgaatgagtagagaaaatgtggtgtatatacacagtggaataccattcagcctgaaaaagaaggaaatcttgtcatttacaacaacatggatgaacctagaggacattatattaaataaaataagccagagacagaaagacaaatattgcacgatcgctttttttttttttttttttaagagatagggtctgatttgtcacccaggttggaatgcagtctcacaatcatggctcactgcctccttgaactcctgggctcaagcaatcctcccatctcagcttcccaagtagctgggactataggtacataccaccacacccggctaacttttttttttttttttttttttaagagacaggatcttgccatgttgcccaggctgatctcgaactcctgagctcaagccatcttcctgccttggcctcccagtgttggaattataggcataagccaccgcacctggccacgatctcacttctatgtggaatctaaaaaagttgaactcatagaagtacagagtagaatggtagttaccaagggcttggcatgggggttggggagagatactgatcaaaagatataaaatttcaagtaggtaagaggaataaattcaagagatctattgtataacatggtagctgtagttaataacaatgtattatattcttgaaaattgctaagacagtagattttaggtgttcttaccacacacacacaaaaatgctaaatatgtgaggcagtgtatgtgctgattagcttgctttaactgttccacaatatatgcatatttcaaaacaacaggttgtacatgataaatatatacaatctttatttgtcaattaaaaaataaataaacaaaaactagcctgcggctctatcacagaaacatgatttaaagatgatcagaattagtagattctttgtaccccctatgccatttcagttatgttcacttctgggctgcaacaaatatatttttatatttatatatatataaattttttatatataaagatatttttatatatttatatataaatatttttatataaaattatttatatatatttatatataaataaaagtagctttattgaaaaatgaaagttaaccattcagaaaagaacaaaaaagcaaaccagggaccacagttctagaacagggctaaagcagggatgcttaacttgggatccatgaatggactttaaaggtccatgaactgcagaagattgtatataaaatgttgtacagacatgtgttttaattttcataccttctccaagggatctgtgacccaagaaagactaacaaacagccgggcgtggtggctcacacctgtaatcccaacactttgggaggcagagacaagcagatcacctgaggtcaggagttcgagaccagcctggccaacatggtgaaaccctgtctctactaaaaatacaaaaatcagcctggcatggtggcgggtgcctgtaatcccagctacttgggaggctgaggcagcagggagaattgcttgaatccatgaggtggaggttgcagtgagctgagattgcgccactgcactccagcctgggtgacagagcgagactccatctcaaaaaaaaaaaaaaagactaaaaaccactgatgaaagaaatcagaaaacccaacagtcttttataaagtccattcatggaccccagaaagcctttagtttttggaggaaatatttgtgtgtcattctaaaggctaaagtagggtgattgggtgcagatactagtaagtggatttgaaacaatcagacgtcaggcaatgcaaggggttgcctcatgaggtggcaatggggggtatttatgcagaccacctgttggagatgctgttcaagccgtaaattgttggggacactggatgagaggacctctgaggtcctggtgttctttaattctcggactaaggccattgaaaggagcaagctgggctacttgaagaaaattagaagtgaacaaaagtatagggctcttgaaatccattttcgccatttgaaaatggtgggattgtttctgatgcagcggagatgttgaggcagttgagactgaagctgtccttctggaagagatggttgggttgtgctggaaaaaagtggattggaaaccgttgagagtcttaccgcagctagggcaaagggcagggaaacagaatgctctggttgcttaaaagttcgttttctatccgaacatactgaagttatggatcataccttgatttgaatctgtaatttctagaagtttgtgtttctagcccagttcttggaccatcaagccagctcattgaccaaatacttcaaaaaggagaaccaagcagctctccattttcgaaagccttctgtaatgtaaataggaacagcagtctttccaagttattaccctgttaacaggttgacagatatgtgcaaattgtgactcactgctcaatttggcactaaattaatgtctttccgcgccgcgtctgctcaagtgtaaactagtcaccactgctgtgttactgcttgtttgcctatattccaaaggtaaaaattaaagtaatttgattctgccacagaacagagtgtaacatatggtggaagtgtaggaggggagcacactgttcctacctgtccttagccctgctctcaaagtggggcgccgcactgcagagcccgctgcagacgctagccgtgctcaccgtctcgggaggcagcactcagagagtactgccagagaccacctcccataccaacaccccctccctcaacaagaaagagtgtcatttttgtctctagatttttaatttgagcttccaagctttccttatttctgtcaagtcactagtggttgatttgtgtttcgaaggttgggtctgtttgaaaatgaaatgttttgatttttgcctcgagaatttagacattgttttcctcagctaaaaatgcagctgactttctctctttccccttttggcaaatacataatgtcacctgtagaaaagaaatttgcatctcctttgtgttaggcatgtgaatggaaaacaatctcctgaaaatccattttgcttcatacagtctttgagtttgctgagctttgtctgaggtcacgggttggggaagaaacaacaaaacaacaacaaaacccacccagatctctttacttacctgtgccaactgcagatatttttcctaggaacttatttttcttctgccattgccttttcttacaggtaaaaatctcatcaataaaggaatcaaaaatggccaggaacatttgtttgcccatttagaactctggcccttactaaaagcaagcaaagttaggtagttggcatggaattctagaaatctacacactgagcttggtttctggctttttgcttgacctgggatcatcacttaacccacctcatttctttatttttctagcctcctaaggagactagttttccagaatgtatcttgacgccttcaaggtgaaaggtacaatggaaagcaaattatgatgttacctttgtgctgaagatctgcatattcatctgctttctgctgtccagagctatgatggctattgattgaggacaatagcctcaatgttcagaagacatcgcctatcctcctccccattagcatatacttagcaatgacctccattcacacaggacagtggatgtttgcttcctgctgagtcggaagaaactgggtttaaaccacacatatagatttagagaagaagtatatacatgcagaaatgtttccagtgacctggtataaactttgggcatgatgtttttgtcatgtgccttcaccatttcaagaaacgtcaggcaatgatgaaaaatgagttcatttcctcctttcttcacttctcaccccttttgtagcatttaagcttagatccaaggttgtgtgtcatgatgctgtaaatctagagggaaccacgggagatgatgtgtggtcaacctgtgtcttagccatccaggaaagattgtttattaaactattaaaaaatcagcagaggctgggcatggtggttcacgcctgtaatcccagcactttgggaagccaaggtgggcagatcacaaggtcaggagatcaagaccatcctggctaatatggtgaaatcccgtctctactaaaaatacaaaaagttagccaggcgtggtggcgggcacctgtagtcccagctacttgggaggctgaggcaggagaatggtgtgaaccagggaggtggagcttgcagtgagctgagattgcgccacygcactccagcctgggtgacagagcgagactcggtctcaaaaaaaaaaaaaaaaaaaaaaaaaattcagcagaatggggccttgcctttaagaaatgcctgtcattctttctgagcaagttcactttttggtgccatatcctcacggtatggtgcttttgagagataggagatgctgtttggtactgagatcatgaaagccattcatgtacttgaagaatatcaaagtctcccttggccttcttttctccgggagcaaatacccttcagtgcacctccacgccttctcactcatctctgctgcagtcttcttactgttgtcgttgtttaccactgggccgtctctaatttttccccttccttcttcagcttaaagttttaaaactcgacataacattctctaaggaaaacctgataggctttccttagagaataggtagggtcactttctaactttcagagctggcgtgtgtgttcgctttttaacaaaaggcattatgttttctgctatctttcatgagccccaggttcaaactaaaatcttttcatgttgtgaaccgagaactaatctccctcttaccccaagagaatataccttttatatgtccctgacttaacggacatgtaatttaatttgtcgtagccaatggatatgaaatccaatgtaaaatccttaatagatagttttacatgtcagctattatattatacatcctctttgtgtccagtgtaattggatggtgaacacaaattcttgtatgattttgttctcaaaggacctgagccagaccctactcagtgctatgggctgatgtcttcacaatgcgctaccactgtaggggagaatttatcccagtaagagagggcatttttgcagaattggcccatggtgtaagtggtagaactatcaatcagggcacttaaaatttttgagtcctttatatgtgccagttctcatgctaagtccttaatgtcactgaaaaccttaagagatacaggtttcatctgggtataagaatagaggattcccttttggtgggatatctccaaggaaaacatgaagctgatagcttgcctgatatgtttggggtaagagccaggtagagagtttaggaataaaactgtaacagatacatagaaaactaatcaaatgaaaaggcaaaacagggctgggtgcagtggctcacgcctgtaatcccggcattttgggaggctgaggcaggtggatcacttgaggtcaggagttcgagaccagcctggccaacatggtaaaactccatctctactaaaaatacaaaaattagccgggagtggtggtgggtgcctgtaatcccagctacctgggaggctgaggcatgagaatctcttgaacctgggaggcggaggttgcagtgagctgagatagcaccactgcactccagcctgggcaatagagcaagactcagtctcaaaaaaagaaaaaaagagaagaaaaaatagaaatgtaagaaaacagaaagctgtataagtaaataaatgtagtcatgagccactatgtgtctcagctattaaaaatatatgcagagattttagaatataatcacagactactgatttaagtaaaaattgtgatataacttgaattagagcacaaccaggagatcaggaatgacttcaggtatttaaaacagaaggaattggccgggcacagtggctcatgcttataatcccagcactttgggaggccgaggcgggcagatcatgaggtcaggagttcgagaccagcctggccaatatggtgacaccccatctctactaaaaatataaaaaktagccaggtgtggtggggatcgcctgtagtcccagctactcgggaggctgaagcaggagaatcgcttgaacccgggaggcagaggttgcagtgagccgagatcacgccactgcactccagcctaggtgacacagcaagactctgtctcaaagaaaaaaaaaaaaaaaaaaaaggaaggaatttaatcctgggaattggttattccagtgattcaaaggagaagccagattagacagtgagacagcccggaggtgcgcaacagcaggacactgctgccatcctggactggaaggacaaagggagggggccatgttgttggagtccagtggcccagcaggtgacacagctaaattctgacctcctatagaagaagattaatagtcatgccttaaaatgaaaaatcaagaactagcattaaaaacacattatctggacatacagaggtaaagactaaaaggtttctaattctatttgccttcttaaaaatgtgttatattgatttaaaattatatttaaaagcaatgtcttttgaatactattaatctgtagctcttaactggagttgtagttcacacatgtttatttttttcccatgtagatatgttgatgatgtgatcagccgcattgacaggatgtttcctgaaatgtccatccacttatccagacccaatggaacatcagcaatgcttctggtaagatcagcttgactgatttgtagggatgttgggggaaaaaatggacttcacaattaactctctggtcctgtgttgtaggatctagagaatggggattaaattccaatttgatagtgaataacatagtttctttactggcattctgtaggttaagaattctgcacattgaaaccttgcttttgaacaaaatttcagaccccatgtaagacttaaccagagaggaaagacactgtaagaccatttcaccttaagtcacttaatgcaacctcccaatgttttggcgaatctgttttctattttccccaaaggagtatagtagacaatagtgatgctcaactgttggatcctgctaaagaaaacactctcgccaggcgcggtgactcacgcctgtaatcccagcactttgggaggctgaggcgggcggatcacgaggtcaggagatcgagaccatcctggctaacacagtgaaaccccatctctactaaaaatacaaaatattagccgggtgtggtggtgggtgcctgtagtcccagctgctggggaggctgaggcaggagaatggcatgaacctgggaggcggagcttgcagtgagccgagatcactccactgcactctccagcctgggtgacagagcaagactccttctcaaaaaaaaaaagaaaaaaaaagaaaacactctcttaatataaaaccagaatattaygtatttgaagaaagtgttctgagactgatgacttctggttttgctgtttctgattatggtttgctctgaacacatcgcctcataatctcctagaagatgtttgtatttgcatgaattcaccgaagacaggtgtgttttggaaatacagtgggatagaaatgctaaattatgttattaattaggaaggcatagagacctcaatgatgagaagcttttctagtggtctgtgtaataatacttgtatgtgcttgaagaatacttccctgaacacagatttttgaggaaccaccacattttataaaaagcagagtttattgaataagaatgatggtttcgatgggcgtcagggaggtaaggttcaggactgggtattttttccatctattctgctgttgctgctttggagcctagtgtgaactccccatattttagcattttacttgtgtgaaatcttataaatagccagtcacccaggatgagttactgtttactccagccgttcatcttcggggagcattgtgtgtgcgtgcgtgttttggtcttaagacaggaaaagatctgggcttgttaaatgtttgttacttcgtttgtgggggaaamaaattagtgacattcacctggataacataatayttaaaaaatttctttcagttaaaacataaagaaaaggagataatgcgatgtttttttcatagaaaagggaaacagttttcttcatataaaatacatctgtctacagaacacaaaatatcgtctgcctccagaggttgcagtgagctgagatcgcgccattgcactccagcctgggcaaaagagcgagactctgtctcaaaaaaaaaaaaaagtctgcctcagttaaatgtacaaattgcccagattttaagataccccagacctagcagttgaaacataaaccctgctctcagcatacctgacagggccccagagagttaatgaagataaaaatgaatgcatcctcagtgaaataggtttgttcaaattatttctgggtcattgagctcccatttcataatgagggtgggatttggcattgaagggaatgagcagagggaacaggattccaggcaaacaggccacacagatgagttccttccacctgagaaggcaggcatgtatttcacagtgatggtcgacctcgcctgctttcccatggagcttctgtcctaatagactgatgagagagtttaggggctcaattcaaggcaagaatcacatttcatatgccctgtttatttactaccactaacacccatccacccccgctaattcagacacgtggatctaggtgcctacttgttacctttcttcagcgacacaggaactcacagaagctggtgcttacttacagggccagtggtaggtgatttgattcagaatcagattgccatgggccatggggttaatcatacttttaacataatgcctgcatttggcatttactattaaaagttggaattttatgagatggcaaatctctaggctattcactgctaccacatccatcgtgaggtgggtgatgggaattcctacctggagggggagcaggaccaacagatgccacctcccccactacctactgctagtcacctgttccccaaaaagtgttttctggagatgaatctggaataaattgatttattctggaatgcagtgtattcctgaaggctttgggggcaagcgagactgatggggaaagaccagttaagaggccgttgaagcagggtgcacttgagcagtctcagctgacaccttcctttacctccctcggcaaatgtacgaactgtgcctgtgcttttgaaataaaacggcatttcctcctgaattggctgggcttccttgaatgcagtcaacagaaactctgattgacttacataaggaaagagttggttttggttttgctgtttgatggtgccaggtgcatcagactcagtgattaatctgacctgcccggcaggacaaaaaccagagtagctccaggcatgtcaggaacaagatcaggacaacgttttttagggggccccatggcccaaatgattccgtattaaccgccttccatccctgtgcatacaacctgggaagaacactcctgctggcctagcctgcagttgctccttgccctgagcccagaggatgggggagtcaggccttggcagccccacagaactgcaaggagtggaggggaagtaattccctagaggaaccagccgtctgtatggcacagtgaacgtctgtgtggacagagtcttgtggcttacacagcacttatctcatctggtcctcactgtggccctcgaggtgggtagcaccaactgtgctcatctgacaagtaggaaatggaggcagttgtttcccgtggctgcggggacacctatccctatctccccaagcctccaggatgctgtcctcctcttgtctctgaggacaggtcatgctggtggcaagtaagatttggactaccaggcactaggctggtgattttttctttctttctttctttctttctttttttwttttttttttgagacagggtctcactttgtcacccaggctggagtgcagtggcgtgatcacagctcattgcagcctcagccgcctgggctcaagcaatcctcccacctcagcctcctgagtagctgggaccacaggtgtgtgccaccatgcctggctaatttttgtattttttgtagagacggcaggctggtctcgaactcctgagctcaagtgatgcgtctgcctcagcctcccaaagtgctgggattacagatatgagccactgtacctggccaattttttcttaaaatttttaaattatgtaatttgatatatactaaagaatatatgtaatgtatatgtaaattataaagcttagataaacccatgagctcatcactcaatttgagaaatagaatataaacaatatggctcctccccagtccctgcctccygacccgtggtcatctccaccctgagaggcaccccttctcatttttaaaatgcaatttgccacatgtgcctgtatccctaaataatgcctccttgagttttgagctgtgtagaaatagtatcatactatgtatattgtttctgagctgtatccctgatggtggtcgtatctggcagtttgatcattgtcgtctaatgtccatcctgtgactgtccacactttattctttctcttgccaaggcatgttggggttggttacaattttgctttataaataatgttggcatgagcattctcttgcatataccaggatacttgttttgaaagtttttattttaatttttatgggtgcacagtaggtgtatgtatttatggggtatatgagacactttgatacaggcctgtgatgtgtaatcatcaaatcctggtaaatggatatctgtcctctcaagcatttattctttgttttatgaattatccaattatactcttttagttattttaaaatgtacaattaaattgttattgattgtagtcaccctgttgtgctatcaaatactaagtcttatttatttttactaactactttttgtacctattaaacatccccactatcctgcccccatactcccaccccaactacccttctcagccgctggtaaccatccttattctatctacaggagttcaattactttaatttttacctcccacaaatagatgagaacataacgaagtttatctttctgtgcctggcttatttcacataacttaacaacctccatttccacccatgttgttgcagatgacaagatcttgtactttttatggctgaatagtactccgttgtgtatatgtaccacattttctttacccactcacctcttgatggacaccaagattgtttccaaattttggctattgtgaacagtgctgcaacaaacatgggggtgcagctatctctttgatatactggtttcctttcttttgggtatatatgcagcagtgggattgctgggtcatatggtagctctattttttggttttctgaggaacctcaaaactgttctccatggtggttgtactaatttacatttccaccaacagtgtacaagggttctcttttctccacctcctcaccagcatttgttattgcccgtctttggataaaagctattttaactgggtttttgccatttgtatatcttcttttgagaaatatctattcggatcttttgcctattttttaattggatcattagattttttttttcctgtagagttcaagctccttatatatcctggctattaatcctttgtcagatgggtagtttgcaattcagtaatattgcagatccattctatggactgtctcttcactttgttgattgtttcctttgcagtacagaagctttttaacttgatatgatcccatttatccatttttgctttggttgcctatgtttatgggatgttactcaagacatttttgctcagaccaatgtcctggagaatttccccaacattttcttgtaatagtttcatagtttgaggtcttagatttaagtctttaatccatttgtatttgatttttatgtatggtgagagacagtgatctactttcattcttctgcatatggaaattaagttttcccagcaccatttattgaagggatatcttttccccaatgtatgttcttggcatctttgtcaaaaatgagttcactgtaggcgtatggatttgtttctgggctctctagtgtcttccattgatctatgtgtctttttatgccagtaccacgctattttggttattatagctctgcaatataatttgaagtcaggtaatgtgattcctccagttttgttctgctgagggtagcttttgctattctggatcttttgtggttccatataaattttaggatttttttttctatttctttgaaaaatatcattggtattttgataaggcttgtattgaatgtgtattgctttgggtagtatggacattttaacaatattgattcttccaacctatgaacatggaatatctttccatctttttgtgtcttcttcaatgtcttctatcagtgttttatagttttcattatgagagttttatagttttcattatgagagttttcattatttctcaattctgtttctttggttgattccagggtatttaattttatgtgtggctattaaatcggattacttttttatttctttttcatattgttcgctcttagcatatagaaattctactgatttctgtatattttgtatccttcaactttactgaatttgtttctcagttctaatggttttttggcagagtctaggtttttccaaatataagatcggatcatctgctaacraggataatttgaccctcttcctttccaatttggatgccctctatttttttctcttgtctgattgctctagctaggacttccagtattatggaaggatgaaagtgggcatccttgtcatgttctaaatcatagaggaaaggctttcattttttccccattcagtatgatgctaactgtaaatctgtcatatatggcttttattatgttgaagtatgttccttccatacccaratttttgaaggtttttatcataaaatgatgttggtttttatcaaatgttttttcagtatcaattgaaatgatcgcatggtttttgtccttcattctgttcatatgatgtttcacattaattgatttgtgtatgttgaaccatctttacatccctggaataaatcccacttggtcatgatgaatgatctttttaatgtattgttgaattcagtttgatagtatttggttgaggatttttgcatcaataatcatcagaaatattggcctatagttttcttttttgttgtgtctttgtctggttttggtatcagggtaatactggcctcataaactgagtttggaggtattccttcctcctctgttttttggaatactttgagtaggattggtattaattcttctttaaatgtttggtagaattcagcagtgaagcctttggatcgtgggcttttctttactgggagacttttttattactgcatcaatgtcattacttgatattggtctgttcaggttttagatttcttcatggttcagtctcggtaggttgtatgtgtctatgaatttatccgtttcctcgaggttttccaatgtattggcatgtagttgctcatagtagccactaatgatccttttaatttctatagtatcagttgtaatgtctcctttttcatctcttattttatttgtatcttctctcttttttttttttccctaattagtctggctaaaggtttgccagttttattttgtgtttccattatcatttatttcaagaaatttttcagtttccttcttaatctcttaattgacccactggtcattcaggagcatattgtttaatttccgtgtgtttgtatggttttcaaaattcctctcgttattgattgctaattttattccagtgtggtcagagaagatgcttgatattcttatagttttttttttaatgtgttaagacttgttttgttacctaacgtatggtctgtgcttgagaatggtccatgtagtcttatccttgagagtgatctgtgtgctgaggagaagaatatgtgttctgcagtcattggatgaagtgttctgtaaatatctattatgtccatttgttctgtagtccaggttacgtctgatgtttctttgttggttttctgtctggaagatctgtccgatgctgaaattggggtgttaaattattgtattgtggcctgtctctctccttagctctaatgatatttcctttatgtatctaagtgttccattgttggttgtatatatatttccaattgtgatattctcttgctgaattgacccctttagcattatatgatgaccttctttgtctctttttacagtttttgtcttgaaatctattttgtgtaagtatagctactcctgctctcttttggtttccattggcatggaatatctttttccatccttttattttcagtctgtatgtatctttgtaggtgaaggctgtttttgtaggcaacagatcaatgggtcttgcttttttatctattcagctactctgtgtcttttgattggagagtttacttatatttgattggagttagttcacttatactcagtgttattgttgataagtaaggacttacttcttccattttgctgttttctggttgttttgaggtcttccttccttcttttgttccttttagtgaaggtgattttctctggtggtatgatttaattttttgctgtttattttttgtgtgtccattgtatattttctaatttgaggctaccatgaagtttgcaaatactatcttataatctgttgttttatttattcattctttatattttattttatttatttatttttgagataaggtctcactctgtcacccaggctggagtgcagtggcacaatcttggctcactgcagcctccgccccctgagctcaagtgatcctccctcctcagcctcccgagtagctgggaccacagatccgcaccaccacacccagctaagtttttgtatttttgatagagacaggtttcaccatgttacccaggctgatcttgaactcctgagctcaagcagtctgcccccttggcttcccaaagtgctgggattacaggcatgagccaccgtgcccagccttataacctgttattttaaactgatgacaacactgcttgcataaacaaacaaacaaaaaaaaggcaaaaagacaactaataataactctacactttttcatggccccgctttttaacttttggttgtttttctttatgtcctattgtactacctatatcttgaaaagttattatttttgattggatcattgtttagtctttctacttaagagtagttttcacagcgcaattacagtatcataatattacgtgtttttctgtgtgctcactattaccagcaaattttgtaccttcagatgatttcttattgctcatttacatccttttctttctgattgaagaactccctttagcattccttataggaaaggtctggtgtgatgaaatcccacaggttttgtttgtctgaaaaagtctttatttctccttcatgcttgaaggatattttcataggatatactattctagggtaaaagtttttttccttcagcacttcaaatatgccatgccactctctcctggcctgtaaggtttccactgagaggtctgctgccagatggactggagctccactctatgttatttgtttcttttctgttgctttgttccttttaggatcctgtctttatccttgacctttgagagtttgattattaaatgccttgaggtagtctacttcaggttaaacttgcttggtgttctataaccttcttgtacttgaatgttgctgtctttctctagttttggacagtgatctgatgttaccccttggaataaactttgtacccgtcttttttctctacctcctctttaagaccaatgacacttagatttgccctttaacgctattttttaggtctggattaccaggcagagacttggtcctcttcccttactttctcccaaacaaagggagcctctctctctctctgtgctaagccacctggagctggagatgaggtgatgcaaacaccactgtggccaccactcctgagactgtgctgggtcagacttgaggccagcgcagcactgggtcttgcccaaggctcgctgtaaccactacgcctatgttcattcaaggtgctaggactctacagtcaacagatggggaagccagccaggtttgtgtccttcctttcagggtagcaagttcccctaggtcccaggtgggttcacagatgctgtctgagagccagggattggagtcaaaaaccttagaaatctagctggtactctattctactgcagctgagctccttcccactcttccctcccctttccacaggcagaagagcctctcccagtgaccgccaccaccactggtccgtggggagttctgccaggccactgccaatgttcactgaaagtccgggggcccttcagtcagtgaaaagtccatagtgattgtactaatttacactcaccatacaggtgtggtgaatgctgccacgcctgagactcacccttcagggcagtggatgcccctctgccagagcaggtccagaaataccatctaagagcctaggcctggactcagggaccccaagagcccacttggtgccctaccctcctgtagccaagctggtacctaaggggcaaggcaaagtcccttttacttttccttctgcttttctccagcagaaggagtctctccccagaascaccacggctgggaatgtgctggatctcacttgaagccagcacgtctcagagtctcacccaaggcccacggcataccacctgggtgtcactgttggttattccgggcccaagggccctttggtcagcaggtgatggatcctgccaggactaggtccatcccttcaagggagcagattcccttctggcccaaggtgtcgagaaatatcatttgggagctagggcctagaatgggtgcctcacgactgcctggtgccctatcctgttgtggctgagctgatgtccaagatgcaagacgaagtcctctttactcttcgctctcctgtcctcaagaagaaggaagggtcactttcattgctgtaaactgtggtgcctagaattgggggaagggtggcgcaagcactcccttagccacccaggctactgtctccctgggtcacatgccgccctagtccactggctataagcccagcccagcactagaacttgcttaggaattgtagtccttgtggtctagactgcctttcaagtttacctagaaccccagaacactttagcacacgctggcaaggcttgctgagaaactcaagttcccacactggggtgggtgatttctctctggccagaactggtccaaatactccctctgtggatatggcatcagctgagcccagcatggctttactctccactgtgtcagggcagcactgagttcaatggcaagtcccccagtcgctgtgctctccctcacccaagtgtgcagatcctctccaggccatttagcagctgctggaggaaggaggaggagtggtgtcactcaagactgtctttcctccycttttcaatgcctctttcagtgaaataaagttaaaacaagatactgtgattgcttacctgatttttcattcttattatggtgcttttttgtgtgtagttgttaaaaattggtgttcctgcaggggggatggtcgggggaggcttctgtctggccatcttgctccacccacctcaggatacatttttaagtgttagcccaagccacagagccagtgcagactcctctctggaggagcagggaggtgttgtgatcagtagggaaagacggcattttcctaagagccacctgagttgtgaaacctgatgttgcagtgcccacatgggtgtccagagcggctcctgttaaacagccttggttctacagtaacacattccactgattttgttgttgttctaaatctcatctgcttttggtatatgagtgtagagggcttgggggttgtttgtgcatatgcatgggaaaacagcatgaagtcattggacttcaggcaatttatggacaaaaggcaggttttggtgatcccattttggcttcctccttcaccaagcagtccctgccaagaagctcctgacgtgcctggagcaaccctggcctttgtccctcgtggcaggtccagtctgtaattgggagtctcagtccatcatcgacagtttcttcagagtataaaaagggaaaagggagggggagactaccaaattggcactttttgagccctctgtatatttcagcttggcttatctaaagccaaaccagctttttgttgttggcctggaagcaccagggcttcggggccaatcagaaccttaggagtagtcacctcctagcctgaggactgtgtttgatatggagcacatgctggaggccccttcacaattgtgaacccacagggagttcactcttaggagaggagatggggtgagaggaggggaggaaggacaaatgggcactcagcatttgctgaatgaatacatgaatggcagaaataaaagcatctttgactttcatatgtatctgtttgtccatattggcagaaatggggatctgctctttggctactcaggggagaaggaatgacacttgtgactgatttgattctgaaattgccaagacagttactggcttaacttctcgtgtccttgtaagccttaggtaatcaactgtagcctatacaatccaagccctagctaatgtcaaatctaaacttgcagcctcttgcataatctttaaatacattgtggtgctgtctgctctgtttcggggctgttttggtattgtgtaaattaataactcatgatttaataaatcttgcttccgttctttgaagagatgagcacagttatccaaaaataaatctagctatgttgatatttagtgtcagttaatctaccgcctaacatcccattattaattttcttcaaacagtcaaaatattttaagagcttaactgaatcagactggaacaagctgctggcttctctcggcatttaaaatattaatttacaatttttgactgatctattaggtagaaaaatgtaagaaaagaaaaaagcttcaaccatgacactgaaaatatatattggtattttatcatgtttatttagatgttatttgatttgcaaaggatgaaactcatttatcagtctttctaaatcgacattttaaccaaccttcaatttccataacgtattcataccctgcttgtgaatgacacatcttgttttcaaccatttagactaacattatctcattgtactccaccccgagttctttgaggtaggaaagactgttgaattgctagactgcttaattatttggggccttgatttctccactgagttcaatagtgctcaggcttgaaaaggactaagagtcaccagcgtagtttgtgggaaatgcacattcttgacaggcagtacagaaattccaattcagcagctctggggaacccaggaggccaggacggctagaggggaagcagggagtgaggggaaggacggtggcgtcctggagctctcccttttctcactgctgtgtttcttgggcatctcagctgagtctcaggtaatctgtggagtacattttgagaattcctttgtgcccttggagttctgatgaaggctggcctttttggtaagtcccagctctagtgtcaaactggcttatgagatatgctactaaggcgttcatatttattcagtaaatactcactgagcccctggagataaaggcatagttctaggcactgttcggcgtggaccacacgaagtttttgccctcacggagcctgtctgtagcatagaaaatggacaagagaccagcaacttgcataaaatgatgccagatggtgataaagctcagaagaacagaagcggggtggccagagcacaggagtgaggggaagaaagggagaagttgacaccacctaagcaggagacaccagtctgggcctcacaggctgggaggagggctccctgcttagtgaggtgtccctgtcattttaaattcagatgtacaaatttggattcatcgtgacccttgactcatgacacactgtcatcactaacgcaggcatggccctttcatattggtttatttatagtgcagtgggcatctttgaacatagaactggaccaggagctgcagcatgattggcagcctgtgctgcctgggattgccccccaccgcccccgcaggagctgctgtcccctggcgtgtttatcattctctctcctgttttggaggggatgcttcaccatatatatatgcatattcctaaatttattctttaattttccctgggttttaacttaatttattttaaagggattatatgttatcttcagggacttaatttttcactgaacattttgtgttttttactaaatttcattcaatttgttggtttagctatagcttattcattttcactgataggaaatattccattatcagaatatatactaatttatttatccatttttcaatcaatggtcattcgatttatttctgggtttctgtttttctattataaacagtcctgctcttacattttaaaataatgaagagtataattggattgtttgtaacacaaaatataaatgcttgaggggaaagacaccccattctccatgatacggttattatgcattgcatgcctgtatcaaaacatctaatgtattccataaatatatacaactcttatgtacccacaaaaaaataagaataaaataatcaaataaacagtcctgctcagaacattcttgttcgtattccatagtacccgtgggctacagtttttcttggatctattcctaggagtggaattgcttggtttaggacagtggttcttaactgggagtgatttttgcctcccagcagacatttggcaaggcctagagatatttttaattgccacaacctggggaaagtgatgttcctgtcatctattgggtaagcgtgagaacaaaaatgtagacctaaataaataaacaagcaaagaaaatatcacctagagaaagaaacactgaaaatattacacacataactatagaatgatatgaccaagttgagaccacacatatcagtcatatcaataaatatgaattaatttaacacacttattgaaagctttttaaaggtggtgatgatgtggaaaaataggtatgcattaaaggataggaaaacaccacaaaaagaaaagctaccaagggagctagccctgtcaagcattaaaacataccctaaaacctgtatcattagaacagtgcagtactggctcataagtagacaaacaggctagtagaataaaatagcctagacatagacccaagtacatgtggaaattgagtatgatgcaggtggcatctcaggtcagtagggcctcagtcataaaaaggaaaaacaccttcagatggtcaaaaacatcattagaaaatcaaaagacagccaagctgggagaaaatatttgcaacatacattacagacaggactaatatccctaaaattattttttaaatcataaaaatatagggtaaaacaccaaaaatgggatagaaaatgaggaaaagaaacagacaattcaccaaattttaaatatatatatgagatacttaaacagatgaaaagatgttcaaccttacccataattagggaaatgcgaattaaaattgcactgaggtaccatttctcacctaccagattggcaaaaattaaaaaaacataacaacaggttctgttggtaaaggctgtggggaaaygccctctcataccttgctaatgagaatgcagattcatccaactgttttgaagggactttggcaatgtctaagaaaactatgtacatcacacttccagcaatatatgaaaatacatatataccactattaactgaagcttgtttgtaattgtagaatattggaaatagccgaaatgcctgtgcagaggcgtgtgattgaatacattatgatacactcgcacaatggagccacrtcacttttttttccatcttcagaaaagaatgagaaagacctctatgactcacatgcagtgattgccaggatatattgttaatagaaaaaaagcaaaatgcaagagtatccttaatacgcttactttttctggaaaaagggagatataaaatacccttatctgctcatttctactggggaaacaacacaggaaagagaaacctgaagcagagaaattggttatgggtgggtagatgggaaaggcatgtcacaggtgaggagcggggaatagaggaaagcaggtgtgtgttggggaggcctgactctgagcataccttcttatgtagttctgactgttagaacatgtgaatgtttcacatacttgaaaaagtaaataaactggacaagattttaaaaaagaagaatgcaaaacaagtaaattgaaatgtatttcaattgaataatgtgaccatgccttaggggataggagagggatagagaactaacactagtaacctttgaacttgacattttgaccctaaacccttaagctagggattataataactgtgaactaatattaaacttcagttggttggctggtttttcacagtggtttggattagtgattctgaaactatgtgtattctaggtttgagcaaatacggaaataaattgtggataatgggagccaagtttcatccctttggagagagaagttataaagatggaaagtagaatgccaaaagtcaaccctcagtgtgttggactgcgattggaagtatcagtatcaatggattgtttttaatgtatggatgtagaaatagatatagatgtgtctgtacacaggagtgcacgtttcccaattctgtctgctgagaaggtctagaagcagtgagaccccagcaacagtgagcacaactatcatccacatattagtttctaaatatcattctcactaataggaactccttggagaagtggctgattccagaacaggagcaggaaaagatgagcctagagcatcttgctgtgccggaaagtaaggaagtgcccaaagaatgatagggacacatcaaaggacacaggctgggcacggtggttcacgcctgtaatcccagcactttgggaggccgagaatggtggatcacttgaggtcaggagtttgagaccagcctggccaccatggcgaaaccccgtctctactaaacatacaaaaattatagcattaggagatatacctaatgctaaatgacgagttaatgggtgcagcacaccaacatggcacatgtatacatatgtaacaaacctgcacattgtgcacatgtaccctaaaactaaaagtataataataataaaagaaaagaaaaaaataaaaataaaaatacaaaaattagctgggtgtggcggtgcatgcctgtaatcccagctactcaggaggctgaggcaggagaattgcttgaacctgggaggtggaggttgcagtgaggcaagatcgtgccactgcactccaacctgggtgacagagtgtgactgtgtctcaaaaaaaaaaaaaaagacacagaagccagttgaaaggagcctcctactcaccaaacccaggacaattgaacaccaaaataaataacactcataatggattacagtccattgaatacagtagtaatccttgagtccacactgatttaagtaaatacatggtaaaaaattgaaagctatcagtgtaagaatagctcacggtatattgctcatttctttaacaatagctgtgggaaagctctttctttttttatttttatttttattattttattttattttattttttattatactttaagttctagggtacatgtgcacaatgtgcaggtttgttacatatgtatacatgtgccacactggtgtgctgcatccgttaactcgtcatttacattaggtatttctcctaatgctatccctccccctcccccctccccgtgacaggccccggtgtgtgatgttccctaccctgtgtccaagtgttctcattattcagttcccacctatgagtgagaacatgcagtgtttggttttctgtccttgcgatagtttgctcagaatgatggtttccagcttcatccatgtccctacaaaggacatgaaactcatccttttttatggctgcatagtattccatggtgtgtatgtaccacattttcttaatccagtctatcgttggacatttgggttggttccaagtctttgctattgtgaatagtgccgcagtaaacatacgtgtgcatgtgtctttatagctgcatgatttataatcctttgggtatatgcccagtaatgggatggctgggtcaaatggtatttctagttctagatccttgaggaattgccacactgtcttccacaatggttgaactagtttacagtcccaccaacagtgtaaaagtgttcctatttctccacattctctccagcacctgttgtttcctgactttttaattatcgccattttaactggtgcgagatggtatctcattgtggttttgatttgcatttctctgatggccagtgatgatgaaggaaagctctttcttacagtagaatgtgaactaagaaatgtaaaagaaaccagaaaattgggtagcaaccatagtaattgtttcagacaagaatcaagaatcatcaatggatgctaaaatttatgggtgacagtttgacgacggactgggtgtgtgtgcagagagagtgcagatgtgagtttgcggcaggtgcagggtagtgctaacaggacacctagatgaagggtgtacgggaattctttgtactattgttggaactttctgtgagcctgaaattgtttaaagttgtttcagaataagaaattaacatttgtaagcatgcatatttagatatccacattggatgaaatgatatgtgtttggcccagaatctgactgttgcttctactctccgcaatgccgccatccctctccaagcctctggtccctcacacctagattattatagctgcctcctgcctggcctccccactgccatcctgcctctcatcagttctccacgtgaagccagagccttttatagggaaaatcaggcatgtatcttctctcttcagaacctccaatggctccccatctccctccagtgaaagcctgtgtcccctgtgacagcccatcatctgccctgactccaccccctctcccccaccactaggcccagcgctgccttaaggcctttggccaaaggtttccccaggcccccattcctcctagtcttcaaggctctgctctcctgtctcttctaccaccaagtgcaactgactacaccccaactccttatctccttaacagcctttattttctttcgttgtacttatcactttctaatgtaggatatgatttccttattgttatgcttattgcttttgtgtttcctctggaaagaccctaagttccacacaggagagatgtttgtctcttttgttcattgatatgtcccaaccccctagaagaatgcctggcacatagtaggtgttgagtaattattggttgagtaagtgttgattcagattcatgcatgtatgtgtaaagagatgaaaattaaatgtcttctttcaaatactgagatgagcaattagggaatgatatattattaaatgagcctgaaatacagactgtgcaatcctggttttgagaaaaacagacatatacctattgataagcgcacttgtaaacaggctagaggggatatctgtacactgcactgttagagaggagtgtttatgtcatggtgggtggggcaagatcattagtttctttactttctgcttaagacaccgaagtattgtttgatcacttttactagaatcatgcattaaggccaggtgtgatggctcacgtctataatcccagcactttaggaggctgaggcaggtggattgcttgagtgcaagaattcaagaccaggctgggcaacatggaaaaaccccatctctacaaaaaattttaaaaattagtcaggcatggtgatgcatatcctgtagtcccagctactcgggaggctaagatgggaggatcacctgagccccggaggtggaggttgcagtgagccatgatcacgccactgcactccagcctgggtgacacagtgagaccctatctcaaaaaaaaaaaaaaaggaagaagaattatgcattattcttagaattacaatttacagtataaagtttcctttcaagtataaaattcatggggtacatagtgacstgatgctagaggtttcctcagccagtgtctttgttcttaggagcattccctgtgctgggcactgtgtgcagtctttatccgcactgttgtactcacccctacttgggaccccaggaggtgggtggcattatcccccattttccaaatgaaaaaacaggcttgaagaggctcaagcccacagtgctacagtactaagtgacagagtgacaatttggatcccagtctgacttgagagttcaaactttcatccttaaaaaaaaaaatcacttgaagccaaatgctcagctcttccccagcctgcagcatgtcatgcttgcttgcttgccacccacttggccctcagctccctagagtctccaayctccctgtagccaaaggtgaactcaggacccagcaaccgaggctgagaactgcctcaaattgttctgggcccactcaattctgagatctcttaggcaaaatatgtgctatgcttccatcttaaatatgtatgccaaagctgtacttggctttttatcttttggaggcaagtgatttcaagttccgtgtaaatayggcattctgtctaaaacctagtaatgtcattttgtgggagttccccatcctcctcctccctactccctactcttgaaattgctattatctttatctcagggctcttaaccttgggtccatgaactcctgggaggtggtggatgggtttcaggaaacctctgaaccccgcagttttctgtgtgtggatgtccttctgtgccttcttctgagggagagggtctgtgactttcattagaataggaggctcattcccaaagcaggttaaggacgctggtcataggccttagctagaactgggaggccgttctccgtaggctttctgctgacctgcaggtccagcttctattctctgaactcttgtttcatactcagtacactggaacatgtgtgtttcatttccgggtgaatttctggtggcttgcacattaaagcacagtgggagagatcctactgttgaagaaaatggccgcgtacaggaagcagaaggagttgctttcaggcaccagactggagcagcttgaaaaaaaaatgcttgggcattaaacctgtttttcagttttctgacagctaagtcatgcagaaagaaaacactttatgttacatagtttttattttgtgtcaaaaacatactaagtcaaatttagagataaatggttttttcttagaactaatttcagggagttgtttgtttgtttgcttggcaaatactacttactaggtatacattgtctgtttagttaatttctacagcacagtcattcccagaggcagtggtgcacttatatctgtccagtgaatgtatgtttaggacttaaggataacagagtttccctaagattccacaaaaatatttagtctacattagcagtagcctagttaggcaatctagattgtccccctttttcaaaaatgctaatgtgcccaaatcatcagactcrtaatttctaaagatacctttgaaagccccgtaattcagatctctggtttccttccacaaatttcaactgcatttgtcccaaagaggtggaaaacatattcctctatccctagcaggtatatttcaatggctggcatttacaatagtgaatttaaatgttggagaaggcaattccacctccaagggaattttattggattttacttttaaaatattttgaatgtatgaaattaatgctaggtagaaacaggtggcacttgcctttttgagacagggtgaaactgtttttaaaatttagaaaagtgggttgagtgaatgcatagtactaccactacctttatttttatttttatttttttaaggctgtctaattcagttttagtcagtgataaatgctggatgttttcaggccagactacttgtcttacgcttatcctacaccctttggatcccttgcaacttgtctccaatttaacatttttctgttcyaatacttatctycattcttgtaacaaatgcttattgatcaaatactatgtgaaagataaccccaaactgtaatctctagcactgattacattgcgggtggcatccccattgtcacccacaatgccacatgcattcttcctgatgtgctatcagcctacctcgtccctgcacactagccccccaccccatcttcactgctctcatctcctgtcgtctgaacccttgctccagccgtctcattggtctcctggtctacctgctttgaaacactstgcctcccctcatcttccacactggactcatcattccagagatgccagtctgctaccctgttggctcctgttgcttgcaggataaagccccccctttctaggataggtggtgtacatggtctgtataacccggcctcagttgacctttctcctcttcttccctctctcctcccttccctgggtatcctcagtattctctaatgtttctcagtggaggcactgttggcagtttggatggaacaatttcagttccagtctatggaactggccagcgtattgcagaaggtttagcattcctggctccaatctgctaaatgccaatagctccctgacttactgtgacaagcaaaaataccttcccatttccaggggctccttaggaacaagattcccatgcctggtgcttttatgctttgtacctgcatttctgcctatggcacccttctccacctgctgccccttctggcaaaacggctgtgcattctttgagatggggctctaatgtcatctttcaaatgcctacccttatttccaggccgagatagccccaccttcctttatgcccctagaatcccatttatgcctgtattgaaggggtgtgctgtgtgcaaagaggattgtggattgatcttaaatggatcactttgctttagaatgccatttgatggtacctacagtatcatatattgctgtgcacagtgcctttaggaagatggtaaccgggaggtgctgggagctggccagtgccctattaacatctgttgtgttccacctcatgacatagcatgccagagcccttggtactagatacagggagcttcacaaagaagggttctcttgggacttcataatttctataggacaaagagacaatgtaaattattagcgttagccttgttgttcgaagaacagtggtattgatcaatagactgtggatsccttgcaacttgtcttagggtttgtattttaccaaatggagccatttctctccaaacccactgcagtcaataatgtgccgcaaaaatgatgtttctcttcctgacccataagctttgtttcgaagagttattaacacagaagcccaagctgctgttttcttgtagacaatcgggttgtcctgattcaaatttatacatagcaattgaatctcattaacttggacttatactgtatagaccaagcatgtaaataattgaaaccttccagggctatattaaatcttcaactgattttaaaagcagtttatcttgatattttactttatttcttaatcccattctacacagttgatttttcctccagttaatcttttcattgtgtttatacattgagataaaacagttgctcaattttaataaaaatgacatgcacaattcctttctgttggcgattgaattaaaaaattagtatgcatttacactaatatggtctatggtattattgattatataaattgtattatattggattttaataaaagttaatttaactaattgtactacatgtagttacaggaatagtagtcatcattcttatcatcatcgtaagtaacctgacttgtaagcaaattgtaattagcgggcaggctctggagccaggcagcttgggttcaaatccttgcttggccatttctactcatgtgagtttgagtagtcagtctctgtgccgtcatttgctactctgtaaagtggagctaattgaagccttccttttgggggttgccatgaaaattgcctatttaattcagatagcattgcttacagctgtgccagtgggcagtgggcatgggagtgggaggacagtggtttctactagacacttgttgaagatcatgaaatgttgtaggccttgttcatgcacttaattaccacagcaactgttgatcctaagcaatgtgattattaaaaagtgccattgtttccattcaaaaatcctttgtaaataatctgggttctttaatcaaacctagagtgaaaattcttgtcttttccccctccccatcttgagttacgtttttagttaggattccatggtgacagttcttgtgtctgcttttaaggtgactcattattgatcatgcttatttcactgcgcatccatctatgtccagttctttcaattacaaagatgtgtgagacttgccaaatggaattttggagtagatgctttgttagtttttgccttaaaataagctatcataatactagctacagtttattcagggtcacctcccccttcactggctatcccttcttggtctcctttatagattgctcctcatctccccaaaacattgacgtgtctgggagctcagcttttggtcttgtcccctctctgtctactcctactccctagataatctcatacatctcatggctttaaatggttctatttgctggctgcacccaagttgacatccttagtcttggcctttccctggacttcagcctcagattaatctgcctgttcatgtcgccatttgacttccacatttgctgcttgagattcttcctgttgcccacgccagaattcttggagttgtccttgcctcgtctttctcccatacttcacaatcaatccattggtaaattccatgggttcttcctgagaagcatatccagaattcactcacctttccccagtgccacccagttcaggctgccatctttctccacatcctcccaactggcctctctgcctccacccttgcacccatgtaatctgcacagcagctagagtgccacttgtgcagtgtcactgttctgctcaggagaatccacgggcttcccattgcaccaagagacatccttaccatgatctctaagcccctacgtgacccatctcttccccatgttatttgtttcttgtttccaggctccacccactagaatgagagctctgtgaggatagagactgttttggtcactgctgtatcctcagtgtacaacgcttttgtatccctcatatacagtagcacctggctcgtgctgaatgcccaataaccattcatgataggaatgcaccattttacagtgtaatctcacagcagccctcaraggaaggtactgcacagagaggcagaagaacttgcctgcctgcctagcaaattagcagcaaagccaaaatttaacctcagtcagccggactccaaagtgtgtttgctttctgctgtactacatggcttcccattactggatgttcctgaaccactaccaagtctctatggattttattgtacctttgaagtcttactgtcttgagtttgttcatcgttgtcatcaaatactttttgagtgcctgatttccatagggtttgtgccagtcacaaaagataaaaagaaagtcagtgtcaggtccctgccctctgccctcatccttgaacaaatcccctgctaggctgcaagctcccccagaagaatataattttatcacattatttcttgttacttatcatatttccaagtcttagaactgcacctggcacaaaggaagcgttctgttaagagctgttdaatgaatgaatgaagacaagcggtacaagcaagcgctagaggaattaaagtttgagttttggttgtgccattcagcaaagactggcagagtgctgtcctgcgtttggtaccacgccagtggctcagggaatcattggaccgccctcggtgcttgttagaagtgtcagtttcgccccagaattgatggggtaaagcgggaggcaggctcgggtatctggttcagatggagttgggctggggtccacacctggagaaacctactgccacctagccatggacaatacagacccctggagagacttcatgactggaccattgagggagggatgcaactgtggtaagccgaacaaacrgcctttcaaacagggagaaatacaagtgaacagtgagatttgccttttgatcctagaagagtatgcccctgccmctgtgaatattattctgatgactgctaccacttaatatgcctactgtgtgctcaggactctatttgaccccttactatatgcttatgattatttatttgatgttcacactcacccgtcagccgaagatgttatcactgttttatagatgagaacactgagactcagaaggttcaataacttgttcaaggtcacattaagtggtacagctgggatttgaagtgagatccatgaaatgcccaagtcctggtctttctttatcaacctctgctactatccatgaaaaggtcacagagattcaaagaaatacagaaagctcctagtgcatgtaggggactaagggaaatgtattgaaatgagtgaagttttttaaaagaataatggttttgatcaaatgtaattttggtaggcagtgctttctgaaaatacttctgactttcccagttctattttcttccttcacacaagcgttatcaaatgattgttttgttgataaatttagtgtgcagttgggacttatatgtagattgtacctaccctcaaagggagagaggattttatagtttccattcattctcattaaaatcagaacatttgcatcttaacttttacatcttgttccaggaattttaagtagtctgattgtatggaagtgggtcgtattaattgcaaatgggctagacatctgctcgctaacatggaatgattttttttagctctgttttgtttttatatatgatctaccagagtgattaagtgagggctgttggtgatgctgttacaagactgggttttcagagacttataatgtaaccataaaaaggaatttaagagtggatctttgaaagttcttgaactgggagcgattaaacrtcttagagttgatagatttttatccacagtctgtcagggagccatttcctatccttggagcctctgttggtctgtggcacagtgaagtcaggttcagtgggttccagactcgggggtgagggagtggggagcagcattgctgtcacctttttgcctgcagggagtgacatgggagtgagtgaagtcaggtgtggtatcaaaccacaaaaccaggatccaggctaccagtgcctggttgaatagcgagttatttttttcctgatactaatgtaacagtgtttcccaaagtgggtttcttggaacactaattcttaaggaagttcatgtgtgcagtaagtttaggaagcactcactggttaaagaaagctaagcactttccttagttgcagtccttttcagagcctttaattcatacacactgaatcttcaagaggagcatgttgtttcctggacatgcttgaccacagaccccttttcatgaagtagactttggaaaatgtcaaggagagcttcccaaatacttctttttaaattaggaactccagaatctaattggtctcttggttatatagtttaatatagagtctcagttcctcggggtggtaggcttagcccccttgcctttctggacttttcaggcccttgctttttaagatttgccaagttctaaggcagaggtaccactggctcagctgtggggcagcagggaagttggggccactgcatctccatgcatgtctgtgtttgaccaggagagaaaggcaatagacagttaacagcagtgatcagggaaggaaaagtaaaatatgtaaaggatggagagtgctctagatgagtgacatttttctagattcctgaccatgcacagcacctgctagctaggcagggctcagtcagcacctgtttaatgaatacgttgctaggtactctgcatctttgctaaaagactatatctaatgttgatataccatcatattcttgcttcaagttagttgccaaatgtatataatctttcacaccttctagaatcaaaggttaaaacatgagaacttttcttttcctgcaaataacagatgttcttttcatacagaaatatctactgccttgccacgaagcaaatgttcctggccattattattctaggagtgggaatggatttgaacccattgttccaaacccttatttggtctctcttggaaccagtgacagctgacacatgtaaggggtgatgtctgctaccatggaaccaagcaaagctagttgacttgcaagagggatgaagctgcagtttgaacctgtgaccttgacctcattaacttcaggcatctgaagcaccagcattctgataatggtgtcaatacctatcttagtgccaaaatcctcctaatgtttagtggtactgttttcccatttagtctcctcctcctgcacgctatggcttgttacccaaaggaaggatcacttgctcatccttaatatggggaaatcatttagagcacttaatttgtgttgactctttattggtgcactattgcaattaagttagattaatgaaaggtaaattccagtctatacatgaaaaaaaaatctcttgtaaagatcctaattagtatgtatgtttatttagcctctcatggtttaattgcatcccatcttgctatttacaaacaggcatcattaaaaaataatgagtatatgaagagcattaatactagtggcagatgaggtaactggtggttgtggggggtggggagggatagatgggaagtctgctggtttgtattattttcgaacgaaggaaaatgcagaasgatcctccgcaccagtccaggaggggaggacagagcagacattatgcaaggcagcagcttgtcctttggctgcaaagagttgggctctttttaatttgtcgctgcagtgtaatctgtggaggtgaacagacacactcacacaattgtctgtgaccttagccggtgttgtttagatggaagctttcttttcagccctgcatagcaggacatctgcacttcaaatccgtgaggattccctaggatgctgaaaaagccatgcaaagtgtgggacttttctgtattactcagctctgggcccttcagtagccctttaaaaaaaaaatccaaatgtaaatgagttgagaaacaggtttatgttatttcactggcacccctaatatcacattctgattttacataatttgctgctgttccttgatgttacaaggcagttttgtctttaggtagatgcttaatcatttatattctcttacaacctggtttaaggatagaaaagctgagattccaaatgggatacaatgtaacaaggaaaatagaacaatatggaagaatccagtaataatagtaatacataatacattcctataatgtattgtgtggttgtgtaattcttggcataaaataaaattttctcattaatcaggagtaaaatataggggtagaggtggtaaatctgagaaggaagtgcctagagccctggttgaataatgcttgtaggaataaacaagactcttaaataccagcgcctcggtttccccttatatcgtggtgatcattgcaaacagttttgtaaatgcattctacataaatgcaaactgctactattcaaatcttataaaagccttagatttctctagggattcctgggtgagttgaagtccagagtttaatttatttaaaattaggttataggaattcacagttttcagtacatcttatgtttttcttcaaacaaactacagtttaattttaagctaccctaaatagaagcaaaataaaaaagttttcagtattctaactacctcatgtatctaaggacacagagagctgcattctcagacacacaagaacccaaacagtgttgtttggttgcctctctcgttgttgctaacttgcaactgttccactttcagctcacagaactgtgggacatatttttccattcttattaattggatttttaaagtgaccttgtccacatattgatttgtattaaaattgtctacatcaaggtcaagttggcatatatcctacagacaaaatattaaaaagccagtgctgctgtggcacccttctaatgcaagcggcaggtctgtgtggggaccaccttcacctggacttgaatctgccttatcaagaggacagtcctgtttaagtccaggggcccaccacttttggggaagagcccccttgagcccctcagagtccacactaatgctgctcacaggagtgggtttaggatgagcatcagcttatctgagattcactcaggctaccttgaaaaagagggcctattattattgttcataaaattgaactatctctagctcagccctcagctgtgcctggcctgcccatttaacatctcttcacttacrtatttcaaaagtatcctaaacttggtgaaaaggaagtgatatttcccctccaggttttttcccttcttcttctcaataaatagcaaagtcattacctggtgctcaaaccagaagcctgcaggcttccttacgtagtttccccttttttctcactcctcatatccactccatcagcaaatcatatcaattcctaaattgattggcttctcacttctctactgccaccaccctagttgaagctgctattgtcagaggcatttgaaccagagcaactccatcttgaataggggctgggtaaaataaggctgagaccttctgggctgcattcccaggacgttaggcattcttttattaaagttcttttttttttttttttaattgatcattcttgggtgtttctcgcagagggggatttggcagtgtcataggacaatagtggagggaaggtcagcagataaacaagtgaacaaaggtctctggttttcctaggcagaggaccctgcggccttccgcagtgtttgtgtccctgggtacttgagattagggagtggtgatgactcttaacgagcatgctgccttcaagcatcggtttaacaaagcacatcttgcaccacccttaatccatttaaccctgagtggacacagcacatgtttcagagagcactgggttgggggtaaggtcacagatcaacaggatcccaaggcagaagaatttttcttagtacagaacaaaatgaaaagtctcccatgtctacttctttctacacagacacggcacccatccgatttctcaatcttttccccacctttccccgctttctattccacaaaaccgccattgtcatgctggcccgttctcaatgagctgttgggtacacctcccagacggggtggtggccgggcagaggggctcctcatttcccagtatgggcggccgggcagaggcgcccctcacctcccggacggggcggctggccgggcggggggctgacccccccacctccctcccggacggggcggctggccgggcagaggggctcctcacttcccagtaggggcggccgggcagaggcgcccctcacctcctggacggggcggctggccgagcggggggctgacccccnnnnnnnnnnnnnnnnnnnncggctggccgagccggggggctgaccccccccacctccctcccggacagggtggctgccgggcggagacgctcctcacttcccagaccgggtggctgccgggcggagagactcctcacttctcagacggggcggctgccgggcggaggggctcctcacttctcagacggggcggttgccaggcagagggtctcctcacttctcagatggggcagccgggcagagatgctcctcaccttccagacggggtcgcggccgggcagaggcgctcctcacatcccagacggggcggcggggcagaggcgctccccacatctcagacgatgggcggccgggcagagatgctcctcacttcctagatgtgatggcggccgggaagaggcgctcctcaattcctagatgggatggcggccgggcagagacgctcctcactttccagactgggcagccaggcagaggggctcctcacatcccagacgatgggcggccaggcagagacgctcctcacttcccagacggggtggcagccgggcagaggctgcaatctcggcactttggggggccaaggcaggcggctgggaggtggaggttgtagccagccgagatcacgccactgcactccagcctgggcaccattgagcactgagtgaacgaggctacgtctgcaatcccggcacctcggtaggcggaggctggcggatcactcacggttaggagatggagaccagcccggccaacacggcgaaaccccgtctccaccaaaaaaatacgaaaaccagtcaggcgtggcggcgcgtggctgcagtcgcaggcactcgcaggctgaggcaggagaatcaggcagggaggttgcagtgagctgagatggcagcagtacagtccagcttcggctcggcatcagagggagaccgtggaaagagagggagagggagaccgtggggagagggagagggagagggagagcacgttaggcattcttagtcacaggatgagataggaggtcagcacaagtacaggtcacaaacaccttgctgataaaacaggttgtggtaaagaagccagccaaaacccaccaaaaccaagatggcagcaaaagtgaccattggtcatcctcactactcattatatgctaattataatgcattagcatttgaaaagacactcccaccagcaccrtgacagtttacaaatgccctggcaatgtcaggaagttaacctatatagtctaaaaaggagtggaacccttagttctgggaaatacccacctctttcctggaaaactcatgaataatccactccttctttagcatctaatcaagaagaaactgtaagtatagtcagttgagcagcctgtctatggagtagccattctttttttcctttactttcctaataaatttgctgtcactttatggatttacctcaaattctttcttgcacaagatccgagaaccctctctcggggtctggatcaggatcccttttcagtaacaccatcattccctctcctggtctttccatttcttctcttgatgcctccacaaagcagccaggaaggtgttcctttaaaagcacacatcagacatgccacttttctgctgaaagccctacagtagctttccatttcacccagacaaaactcagctcctcatcagagtctcaaaggcccctggtggccagccacactcttgcccacctgtccgacctccgaccccctttctgttcctaggatgccaggcctttgcaggtgctgccctctcggcctgtgctgctctgctccggcactgggcatggatgaccttgtcttacccagtaggtttcaatcaaacttgaaccaacccccttgttagctttgttgtcttcacagccccatacggaccaaatattttttgtttattatctgcccacaaccccctcccccatccaagaatgtacaagcctgagagcacaagttgttgtattccctgctcagtctccagtccttagaacgatgcttggcacgtggtgggtacttaataaatatttgagtaaatgagtgagcaagtgaataattgagtgatctgttctaaatgtcattttttcacatgtagatattacctgagtaatctctctttaagctatccccgttttgttcatttccttcataactctttgcaatttctatgtctgtatttatacacttcttcattgcctgtctccttcactagactgttagctctgtgaatgtctatttcatttctcactctgggtgcctaatgcctggcctgcacataatatgtatttaacagatatttgctgggtagatgggaggaagaaggaactggaagggcgaacaatttgcagtccaaggcagctctgggttcttttccatgttctgcagtccaaattctggaaggaggcaggttggttttttcttttctttttctttttctgtttttttttttttttttttttttttgacaaggtcttgctcttgctctgtcacccaagctagagagcaatggcttgatcacagttcactgtagcctcaacctcccaggctcaagaaattctcccatcccggcttcccaaagtgctgggattacaggcatgagccaccgtacctggtcctggaaggacgcagttttgttggcctaagcagtatgaggcagagccttctctaccaggccactgtgtagggtgcctacccctgggccagctggttccacccagcacagaaaacagcagcttccttgggtggcaggtagtttcagtgagacaggaacacagtgtgaggcaggcttcattactgtcatgttcagtgtcatgtacagataaaggacgtgtgctgtcgaggattcctcttcacatctgttaggagcaccttgacattttcagtatgttcaagaaaacagtagcttcccattttgtcaggtaacctgtatcccacttgattcacatagaatctttttggattggaggccctatttttatacaggcattggcattcattctgtattcactttccctggaagggctatattttatatatttgaatatacgttttataaattaaatgagctaattttgatagtttgggggatttttcccaagactgcaagggaagcccagaggtagcatgaaaccaagattgggaagcacaattctctattctgtctttgtttctttacattttatgtgaacttgtgttgttattattgaaagggagacgagatgagataggaagattgtgaagaattttatatttacaatgtgagatggaaaactatttcataacccttcccaggcatgaaaaccttttataacacttggtaaatggattagtccactgtgttgaaattcccctccaaccaggatattctgaatttagaagagaggagaatatggaagagctaaggaaaattggaagtgctgcccaacttgttaacattgatggctctttagcaaatgaccccagttcactcgtgagtggaataagctacctcataaaaaaaccttgttggccaggtgcaatgactcacacctgtaatcccagcactttgggcggtcaaggcaggaggactgctcgaggccgggagttcaaggccagcctgggcaacatagtgagaccactccccccccatctctatttaaaaaaaaaagaaaagaaaaaagaaaaattagtccagaagttccaggctgcagtgagctatgatcataccactgtactccagcctgggtaatggagcaagaccctgtctctaaaaaaataagaaaaatataaaaataaaacacgtcttattaggcagggtgtttaataatttttaaaaacaaggataacagactggccgcagtggctcacacctgtaatcccagcactttggaaggctgaggcagatggactgtttgagtccaggagtctaagaccagcctgggcaacatggcaaaaccccatctctacaaaaaatacaaaaaatagctgggctggtcgcagtggctcacgcctgtaatcccagcactttgggaggccaagacaagtggatcacgaggtcaggagtttgagaccagcctgaccaacatggtgaaacccccgtctctactaaaaatacaaaaattagccaggcatggtggttgcatgcctgtaatcccagctactcaggaggcagaggcaggagaatcacttgaacccgggaggcagaggttgcagtgagccgagatcacgccaccgcactccagcctaggtgacagagtgagactccatctcaaaaaaaagaaaaaaaaaaaaaaagctgtgtgtggtggcgcatgcctatagtcccaactatttgggaggctgaggcaggaggatcacttgagcctgggaggtggaggttgcagtgagctgagatcatgctactgcactccaacctgggcaacagagtgagacactgtctctaaaaaaaataataatgacaacagtgataatatttgccaccatacagggagtgcctactgagtgcagtgtccaatagtagctctcgtggacgctcaatagcatcagctgtgcagtccttagagagggttccatgttggaagtaagaaagcccaggtgcatgtgggccgcctttcccagggccactctgctctgtacatggcagaagcagtatctgaacctgggtctcaggctccaaacccctggttatcccactctgcctttccctgtgccgaggggactaatggggtaacacctgtgatatggtttggctctgtgtccccacccaaatctcatcttgtagctcccataattcccacgtgttgtgggagggacctggtggaagatgattgaatcatgggggtgggtctttcccgtgccgttctcatgataatgagtggatctcacaagatctgatggttttaaaaatgggtgttctctgcacaagctctctctttgcctgctgccatccacataagatgtgacttgcgcctccttgccttccgccatgattgtgaggcctccctagccatgtggatctgtaagtccaataaacctctttcttttgtacattgcccaatgtcgggtatgtctttatcagcactgtgaaaatggactaatacacccgtggccaccactgacccagcactctcatggttcagatgtggtgctgagcacttcacatgcatggtgtcattccttccagggttgacaggcaagaaaactggagcctaaagagggtaagtgacttgttcaaggtcacatagccaggaaggagcagagccaagacacaaatgcaggtcttttttcctcccagagtccagaactgtagctcccatcctgctggcacgttggtttctgacttgttggcaaacagaccctaaattcagtttgtctgcctcatttttcctgggaccttgtcaaaggaaaaatataattcccctcttagggctataacaactttgtatctggagtctagtctggacacgggagccacccccagggccatttctcctttcctgtatcacattatattacattgtgttttatcatcagaggcacaactggtttggttttgcagagcaaaatgagtgaccttcastatggaagaacatcggttttagctttgacagtccctcggtctgacctcttggtttccaagtcacatcgctccgttttctttttatgattcagttactgtcccgctcgatacagtcctggtggccccctcttccttggcatgacagtttatcttctttgccccagctctgccagagtttcagcctttcagagttggtctgtctctgttttcttttggttgtatccaattttacagttttcctagaaagaagcaacagccagtttccctcatcccccttgctgccgcagctctsgagcctgctgttaagaggacagttccgcccagcacgactctgtcagggctacacatacctagcagctgtgcagaattcagagtgctaactttttaaaaaatgctacaagtagaagaagcaagtagtttattagcgtcttagagatggggtcagtggtgtgtgtatgaagtcatttgtgagggaagccaggagtctcgatcggcaaggctttaagccctttaacagagccctggaggaggattgctgggtggctggaggagtccatgactcaaggctctttggtcaccattgcttgtgatttgcatggatgtggggtcatgggccaggcatgaggtagggaaacagcaagagacagcttctggcccttcacagaaaaccagtgaccttcgactcaaatctttcaaaacttcagcttccttctattaagaatgggaataagacaactgcctgggctgaatcccgggttgttaggcagacagaggagaaagttgcctgccctgtgtgcatgcacctgcccttgttccagagcaaaggggtaaatctgcatgatatggaggaaagaccccctaggaaaagtataggggcactgatgagcttttacagaccgtatctaaaaacacctcttggaggagattcccatttggaaccccatttgggaactgctcatctacatagccaactccaccctttcaaaatgtgcggtgaattaggcaggtgctgaaccaggcattttctggttgtgccagacagctcagtgaggcagtgccctcctccctccgttcctcaagcacattgtgagctccaggtggcagagcactttaggtgccctccagtgactccgggcatatgtcgattttgttaccttctttaaggtaggagccacatttgatacttcttaacctccctaggcctcagtttacttctttagacatgggagagttagagaaaatgattgtttatatccttttcagcctacagttctatgattctgtgaatcagtgtccttgcccagtgttgcacacagtacagacatttcttcaacaagacatygttcactgcactcacttaccttagcctgttctttctttggaattagtacaaagagaaaagttctcaatattgtatgaaggaaaacacttcctaaatctcctttgggtgtgcccgccagcccctcctttccacccttccttcttctctcccctccttcccccctccctccctcattctctctccccatctcttcttctgtctctctcacctctctctccccctctttctttctctcccccctctccttgtgtctcccctctcctcctctgtgtctctctcctctctccttccctccttctcccttaccctctttttctctccctccctctctctccctctccctctctctttctttctgctgtacttggaaaaacatcatttaaattacaacagatcccttaagggcgcctacatatcagacttttattttgtatacagaaaataacattcatggatggttttacataaatagttggcttctttttaattcttttttaataacacactcccctccccaaagcagggcttagacatgccaccatttgtctaactgacaaacccctgaactatcccccttcacctcccacacacatgctttctgccaggttggggatgctatctggccccgggttcctcgtgcaggtaagtttttggtcagctcacctcccctgatcctagatgcagataccgctcagtttcaaagcacttttccccctacacgagttctgggggaagatcattttaagtgaccagctcctctcaccttctcagctcacatggtcaggcagtagagatatcatttcaaccaccagatttgttaggtttttgttagacgtcagttggcagagctgaactaaatactttttctactttcctcccacttttcctttcctgtcttgtgacttgccttgccacagtggattagaaattctcttcgtggaatacagcttggcaggcgattgctggaaaagcagatagagaagaccactggtttcggcccccgctcgctgcccagagtgcagctgacctgatgggggggctaggcaggggcaggttttataaatgcacttctgggaggcgatggccagatgggaggcgggctgggcttcctcttcaagtgcaccttgatgcctgcacaggaaacatagtgcctcccctgactctctaccatgagtagtgagcaagctctttggaaatgtgctgcttggtatagaaaagtgttaccttggcaacagcaagctcgcttcattaccagatggcattagcttttattagtggtatcctatagcagttgccaagagccgacctgtagcccccgtcggtgggcgttttgcttctgactgtgaccagcattggctagtttgtggaaagatgcccattggcctctatgtgctgcatctctttatcagtctatcaaaaagttcaaggtcactacaacctggtgcatgcagatacgttagaaactggcacatgccagacacatgagaatcggaatcattgtagagcgatgtgagggctggaaggtctgctagagagcgcacaccaggctccatctcgatggcagagccaggagggctcctgttacgttacccttcctgctgcaccacactccgaagagaaaggacgctaacagccattgagctttgctgtccaccgcacccctaggcccaagttttacatggatcgcctccttcaatttcctcaaaaggtcccaccgcatttcacagctgagtaaacaggcaccagaggttgtctgagttgccctgggtcacactgcctgcaagtggagaatgagggcctgaagcacagtgctggagagtaggagcaattgatttgcacaccaaatggccaccgccaggaggtctggctgcctgaccctcaggcttgcaggcactttctgctcagtggtcgctcagcagaccccacagtcttattcatccttcaggtccagcacaactgtcaccccctctcagcttcctgtagccccagttgtgacagcaggagggaaaattaacataaggaccaggtcagccagttcactgacctggctacagcagcagttctggttccagctttgacgttaactggcttcaaaccgtttcacctccataaagtccaaacaggggtttgggccaagtaacaatagcattgccactgagcactccctgtgccaggccctgtgccatccccttcacctgtgcattgtctcactgactcctcacagtcactctgagatgggagtgccattatctccatttagatgttcagagaaggtaggtagctaggccaggctttccaacagcagagccgagacctgattctaaagcctcaaaatgttaggcttcaaaactgggtatattattaccatgttaaaaatccaggccgggcgcagtggctcatgcctataatcccagcactttgggaggccaaggtgggaggatcatatgaggtcaggagttcaaaaccagcctggccaacatagtgaaaccctgtctttactaaaaatatgaaaattagccgggcgtggtggcacacgcctgtaatcccagcaactagaaaaggcaaggaaggagaatcgcttgaactttgaagggaggttgcactagccaagattgtgccactgcactccaacatgggagacagagcgagactatctcaaaaaaaaaaaaatgcataaagccataattctatgcctattcaacttagatgagcaccaggatcttttttggctctataaaaaataagaattggctgggcgcggtggctcacgcctgtaatcccagcactttgggaggccgagggcgggtggatcacctgaggtcaggagttcgagaccagcctggtcaacatggcgaaaccctgtctctactaaacaaaaatacaaaaattagctgggtgtggtgacaggaggctgaggcaggagaatcgcttgaacccaggaggcagaggttgcagtgagccaagatcaccccactgcactccagcctgggtgrcagagcrggactccatctcaaaaataataaataaataagaattgacaaacttcatagagctttatggattcagaagatcccaaaagtaagccagtgcaagacttttcatactgactatccataaactactatagccctggaagtcatcttgccaaaaaaaaaaaaaaaaatcaaacctgcatctcatctaattatcaattggcaggtaatacagaggaaggagcagcatgttaaagtataccactgggatgccaccagcaaaatccagactgtggaaaactctgtaggagataacccagtttcttcagcacataaaatggggacatggggttgggagggggatctctttagtttgggaaagacttatgagacatgtcaaccagtcacattgtgtggaccatatttggatcctgatacgagcagacttgtaataaagtggcaaaagtaaaatccaacaaaccccttccctgcccaaagtgccaacttaattgatttttaaaaacttcttattatggaagatttaaaaacatatacacgagtaaatgaaatagtacaaagaaccccatgaacccatcccagcttcaacaatgaccaactcttggccaatcttgtcacctccacctccacctccttttccctccctgtgttactcttctgaaacaaataacagccatggtatcacttcatctgtaratatttcagtacgtatttctcaaagggttccaaaagcacataagcagaaccatgacacccacatctcatacaataataacgctccagtattatcaagcatgtagttcagtgttcagatttccaacagtctcataagttttgatttgatttagtagtgcccatcgctgacaagaacagaatgaaataggtgtgttcatacctttctggttggcataaccgttgtggttagcagtttggcagattatatcaaaagccttaaaatatttgtattgtttgccacagtagttatgactttgcaaatctagggaaataattccaaatgtggtgaaaactttgtgaacaaaaatatacactgtggccatatttatattaggggaaacttggaagtaacccgaatgtccaccaataggagaatggttaaagaaattataggatatcctctcagtagaatgtcgtgcagcaatgcaacactgattgtgaagactatatagcagtatggaacaatacttgtcatagttttaaggaaaaatttgatttgaaaatatacatgactgggcgtggtggcttgcgcctgtaatcccaacactttgggaggccaaggcgggcggaccatgaggtcaggagttcaagaccagcctggtcaacatggtgaaaccccgtctctactaaaaatacaaaaattagctgggcgtggtggcgcacgcctgtaatcccagctactcaggaggctgaggcaggaaaatcgcttgaacccgggaggcggagtttacagtgagccgagatggcaccactgcactccagcctgggcgacagagcaagactctgtttcagaaaaagaaaaaagaaagaaaatatatatatatagtttcattataacgatgttagaaattcaaaaaccataagcctttgataataaaatgattgaaaggaagtaccccaaaatgttaatggtgattatctttccatctcaagaccaggaacaactgtcttcttcctttgttctctaattttagatttttccataataaacatttatatttttaagtattagttaactttaaaataccaaaattaacttttaatagaaaaaaatttgaatataaaatttctggtgttattagtatgtatttctaaaatccatcttaagaaacttaaattacaaaggcaatttattatttaattaatatcagccaggttttgatgtttcaggaaacaattgcttagtcacctaggcttattagcaaagaaagttaaaatgtgcagttacaaacagtggcccttccagaggagagctgtggagaacatgtgggacctacattcactttagcctagtgagaaggtatcgatttcagtgtctgtaactacaaaactataacttggccgggcgtggtggctcgtgcctgtaatcccagcactttgggaggccaaggcagacagatcacttgaggtcaggagtttgagatcagcctggccaacatggtgaaaccccatctctactaaaaatacaaaaaacttagccagatgtggttgtgcacacctatagtcccagctactcgggaggccgaggcaggagaatcgcttgaacctgggagatggacgttgcagtgagccgagatcacaccactgcactccagcctgggtgaaagagcaagacttcgcctcaaaaaaaaaaaacaactataactcagttgctctccctccctccctttcttccagtaggctccatgttgactaaagacagagttactcactctacctccatggtttattggcatccttagatagggattttcagtaacacaaaaaaatgacccattgattggacataggacaacaaaaaataaagagacccactgaacattacatggtgtgacaatatttaaaagtgttatacagaaataggatgcctttattagcagtcccttaaatgtaaataaatgttttttcttaccatgtttgtattcagtactatttaaagtatacagaaatagagctatcaacctaacgcttgaaattattgaaggaatcaaaygttgggggtgttcactgatacccaggactaatcaaggaaagaggaaggttgttgttgaggatgatcagttggaaaactgcaaggaatggggatataaggaaggggtgattagaggtggcatccccagaaactgacggcaggtcggagttgaaggatcaggattgccatctggggctaaggctcttaccttaggcagctcagcagggcttcctttcagcaaattctgtgacgtcaaaacctcatcagagcaactcgcactatgggcgggtgggtcccaggctggggtctgygtccaggttctcatatacgaaatgaaaagctttagcaaagtcttagaagagttacgtgagcccctcgtcttcatccgtatattgtttattgttgctataaccaaatacatgaagctgggtagtttataggaaaagagattaagctcacagttctgctggttaggaagtataagaagcatgatgcccgtatctgcttcaccgtctggcgagggcttttgtgttgcaccgcatcacaaacatcgcaacatggtggaaggtctaaggggaggcagacacgtgtgaaggccaaaacccaaggggtatcctggctttataacaagccactctcgagggagctgatccagtcttgccagagcagggacacagtatgtcgagaatgaacccagccatttctgagggatccgcctccttgacccaaacaccccccactaggccccacctcccaacaccacattggggataaaatttcaagctgagttttgatggggggaaacagccatatccacaccatagtgtccctaaagaagggaaggtgctgtttctattcttggtgctgagcctattccagcaagcacagcaggttcctttttccctggcatacatgaaactgcactttttttaggatttttttttttaatgtataatatgtgcttaggttctgagagtaaaagcacttaaatgtatttccaggatcatgtttcttttttgaagataaaattcagctactttccttttacctcctgactttatttggtattgcttttccacttttaccagttactataaatagatagttcaaccaagaggcatttggtacttgcctttgctctgtatattgtactctgtacatattgcataggtatacatagggccatgagcacgaaacaacgtgctcactaaatcctataattgccagaattgtagaatcctcgcctttgaaaaagaaaatcttaaaatgggaaagggaaggattttactttttccagcagatagtaaacatatgaaacttatcctcagagtttgtaagccaaaaatataaataaatttagggaagttagacgagttgaggcccaaaacatttttcagtgatcacagaaagaacttgctgttattgagagttcattttccagtgctggaggatccacagggccagcaccatgaatccagtctcactggattggccaggtggtcatttcttctcacacccctgcccaactttgtgtgatttgcgtgttcaagtgtcagcttacatgtgttttggcaggtgaccttgggaaaggtgttgaaagtgatcgtcgtcatgcggagcctgttcattgatcgaacaatagtaaagggatataacgagaatgtctacacagaagatggcaaggtaagcattgtgcagtcttgtgtgttccttggttttctgtatcccagaacaagtgtagtcgaattccagatgaatggcattaaaaactagcaatcatagcggaaatgatcagcaaacatagatttgtcagtgtgaggatgcacactttgtgaaaaaacatttcattctctctgcttgcattctccatcaagcttckgctttttcctctaagcctgatgcccttagttgaatttctaatttatcaccttagaccccagttgcctcattaaatgtgtcttctgaggaaatggatttttttccccaagtcaagcagctcctcagtagcccaaggttcagcattttgcttttcctagaaccacraggaaaattcccattcatttgacacaacctgatgacactctttttccacaaaactaacaagtcgcccttaggaagtggctgtgcacagcagcatatattgaatactgctgttgaaagragacgtgttatttccacgggtgacttgtttcatggaaagttcacccttgtgaacccctaattccttttgactgcacagtctccatatggctccacagagagcatcagaggatgctgatgggagctgacagccttcatttgtgtttgcaccagagtgtaatgaacaccgtgcctgagatgccccacactcttccaggccactctcagcacggagcctggtctccccaccccatcgggagcctttccttcctcrtgactctcattaaaatgtaaaagtttgttagtatgaatactagcactcaccacccaacagccacattataatgagaatagaatgttcttcaaaaaaaggtggtaactgtggcttagcacatagcagggcgttacataagaagcacagcccgtgatataatgagatgtgtgttttgaacaagtaacccagcatttccacattccacacaagtgttgtctacgtgggatgcaactcctgctccaaggactgtgcccagttctcgtaaatttcctcgttgataccaaatcattcattgaggggagatttcctttttctttttggaaaaaccaaatgtctttggagcatgcatgtaaagtgagtaatcagtcaggtgtagtctgtgcgtctgatttgtaaactctgacagctgctccagaaggttccacactgttggtcagcaggagaggcagcactgagggtagtgtataccctcgcagagaccatgggcagtggcattttgagatgccattcttgttgggttttttcaaagttgacaacttcatagtcactcctggtacaaaacatagcccttgcttgccaaggacttacaaacgaattggagagttgaagaacaaatacgtagaaaggtgagtcataatcaggaccgtgctactagagttaccaaacttagggtgcaaatgaagcatgctctgaattgagatcataagaaggagtggaaatttacctactttgcatgatacctttaacactctatttaattgccccttactgaaagtgtctgaagtagtacacataaagcacttggcactttgccatctagtcaatactcagtaaatgataactagtattatttttattctaacttaaaataacagtcttgaaatatagagtctcagaggtatggtgcttccaaaacacctctgatcgcccctcctcagctgctccagttacttccttctttcttgtcttcccccttgacttcccagtttcccagagttttcttctccctctgcgcattctctttggccattctcatccatgtcacccacacaaggatcactcatgatttgtttctagatcagacttcccgtgttcctcaagtttagcctgtctaaaacaaaactcatcatctctctccctacactcagtttccctcctcttttccttatcttggttaacagtacccccacctaattggttaaagctttcttcccttcatcccgccggtctaggctgtcagtgattactggcagttctccctcttaagtaactctcaaactgggccccccatccctctccacccctctcgctcctctccggctctcattatctctgcactgaagaatgcacgcaccgcctcacttctagtctccagtcttgcttccctcacagtctgtccttcacttggcttccagagctgtcttcctaaaatacacatgcgagcggatgattctctttcttkttgccatctcccccttgcccaaagcagccctccccaaagtaggaaagtaggatattaatagatgttaggcagaaagcaatgcatggtcaaacaagtttgagaaactctgggttagagaaagttcagtgggtttctttactgtggaaaccagtttgctgatgtgccttatgaatatcttacagggagtagagagtatgcaatattttcctaacttatttggccaccaaattctttttatcttcttttattcttagagcatattgtgacattgccattttgtagaatatacttctgaaaactctggcttgtagcataaaatccagactcctctgcaaggcgtctaaatgcctcatggcgcagcctctgccttcctttctgacttcatctggcatcattctctacacacacctcatcttatctccagccgcgtgctccctgtagcttccatgacatgccagactctttcacgtatttgcacgttttgtgccttttgccctgggatccctcctagtccagctgacaaagttttactcttccctttacagtggctgaatgccatcttccttcccatcctgtctccattttcccaagagcctctttgcttatgaacatgggctctagagatggccgacctgggtttgcctctccttacagcacagagttatcatcattatccatacacccatagaattcagaacaatcttttcctagtactagaattggtgcatcatgattatttacatgtccatcttgcaattaataaaaatactaacaatactaacatacgttggtcaggcaggcactgcacaaagcgaactttgcccacggtggctgtcgaatcctcctcacagcatcatgagacaggtgctgctcttagacccatcttacacatggagaaactgagacctagaatggtaacgttgcccacagccacacagggctggatctcaatcctgcatctaccaggagctcctcaagggcacaggctccatcgtgtgactgtctgtctgtagggtgcacttctgtgccaggagcacggtaggagcccagtcctgtctgggaggagatgatgaaaaagcctacttgggatatgaaaatgcttaagctggaatggaaagtggagaatcaaaaatgagaaatggggactaaaaggagcggcagtaattgaagttgtaaataagtcagaggataaaggagacacacgagtaaagggagacctcaggccctcctgatgagagattagcccggcctctctctttctccgaaggaaaatggctgtacatttgggaccctggttgacatcagaaatgtggttggacaggaagccttgcgtccccctttacaactgtatgcgttggcccaagcagtgcttaagcagggaccctaaaagtggaaattgcaagaccgagagaaccaggcctctttgttattttaaggacacactgaccacatttggcagagaagctctcaaatgactgttccactcagaatctcatcctagccaatttgattaggccctttttttcagagcacttcacaaatgataaaaataaaccatgcagacattattagtgctctattttgagtactctgtgtgtgtgtactttatttatatacaatctaggcattagtgcaattaatgtgttgaattgtctggcacatcccaaatgaaatgtggcgtctggaaggagcccttggggcctgacatgtgttctacaagagcacgttgttgctggagacgtcgctgctcccgggacgcagcctgcgtttgctgagttggtgcctaggtggctgcaggggggtgttttgctgcagtctcctggagcacagccacagaggccctgggtgtggctcaggaagcctcctatgggcttaacttctgcctctgcggttgtctctgtcctccaagcccaaagcaaccagcacattcgaaagtttcattatccttcttgctgctgtagtggcccagcaccacccctaatttccagaccttgcaggttttttccccatcagaatccagcccagcaaggctatcactttgcactttgcactttgctctaacaaccaccgccatgaccctagcatcctgtctctttacctgcaatgcatatttttgataccaaggaccaatagcctgattcctctaataaaataaaaatgcttttcagacttaccaaccacttattcattgtactcagggagtagcaagagccacgactcagcatgttaaaaggcaggattgaagatgaatacctggccattgtcctgattttataccagtcagacttaactgaaaaaaaaatgtgtctcgttcgaatttawctttttgggggatttaggttatgttaatgctatagcttcattaattaccccatatcaataaaaaaggcagcttttagcctccgagcataagagaggaaaagaaatggtggtatcaaaggaaaccttcaaagacagccagagctgtctccagggtaatttctgatccctgcattcttcccacttcaaagttggctgtgtgtgtgcatgtgggtcgagggggtggggagctgaatctgatttctctaataagtgttggcatcagccctgtttgatatcagatgcagggaacattttgatttgttatagcctttgaaattgttcagatgaccttcagaaaaatggcctcttgttacttctagggggaagggtgaaagccagggaaaggggaatccagtttaattcatatgcagaggattccctgaaattgtgctttcagcagttttttagtaacaaatgcatgtcctgattgaaagtgaaaagttgaagaataatagacctgtaacactgtgttcttgggtgaggctcttgttcactcttattctctggggagggtcagcagatttgagagggtgaccacatagaagtttatggtttggaaaatgtgggtaacaacatggagagatccgtcaccatagctggtttgcagcattctacccaaactgataggcctatcacctgttcaccttgcaagacgaagctactaaatagaggttctaaaagttggaacctcgtgtggcttacgagttttatttagataattttgaatcgattccactgttttttgaaatgaagtattgataactttctgataagctgccaaaatgttcacttgctgttacatgaattttagtggcagtggttgtcacagcagcaggcctcaaagcagaactatgctcccagaagagctgcgcaagtgacagcttagggagcgcgcagccccggcatcctgcctgctgtctaactggaaggcagtctcttcctcccagggtaagagctgggcctctgcacacagacctggtttcaaattcccccacctcgcattaactatgcaatggtggacaagtcacctaacttctctgagcctcagcgtcctcatctgtgaattggaaatggttttatcaacctcatgttattgccaaaaggattttaaaagtaacgcaggtaaagggcaggccgaatgcgtcatcttcatcagtaaatggcatccgcccttgctggttgtgatggaggtggtggtggtggtcagcattgcagacagaatcacctgcctgctgatactgggtcgctctgattgttcttgtcagtgaataaatttgatttgtcaccattttcaccagttcttcctgtgtgtcaagaggtcttttgatgtcttggtgtttgccctgagaacagacgtgtctgtgctgaagcaattggtcatctgcaaggtttgttttcatttcacctgagaacagaccacaccccacccttaaaatacttactgcaatccccagaggccaggaggctgctcctgagactgcagactcagccaccaattaccacaaggttgacttttgtgttttcagatctttcttatgcttgctcagaatactgaagggtgcttcgctttctttttcctgacactatagttcagaataatttcttgttcatcaggttgaaggtttgcagcttccagaatgctccttttttgaatattgcagccagcaaagaattggtagccatgtctgcctctgcagtaaataagctgaagctaataaatattcacttggatcagtcctggctccctgaaatgaatttctgaaatcttcctggccctgaggagaggcagggcattgactccagaatgctcatttctggctttctttggcataaatctagcagaaaatcaagtacgaaccacctgctgtgcactcctagcaaaagagggccctatggttaaggggtccctttttcacccatgcgcrccaggtaaatagaccgtattatctaaggtccttctgtcccagatggtaggagcttttccctagggtcctgaataatatatttaaaccttttaaaaagagcatcatcctcactttgaataaatgtggtgtgttttgagaatccacaatgaggctggagaggccatgttttcattaaaccaatgcatatttttctctagatttttttaaattaagacattttgcagatactgaaggatttttaaatatgtttaacttttaaataaaaactataactttttaatgtagcagattcttcttttctgtttttcttggctctgtgtttatgtcttggtctgcttatgtatgatgtaagcaggcaggaagggtaaacagtgaagaagttcagaagaaacagctgtgggctcaaaatggaaggagaactatattagttccaagttcagacatcggtgttcctcttcctaaaactgagatttggaatctttggcttctctctgtcatcttggcagtaattttggtacaactaaacgatgcaaaagtcattcttattcatcctgcaacccctgaataatctttaaatgctgcatttgttaagccctgtgctaaactgcggcactgagaaagtaatacgaacccgatttatcctcccaaatatgaccagctgcccaacagtagttttcttcaacagaattgataatgtggggaattaatttcatatgtttcttttgaggtttccctcagagttatctggaggtaacatgtcacttttccccttgcaaattgttgagctgtcacattataattccagcactggaagatctttaaaattcttactccatccagtggtttcagtggggggcactgactggcaattgacaccacctttctgaagagcagtttagccagagtagaaggaggatgatctgttgagggtttttgtggcaatgcaagaaggagatggtgcaggcagtgggggtagggagaagtgggtgattgaggttcatttttcctattgaatgaatgcttgatcagtgaaagctcctccatgatttgtcatggagttcgatgagctgaactcatggagttcctctcctgcggaagtacagagtggcctcctcagaatcatcttaaccttctctactgtcctaaaagttttcaaacacagtgaaattttcatgaaactaattgtgaacagggaaaagccaggagaactaaatgtatatgcctgttcacagccctgcttttaatttccaagcactgttttcagaaagccaggtttcagtgtattccgcagaatagacacagagctctgaagtgtcctgggtcaaatgcaacacatcctgtcctgtcttcttaaaggacttttcctgtccaatggcttcccaatgctttctggtgttccaaaatcaatcacacaccacacaggcctaaaccgccatggcccagggctctacctgaccgctggccaacccccaaggcaggttcccagaggcccattgaccaggtgttccattcactcaactcttgaattcatatattaaagtcaactttttagcacctatgggacacagtgatggctttctcgtttcctcattgcccttgagccgtctctgtcagcactgtattgtgggtagttctatttttgccatacttaatttgttctaaactcttgaaacagaaggcattgatttgttgaaatagaagggattgatttggtatatcatgcaaaccagtaaaaaccaaaatgtttttggttagaatgagctactgaagtaccctgtgtgtgaccaagtgtgaccagaggaggactggactgggtttactgtgagccctacccacatgccaactcacacctcctccagcttcctcattcgtcaagtaggggtgccctagaacaggggctcttgaccagccgggcgtcagttacccttgggagcagggctacaaaacaaacaatggaacaggctcttgggcccgctccagccattgattcaatactctaggggaggaactgagcaatctgtatatcaaaaaacaaaaaccttcccccgggggcttctgatgctcagccaggatttgagcaccaccagatgaggccatctgtaagatgcctcgccagatagccttgggctcatgaaaggctctgagctattgtttccccatctggagaataagactgtgatggggcyagtcacatgggccagttctggggattacatgagtgtgtgtggagggcctagtgcagtgcctggcatggaacaggtgctcagcagctggatgctgccagctttcctccactcagaaaagacctactgatgcccacaacatgccagaccccatttctggacctggagaggcagtgggaaggaaggcaagcctcctgtcctcactgaacttccatcctgtgggcaagtcaggcaggaaacaagtaaacaaagaaataatagagcttcaggcagttttaaatattatgaaaactttaaattttgaaatggtaaaragggtccagtgtaatggctcatgcctgtaatcccagtactttgggagtccaaggggggcagatcacctgaggtcaggagtttgagaccagcctgaccaacatagtgaaaccctatctctactaaaaatacaaaaattaagcaggcatggtgacacacgcctatagtcccagccactcaggaggctgaagcaggagaatcacttgaacccgggagatgcaggttgcagtgagctgagatcacgccactgcactccagcctgggtgacagagccagactccatctcaaaaaaaaaaaaaaaaaaaagtaaagagaatcaaggtaacaggtactggaaagaatgttttgataaggtaactgggaaatgcctctctgataaggtgacatttgagctcaagggagtataagaagagccacatgggggtttatgggaaaaacaattcaggcaaagggcacagcaagtgcaaagggcctgaggcagcattgaccttggcattgagatatgcaagagccgtggtgagaatcaaagttgaaagtgagccaggggctcagcttgcaggagccttggaagcagcaggtgcctcaaggtgacttgctgtattccttcattgacttttcttaacttgcctacaaatggataaagaagaaattaagtcagacatttaagatccttttcaaccctgagatcctattattctataatcagatttttttttcaagtttaagaagggttaacagtagttacaatattatttcttgaagtcccgaattctaagaccgatgctgatgatccttctctcctttcccctcagcttgatatatggtccaaatccaactatcaagtattccagaaggtaagttttactttttgcttcttactcaagcggcattaggaaaacgtgaatgctttgaggtttaaacattggtctcaaatcagaggcttttgaaaaagtgaaaaaagccagacagaaaaggatgctcactgtctgattccatatgtatgacattctggaaaaaaacaaaaccttagggacagaaatcagatccgtggttgcctaagggtgggtacagggacttggccccaaaggggcacaagggagtgtggggtggtgggaatattctgtatcttaattgtggcggtgttacacagccgtacatgtttgtcaaaactcaggactatattactacaaaggggcagtcatattgtatgtaaattataccttaggaaaaccataggtttttgagatgttccaaaaactgtattctgaaaacctagttttaaaactcggtttctcagagccctagcggtctccactggtgcccaagggatgggccaagggaagcaggctggcactccctcaccctgccccttccccactttgtgctctggggacactgtatctttttcagatattgggcttccttatgaaaaactgttatgggaaatgtcagacgaaatgaaaagtgaccagagaaaattcatttccccagctcctgacagtgcagggccccttccctggactaactcrggccctgtggctgatgaggattctgtccccaccgccacacccccaccagtccccacagtactcagggccagctccctgcagggcagcagccggcttcttctgttctcatccatcttctgtctctggtctcatccagtagtgaaataagagagttggccatcrtctcattcrttccctcatccagctcaacaacaggtgtccactccccagcactttgggaggccaaggtaggcagatcacctgaggtcaggagttcaagaccagcctagccaatatggcaaaaccctgtctgtactaaaaatataaaattagccgggcatggtggcgggcgcctataatcctagctactcaggaggctgaggcagaagaattgcttaaacctgggagacagaggttgcagtgagcccagattgtgccattgcactccagcctgggtgacagatgagactccatctcaaaaaaaaaaaaaaaagtatccactgagcccctttgctctgtgccaggcactgttaggtgccagggccacagaggaaactccaacaggcaaggaagcctaacaaatgactccaggtgattaactgggggctgtggccaggaaacacaagggggcctccttctgattaggctagtcagaggaagcctttgtaggggaaactgaggcaggcagtgtgagaaggaggagccagccccgtgaagtggggatgaagtggaggtagaaggcagggctcaggtcagggaggtgcctctaggccctggtgcagaattcggattttatccttaattcagtgagaaaccactgacgggatttacacagagggggatgtgattttgaaagcttggtccgagttatccccacgatgaagaatggttgtgtccacagtgtgccaggaagcacaggactcttttgtagatcaaggtgaaattcacataacttgaaattaaccgttttaaagtgaatgctccttggcttgatgtgccttcacaatagtgtacatccgctacctctgtctggttctaaaacatttccttaccccacaagaaaatctggtgtgcattgagcagtgagcataggacttagtggatcagaggggcgtcatggaccaccctctagaggtgtttactgtacataatccacagtgccccctgggcccctttttggtgataagggctaggcagaggacaggcgtctaggattaggggagtagtctgaggctgaaaaccacacatttagggaacctatataagcattacagattcatgatctgatcacagctaaatgcaatgtgctaccctggattggatcctgaaacagaaagaggttactaatggggccgggtgcggtggctcatgcctgtaatcccagcactttgggaggctcaggtgggtggattacaaggtcaggagttcgagaccagcctggccaacatggtgaaaccctgtctctactaaaaatacacaaatcagccaggcgtggtggcgggcgcctgtaatcccagctacgcgggaggttgcagtgagccactgcactccagcctgggtgacagagcaagactacatcaaaaaaaaaaaaaaaaaaaaaaaaaaaaaaaagaagaagaagaaggaagggagggagggaaggagggagggaggggttactaatggaaaaactggtgaaatccaaataaaggttggagttcagttattagtgagtaaccagtgttggtttctttgttgtgacaaatgtaccgtagtaatggaagatgttaacaatggggaaacggggtgagggacatgggaactgtctattgcatctttgcagcttttctgtaaatctaaaactgctctaaaataaagttttaacaaagaaaatcatagcttgattcttctaacaccctttacccaactgagctccctggaaatgtaatgaagaaaatagcctccctcctttcctccctccctccttccttccctcccttcctcccactctctcttcctccctggtccctgggtctgaagcataaaggaaggaagggtgtggttacgcacaggctttagtgcagggaagcacatttctcatcttagtgttcttacctaagtcaccataccagaggtatttacttgtttcgcatgcaaaaagtctcagccttcaatgctaacgttttccgtgctgactgtccttgtcatttttcccccagtggctggttgaaaaatattctgaggagaaagaatgctgctcattatccttgtcttgctttgctttaatagtgaagaacattaaaatggtcagcttttcccctcaatctggtccttatcttcatgtcctctgtggtattgcaatgagttccctcctccagtctccacaaaaggccaatgatgacttcttgagggctgtaagcattgcagcttgtaacttggtatttaacaatggtccatttccattccaatacccttgatgagggaggggcttgcacatgctcacttttgcatgttttttttttttaatgttcttgtagtattaagtattttttaatgcaagcagaaagtgtattaggaagttgtaaaatgtataaaacacagatttggtgaagcatagatttagaaagacagtactgtatttttatcctacctcccttgaaaataacctgccaggcactctttgtatttatttaaaattacaaacacactctgaagcagaagtgtttaaaatttgatattagtctagttggagagatttaggagcatccgccaattccttccttccagtctgtgtaacacgtttcaagtagtaaaaattgatgaattctaagggatgggaattttatctcactggtgagtggcatatcatgtgtatttgtgcagaagcctttctgagattcctttatcatcgctcctttcacctattattaactaagtggacttaacctctgatattgacctgtaccagattaaagaaccacaattgggagaggtggtagtgccttctgattacaactaaaggcagataacattgaagtccttttttttcagggacaagtaagaattaaattagtgagtcctctctcttcctaactaaaatgtcttccatttgctgtcaaatgaaggaaacatattggaaaataatgtacagaattaagcttaatcctttatcaataaagccttcaactaatcatcatcacacagaatgagtttgggatcttgttagaaaaaaaaaaagcctgtttctgtatcactgagcttgtgggagatggcggtagaaagcacgaagcatgcgcggtgtagcctccatcccagggcggtgactggcgtgcctatttcgtcgtgttcatctcagtggccagcaggtagacctccctgtgccactgccaggccctgcactacgtgcagaggtgggaccacgttgtcctttgcagattcagagacctggcacagtttatggggtgacgttaagtatttcaaacctaaatcaccaaaagagaaggattcggtggcaacgtttctaaactccgctttttaggatttgctattcctcaagattctattttcctcctgtccacccacttatatatggggtgtcatgaytgatgttgcttgtagtgtttcccagaaagacgctgtttgggagcactgcggcagacatcttccacctgctctgcctgtttgcacccagccaagtcgactggcgagggtggggttcgttcccagcatcatccagaaaagctcagcctgcagcagtggcatgaagtgcattggggagcagcatgacatgctggaggatgctccttggtcatcaagaagaggagattgctcaggctgaagatagtacccagatgtcctgacagtggtgggaggtgccacagctatgcccacctctgagatgggagttctgggccaccagcagcagctcacatggcattaatggaggaattctcctcctgctctagctgaggtagaaccgcagagctccctctcctaggccttcattatgtggttgcagtcactgtgttaggcctgttttcttgcccacaagaagcagctgtggccagcccagaacgagggaaagcagaactcggaaagcaggaagccacgccccccacccgtgcccaccctgaggtctccttcagtgtgacagggtagggggattgccttgcagagccaaaccaagctaacactcacctttttatttctggcaaacaatgtcaggaggtaggagaatggaagcatgcccttgtcacattctctcaggcccgtgcctgacccgctggcttacagcctgagcacctgagcttctgtagcaaatcccaccacaggaagcaaaattctgccttccttttgtctgcagatgttcatgccatcagcaagcccttttcactcttcctcattagaccccttacccaagtgtggaagtagcagagggctggggacagcttgctatgggtctatggctgctaacaggttcccatcatttactgtggtccctggaggctccttgcacttggtcctagggtgaagaagctttttatagccagcaagtctccagcagagtagattcagagaatgggacttagaaatgggyggggtgggggcgggtgaccatctgaaagggcagaatcacaaagagccaggaaaggtttcaagcgtgttcatatttttctgacatttaaactctgcaggggcagccactgttttgttctttaaccccctcatttcaaaactctgtgcattttcatccagcaatttagggagagtaagagcagaccgacagctactcactgcattgtcttgctagggtggctggagagagaggtggagtgtgtgtaccacccaggttaggcaggggacatcaagagagaggccaagagggacccacacacactttgcagctttctcatcagaggtaagggacagcatgaaagtagcccgcagatgtccagctctccatccacagtcattgcagagggatgagtaaccctttcagttctgcaccgtctgaacttttagctgtgagcaaatggattgtgcatggtgggtcatgttctgggcagggtgccgcttgcttcttcattcctttgttcatttattagttgattatttttattttatttatttatttatttatttatttatttatttatttttgtaatggagtctcgctctgttgcccaggctggagtgcagtggtgtaatctcagctcactgcaacctccacttcccaggttcaagcaattctcctgcctcagcccctaagtagttgggattacaggcatgcgctaccatacccagctaatttttgtatttttgtagagacggggtttcaccgtgttggccaggctggtcttgaactcctgatctcaggtaatccacctgcctcggcctcccaaagtgttgggattataggcatgagccaccgcgcccggcctgttcattctttttaatatgcaagactggcccctaactgaggcagacttgatcaaggtctgtttactcggtggccaccaggtgcttttcagtaaaagagattgagtcagccctagaagactcagttctctgaaaagtgggtggacacctgatattgcgttggtgggtacgtggagtacctagcgtaaattgactaccaaccccaatagtattcaaaaatcctaacctatcgctcattccaactcctagggaaggaaactgtttcaacatgggatcattccccagggattggaaccgtcaccctcctctgagtcaggttgtgctgcacaccttagttgrgtgtgtggtgccgctgcagtgtttcacaccactaaagaggctccataaacagtcattacattgttttatttatttatttgagacggggtcccactctgtcgcccagactagagtgcagtggtgtggtctcggctcactgcaacttccacctcccaagttcaagcaattctcctgcctcagcctctcgagtagctgagactatargtgtgcactgccacacccagctaatttttgtgtgtgtgtgtatttttagtagagacagattttcaccatgttggccaggctggtcttgaactcctgacctcaaatgatccacctgtctcagcctcccaaagtgctgggattacagacgtgagccactgtgcccagccgcgttattttcagtttctaacatttcctcctaccagcctcctctacatttccttcccaaagcctctcttcaaatgccacagatgaaggcctggaagaggccatggttgtgacaaaagttctaagacctcaggccagatctcagtcccattccctgttcggtgccctgcacaggtgagacccccacactcagagggactccacagctgggagctgcctcccagagtcgttgaaggcccttctgtcttttayagatctcagccctctgaccatctccccgcctcttaaatggtgattaactttttccaacagggagaacttatgttgtaaggacagaatgtggtgtcattttcatctgtttctgtgcgttctgttgctgcctcacaagtgtgtcccaaacagatagaactgaggggacagctttcatccttgcaaagggaaatgggccgcttcatgtagcaagacaaagttctgtccatgactccgatgagtggtatgcccaagagatttgtgcgtgagcccgctagtgggctggcgacaggcttcagggaaggagcggcggcagacggtcccagggcatccctgagggcagcccttccctcagctgacagctggactgtattgaccaggtcgccaagcagaagcatcggcgcggggctctgggagctgagagccgcagggagggtcgttaggcttaatccaacagtcgaaaacccttttaccgccaccttctctcttaatggtcttgtttgaatattcataagcatctaaactaaactcaggacagatttgatcatttgttctcctcttacgccgccccagtacctttcctgcacaaggctccctcagcccctgctgagtgtgagcatggcccaggagctcacatgaacccagttttatggctaaaattgaaccaggaaagcctgggccatcctgttgactttctgagggcacgctgcgttgccctggaagtggtctgtggctttctgccattagaggagtcacagagtagtcatctgtcatctgtatagcttgtttcttcctgaagggttgtgcgggctgcagtgtactcaggtcaaaatctgaaaactgcttctggaaagactgcccaccttcccattccccaggtctccgtcctcagcccatagggctgtaaactccatgcatgggctgccagcatggcaggacggcccccacccatccgctctctaagcccaggctgacctcccaccacattccccacagcgaccatcccagagagagaccacatagcagagtggctaagagccattcgccgtgtcatcaggtcccggctcccctactgtttcctgtgtggattcacttgcctcagtttcctcatctgtaaaacagagacgcagcygggcgcgtgggtcatgcctgtaatcccagcactctgggaggccgaggcagaggatcatgatcctaggagtttgagacaagcctgggcaacatggcaaaaccccatctccccaaaaaaataaaaattagctgggtgtggtggcatgtgcctgtggtcccagctactcaggaggctgaggtgggaggatggtttgggtgtgggaggttaaggctgcagtgagccatgagagtagctgccccacagacttggtgtgaagttgaattcgtaggtatgaagtgtaaggtgaatgtcttgtctaccacctggtcaacttctctgaagtgcctgtcaatggtgacactctcttgtcctgagaaagttctccctccatcccctgtgggcaggcttcctcccgcaggcctcttcctcagtgaccaccccttccatctgtgcttcccatatctccacagtggacacggtggctcagggtataggctggagtcagacagacctgggtttgtgcccagctgtcgtgtgtaaagtcaacccaagacccagctgctatgacagacctacccattcccaccaaagcattgtctgccttctcattttttcaggcatgttatctgctcttctggtcacaaagtgagctgaagatcctgtaagacaccacagttacagccgcgcagcagtgccctgtgggcagccctgatatgctgatgtaggcaggatcctgggtccaggaactggatcagtccctagggtcctgggagggccagtggcgcaaccagtgatctccagaaggcacccgagattgagatgttgtgccccaatttcccgtttcccccactgagcaggggtggctggggcgcctggcaccttggcggctgagctgcctcttggcggggtctctctcccagctctgcagtctgcattcttctccagtcattgcctcaagtttgatggagaagtaggtggtattgtctgtgttttcctgggagcccagatgtctttggatgtttctctgactgcagggccgttcctacagaaaataatatcacaccaagtgggtgcagaacaattcaggtgtctttgggcttggactctcctggcagccagtgacagaaactgacgttttaccatctggaaagcactgaacttttttcttttcatctaaatgaaaagccttaattccttaatcctgagaaaggtcaaagacccagcgcgtctcctcgcagctacgcacagggccttcggcagacgccgaaggcggtcaggaccctggaaagttccctcgtgtctatcctggggtttccctgtttgcccaggccccaccttccaggcagtgtccacctctgcttctccaccccatcccttccctctcactccgctcccctttccccagtggctgaaaatcaatacatacactcctgtccactttctctcccattcactcaggctcctgcaaggtgagccgtacccagtgctgagccacagtcctctcggaggccctgagctaggcccagggaggatggagatgtggcaggtgtggcctcaaggagagcacagcttgggggacaggggcatctggtcataggtctggcaagtgcccggcgggggtgtgcagaggatgctgctgagagtacaggcaaggctgggatggggaagaccctgagctgagtcctgaggggtgagaagggcttagcctgacaggaacattccaggcagaggggccacttgagcacagacgtgcgccaggaaaacgtgttggggcgggaggcggattcctccaggagccggcattgctgccatggaaggtgggggctgaagggaaatgcggctgagacccaggtcygcaaggcctcctttgctccaccagggctttcagaaggatcctgtaggtggctgtggagtggccagcgggggtacatcacccctaaaggctgtctgcagccagtctgcactcaagggtccagggagttgggggcttccctttcaggcgtcagtggcaccctggctgggactttaaagaggataaggttggaacccccaaaccaaaccacatctgatatgtagaggccctggtgtgtgccagagatcttgctgagtacatccacaggctcgcccctctcagacacagagcttgatctctaaagtgtcagcagggatttcggacaagatggagcagcaatgtctgccttcacctctccagttccagctcaggcagccttgcctctggtctcatcccagagcagcatgcctggctctggtggacagttataagcccttcagagcccatgcaaatggctccttcattaagcagaggaggaaatattgatcccatccaagtaatcccaagtccctgtgggcttcgatgtttcctctccaggctgctaggcccgctgaacctgtggcatacaaatccgaggtacagattagagacgagagctgcataataaaaaataaatcccctgcttccgctctactgtactttcatccccatttgagaagctcgtctctgcgcactccccatcgccccctaacatcactgtcagggctgacttcatagcattccagtttcgaaataatgatggctcctcttttcatggaatgagtacttctgggactgttttaaatattcttcatcgaaccagcacacatccttagagcaacactgctggcagggattgctgtctctttaaacatttaacacacttggttcatgtctttgcccacaggacccacaaagagttttctccttccaagagattcctactgtccctctccttactggtgggtctgtccttggcaaaactcttagtagagacccaaactcttgggctgatctccttgtgtaacattaaaatacatctacccaatgaaagtccattctgatctctgcatcgtgggaactgcctgggcacctgtgcctagcacacgtttggctttgctgcctgctacttgagtgctccaaagtctggctgagcggcacagaggcttcccacacagaggacagtgctgtgcaggtggcctccctggttccaagctgaatcctcaagctctttgaactggcctggaatctgaggcccacctgagggtgccatcgcatcagggcagcaggtgggttcctggattggggcaggaacttcagggcacagtgtgcacatgctgccaggagataactaggacagctcaggctctgcagcagcatctgctgaaaacctagacctagaggggcctgcagaatcacccagccccaccccagcctccccacgctcttctaccgagggccagcagggaagaggccccccaggccattcgccactaagctagggtcaaaccccggtctccttacggttcccctctgtctgcctttttgtcactttcacccagatctaagagaatcttctcttcacagtacgtagaagccgatattggctggagggaagccacagtctgggtccctaccaggcttctcttttaaataagcaacttctaaacacttgagtacttaactttccctgtttactaatcttgtgaggaaatactccgaatagtagaggcgccygctcttctagcttgscctcgggggctgtgtgctggcagataatgccctcagcaggtgcgttaggaagagcgtctctgttcaagctcagctcccccaggcgctgctcggccacagtcctgtcccctggtggtgggaagcaggcagtggcccgcagcggcccttgaacctgcacccaaaatcatctcagggagcctgtgaactcctgggtcctggtccccagcctggtccaccagccaggagctggaaggcggttcccagcagtcagcctccagcgtctgttcctcacctgcatgctgcgtcgccagcctccactccggcccaggagcatgccccctggggccagatgatgcccatgacctttgggcactcgggagcccctgaggacaatccctggatcactgagaaatacaagggcccctgttttagaaygcctggcaggaactgtaagtttccatttaaatcaaatcaaataccccaagttgaaagtattcagaaaattcggaggaaaaaagataggaaagaggtgcaaggttggcccataaccccagcactttgggaggcaggaggatcatttgagcctaggagttcaagaccagcttggacaacatggcaagacctcgtctttactaaaaattaaaaaactagccaggcgtgggggtgtgtgtctgtagtcccagctatttgagagactgaggcaggaggatcacttgcgcccaggagttcgaggctgcggtgtgctgtgatcagaccaccacactccagcatgggtgacaagtacaaggtcacccctgaaacagaggacaagggtcttgctgtgaatggtgccgttgttcctgtaccaggctggtgactggcattgccatcttcttaacttttccccttcaaggagcccaacaggcccttgctttttaaagaggaaactgctgaggacaatagtgtattaagagggtttttctccccagtcctttctgtgtcattacagtgtcctttattcttcccttactgctacagaacaaacctctatctggtcaacataaaacctggaatctgggagttaagcttaagtgagaaatcatcttgctaggcctaaacctgttatctttgcccccaccgcaggagagggcctgagtaggaaaaagcgtgtgggtgctgcataccgaatgtggggtgtatggtagggtgagcaccgaatccggggcgtacagcaggacgcacacctggatccagggctcacagtaggatgcacactgaatcccgggcacacagtrggatgcacactgaatctggggtccacagtaggaccatcccactctccccgccctgcaccttttctcacactacactttttcattccctcgatgaatgtgtgggcatgcccacctgatgcagccgccttgtatttgcccgatttccccttctttgtccacagcagggagactcattcaatctggaggtcttcttgagggcccaccggtgtctctgtcagaccgtttggagggttggggccagcacatagcagggagccagacaggttgaagcttctggctgagaggtggaaggaacattgtataagtgacaggaactggggtgtaagtgaggagacttgttatccaatcccatctccaccctcaaagtgctgaggtccagtcccttctggggaggagagggcctggaaatggcacttttcttcatccccccacaacccctgtccaccccaagaggcctggagtggggggcccatgaggcttggggcatagagtctgggcactcaagctggggttcagaaggtcggaacaaactcctgctgtgccacctagcagctccttggcttgggcaagtcacttaacctccctgtgacttagccccctgacttagaagtcccaaacgtgagagtacctctgtcataaggtcatcgtggggattcagcgggctaaaaccacgaggggacacatttggcgggcgcttgccatgcgtcgtacacttgaggtctgtatgtcagtgcactgtccctgcatcggcccatttaatcctcgcccaaggtcacacagctcacaagggacagatccagaggctgggctcctgttggaggagccacacaccctgagctgtgcagcgtagaccagctcttgcacaggattagtgctcagtaaatggcgatgtgggttgttgctgttattgcaagcagtgccactctgggtttagctaaaataactcatgatctccaaagcaccctccagctctgattgtaggaggggggctgtcaggagctccatgcacacaatatggcagaggagctttgggagactgttttgactggcatctccttttccagcacgttgactggcagctgtttcaaggtctcttgaaagagtccctactccctccctaagctccattctctcctgggtttggatatgctgagagagggtagggaaaactgaaaggaacattgatcaagtggactggatctgttggcaggcaatggagatgtcacccttctcaaagtaaatcactgcaggtcaccattgagacgggacacaccccaaatgaggcatctgagacttctctgccttggggtgaaccaggcgcctcccagtgaaacccctccctgcatcaccctctgcccctctttgtgaggcctgtctccccatccccgcattcctcttgcttcagggacccctgcctcactggtttattgctaccctcctgccttctcctccctccctttccttgggctygcatccctttgatgtttttacaagccttttttcaaacctgcactcactggtgggtgaatcgcctccctctccttgggagcattagtgcccttcctggcctccgccaagggggagggcggcttttatctcccagcggaatctcattagctttgccgcacaatgggaccgaacctcggctgccacagagtggatttaaattagttaatagcagattttttttttttttttgccccaggcctgttttttccaagtcttggatgctgagcaaaaaaacaactttgttgttgaaaaatgtaaaacaaaaaaatattgaaggtggagtgctttgacaagacggaagatcactgtaggtgaagttctcctgtgctccacagccacccagaggaattccaaaaccagcagtggaggacttggggaggacaggagggaaaacatggcgagttcatcagctctgtttcctttattaaaatatttctgtaattggtggtgggaaattgaagaaatcaagtgattgcatcagcgctggaaaaagctgccagcacttggcagtggaagagaatatatgctttatactggactttttgaaaaagaggctgagtttggccagattgccgaccagcaatggaaaaactaattaggtgccttgcctgtgagccagacgcccagcagggctgtggcgcatggctcccgccgcctctgaagaggacactttctagtgaattcagttcgtgctacccttgagcagcctgtgctacagcaggcacatttgtgaatctcccarcctgtgcctggcgtcggaactgtagcttcccaaagacttacctgccctgggasatggcgggcagctgctggccacagccctgggcctgcacctttatctgcaaactgggagagcggggatgggagtcagtgggtaggaggtgggcagaggcctgggcctcccagtgttcgggctcccacactgctgccctcacccactatgtgcatcttcccaacttctggacatcctcactcctcctctgtccaatgtaaatcagaatagtgggccgggcgcagtggcgcacgcctgtaatcccagcactttgtcaggctgaggcagaagaatcacttgagccaggagttggaaaccagcctgggcaatacagtgagaccctgattctacaaaaataaaaaattagctgggcggggtggcgtgagcctatagtcccagcaactcaggaggctgaggtgggaggattgcttgagtccaggaggtcaaggctgcactgagctaagattgggccactgccctccagcctaggcgacagagcaataccctgtctcaaaagaaaagaagaaaaagaaaagcacctatctccaagttagtgtgggaattaaatgagaggggcacataggacttggcacataataagctcttattaataatagctactataagttaataaaatatccgatggatcttttaaaaaaagcacttttcagaaataaggaaaaacccccactccacaagcacccgttgtgaaaaccctccaccctggcaccccacagtgcccactgtgaaactggtaccattcattttgattcatgagaagacagactgtccttctgatttgtatttctttgtttcatggcccagaatcaaatgcccagccctctgggggccattctcctgtagtgcctgggatatgccccagccttgccactcaaagcccagtccctaaccagcagtgtgggcacccctgggagtcagctggcagtgccaacgctccacccctccccgagctcctagatgagaatctgacaaaagacccccagtgattgtgtgttcaccagcctcgcattctcatgcattttagcatccctaggaatagcctggaggggctgacttagtgtctgggccccacccaggagattccaatgctgtggctagagaggggcccaagagggcagatttctaaccaactcctagatggtgccagcaccgctggtccccaaacatttcaagcagcaccattcttaaggggaaaattccttggccgcagctcgaacttgctgtgccaccactgtaatgggattgggagacctggccaacatggtggcccatttcctagatgtgcagtgaatatccaaggaggcagattggtctgcagagaggaggaggatgctgagtgacaaacctcctgtagttctgcacaactcaagctcatttcttcctcacattacatatccatcctgagttttgacggggctgtgtcactcaaggatgagtgaccgctggtaacttctaccacagagggcaagtccaagatgccccagcaccttagaggtagaccagagcccaggtcctcagctcctgtcccgcagtccccactcctttcaggcccctggctccacccacctcatctgagccactctccccgcagagagtcagaatggcggtccttctcaccgtctgcacacatgacctgaggacctctgcatcaggcactagactgacatgggctcaaggtagggaaattgacacgaaacaaacatggcaaaaaataccaagttcagatatgaggattgagatgggagaagagagccaggcaaggagacaagccccatcgggggagcctggggggcttccctcaacacgcgaaggagagggggaaaggacagaggcccgtgctgaggggaggactcagggaggacagagatgggcatttgaggagctgagggacccgaggaaaggaggcagacaccgggtgctgcagggtttcacatggagttcacagttcgcatttcatcctgagtgcagggaaagccatgagagcgttttaggggagtgacatacttgggtttctagttgaacgatggcaatcactcatgttttctgaccagcacacgcttctgcccactacttcaccctcactgtcatcccctgtggtaggcactctgtcattatccccattttccagatgggaaaactgtagctaataaagatgaagtgcctcgcccaaggcgtcactgctagaagggatggagcccacgctctttccctctttgctgcagaatgttccctctgagccgtgttgagacaggcaagatgggaagaagtagaaggatttgagatagataacttggaaccacgaggctgcttgggtatgaggcagggggaagagaggcgacagggcagggcccaggtttctggctcaggcctctgggtcaaaggccatttagcaaaaatgctggaggaggtgcaggtctggaagaccacttgagatgttcctgtaatttgcacgacgccttgcctggagagagcaccttgcagttatcagtactgagttgtcttggaatgcttggagaactcaagttcagccagaggaggtcaagtccagaggtcagctgaggaagggaggaggagatgggcacagatctgtcaggccagggaagatgagctcaaataaagatcaggaagccaggccaggtacccagggaacagcaggctggggagggtttggggaacctgggagtgcagggtcttgttggtttggttagaggctctaaactccaaaggccacagggcccctgatgagtggagtaggctggatccaagaccctagggtgctcaggcaaactgcacgtgtcaccgctcctcagctgctgcagctggtggccacgtggcagtgccagggtcacactcacagagatgaggagaagctgggccccctttgatcttcacagtagcctatgagatggtccccagatcctccgatgcttcaagaggagctgggcaccacagttaagtgaagtttcctaaattttaagtgttggtcatttgtgtttaaaaatgtgaaaacaaaagaaataaaagtgcagccagacaaagcctctctgcctgcacatggctgctgaaaggctgaaatggatggaggtggtctcacccaggggatcccagggactgacgttcctatcgcagggaaggtgtcacacacggagctacggaacagcagggccggagcaaacaaagccagcccagctgcctcggctattccaacaggggctacactggagacattttaaaaataaagggggtgaggggaaagaattctccagaaactttggttcttctgtaatggcaagtataattgcaaaaaacatcttgtcagcctgtaaaatgacactttcacaggttttcttagcaagggagctagatgggcaagaaccaagcgttcaagttcggggaccgttcgagcccagtttgctttgctgtgtttcgtagccattaatgtccccccgccaattaccaccagtcattttgcaaagttatcattactactgtttaaaagaaaaaaaaacattgctcattttagaaagctgtctgtcaaaaatgcttaaaataaaagcagtcttggcattcgaaggaataagtaccatttatcttgaaagccacttgggtaagaatttctcaacagtgttggctacaagaaccgttgatgtatttgcaagaaagcgcaggtgtttatggtacatggcctttggtgggtgggcgtttttaagtttacttctttattcagcaaatatgtattgggcacctgctgtatgcagggtaatatcctaaggccttggggatgcagtatggggcaggccgtgaaagtccagtgggaaatagggcaagtccagggcccaggcagagcagaagaggagactgggcaggcggggctggtggcattgccagagagtgagtgcttcccacgcctggcctcactctgtcctctcacgagccttactcagtatgcagtacagtctccattttatggaaggggaaactgaggcttagagaggcccccataagaggccaggggccgggccccggcttgcctggctgcagagccggcgtcctcacgttttgtggggcagcctctccagctgcaggtgtggacacacatcaccgtgcggggcgcggaccctggtctccacctgcccagcttgctctgcgcctgcatgggttcagccacatacacagtgttcattgggggttagaaaatgaacacgtctacacaagttagacctatgttcattcttctcaaagctaaggattttctctggagttttttgggttttttattttaggtgtggttttttcattttgttttgtttgagacaggtctctgtcgcccaggctggagtgcagtggcacagtcacagttcactgtagcctcaacttcccaggctcggatgatcctcccatctcagcctcctgagtagctgggactataggtgtgtggcatcacagccagctaattttttgtattttctatagaggcggggtcttgctctattgtccaggctggtcttgaactcctgggcccaagtgatcccccctgactcagcctcccaaaggtctgggattacaggcatgaggcaccgcacctggcctgttttgtttttaatgatgacatgtgcgatgtcaagaatccctaatgaggacaatcatgtaaaccattactttgaacataactatcaaattaggtataatctactcatatgctgattgacggcgggcattaacaattcacagtgtcatccagtttcagaaccaccagggttctgaggccagcccctttgctscttggaaggggcatggagacgcagagaggataaggagctggatccaggtcagggggtggtgctggagcttaaaccctgtgctctgtccatctggtcacctgatgccttcactggacttcaagcagccttgcccttggccttgctgataaacttctcctgaggagtcaggagacaataggcacagacccctaaggtgctgaccataggccacagccttcagagagctggtgaggggaccacaccaggcgcaccgggctcctgcgaagggccatcctagcaacggtgaggcccaacagaacagcctcagaaactgccaggctccccatcataaatcctgtgtggctcagaaactgccaggctccccatcataaatcctgtgtggctacaaatggtgacagaatgagaattcaaggaaatggaaagagaccaattgccctgttgggaaaaccatcgcaggaggaagaggaagtgtgcgtaccgggcggaagtgctccttgtcgtatgtgctgtgtgtgccgcgccttgctgagcagggaggcttgggatcccctctgggatctgcccccactggcctctggccgctccctctgccagtgctccagcctggccaggctttccrttgctggaatcttccacacgccccctgcctccaggcctgcatcctttctgccgacagcatgcctcttctcccsctctgggtccccaactctgctaactaatttttctacagagattttattttagatgccctttcctccacgagatactcagatctgttttcacacagaaggcgtgcatttgtcctgcttgttttctstatgccagcttggagtggccgctaactcgtctttgtccttcactctcaggtgacagaccatgccaccactgccctgctccactatcagctgccccagatgccggatgtcgtggtccgatccttcatggtaagtggcttcaagagtcaggtctcctgtttaaacctcagctcccttcaagtgagaacagggagcttgaagggcagccgttgcatcttcagactttgagggcctcccagtgggagatggggctgccagtttaaaactgctactttctttaaactgcgaagggatctgggagaaaccacttccagcttcattcactggtgctttctctacttgctgaaaaagcrgtggtttcagaaatgatcttccaaaatagttccagcattgacttagtccacagatatttcattgagctcctaatctgggccaggccctgtggttggcacagagcatgtagcagtgaattaacaratcgtgcagtttcccaagacgtttcctccttcgattttcggagttggagctcgagatgatagcagccccaaagcagccattccaatggggtgctgcagccggctcctgccagtgcctgttsagtatcttgcgagctggttcttcaaccactactagtttgaaatcaaacttggtgggagtgttgacaccacggaaatcggcaaacactgcaagtcaggacttcccccgaaccccagggccagtttatcagcatttatcacgccgccaccagttggcctaagcagggctaacaccatgtccccgcgtccttgacagacgtagccgccagctgttccaccgtcatgctctcaygccagcatgctcacacggccgcatgctctcacgccagcagaccccatcatccaccgctgctgggactccctgttttcttcatgctagaaagtctgccggttagagaaccgactccaaagacctgttagcaaggccaaatcagtgtgcatcttatcacatggcatcaacagtgccactgctcagagagcctggagttcattcctcagaagacacatccctggtgcgttgattggcttcatgatgctggcagagtgggcacaacacagccaggtgctcagagctcccacagagtggtccttctgtgtgtccagggaacagttcccctgaccatcttcagcaagagctccaatttcagatagatataaagacttgcttttgagcctaacacgttgtaatgccccctttccctttggtaactgactgtgggatttagggaagatttgaatcccagtgactccactcaggaggctgaagcgggaggatcgcttgagcccaggagttcaaggttacagtgagctatgatcgattgcaccactgcgctccagcctgggtgtcagagcgagatgtggtctcataaaaaaaaagaaccatttacatctgtcacagcactcagcactgtgctcagcccacaccagctaattaatacgaatctgttgattgattgatttgaggcacagacatgagtactatttgtggcagagacagaacttcttctacttagggaaaaataagtagtttaactgaaggacctcttgacctcgtgtttattgccaaaacccccaaacacctggcctttggaaagggggacagtactgatgggccatgccctgtcaccatgaaggcagctgtggtgaagatggaagaatgtgtatcaataagctcggccaacctcttcaaataacagttttctcttaattcaggaggacattaaatgacaagattcacgtgccctttcaccgcgagaacttgcttgcctgctgttttacgtttgggtatttttttctttggtagtgaatctccttgtgtttgagaattgagttacgggaggctcatccttatgtatgacgcccaagaaagctctgcactctgaaccattcaagtgtggatttgctgcttatgatgttatttggtggcaccagggctgtccccacccctccccccagtatgtcaggccacactgtgacaatgagtgacaacctctgaaatcagattagctagaaggcatgttgacctccgcggagaactctggaattgtcctcggttccaaggcttcctcagcacacatgcacagccacctcttagtagtgggcaaggagaagaggatggatactgacattcagaagacatgggacccagaaagtgaaagtggggtgctggcccccagaccaccaggctgctcggtggttcacggggactccagggaggccttcctgcttttgagagtaggggtttctgttttcaaaactccttcggttaggaggggcacgcgagcatcagacgtgaacatcagcagtcaggtgaccttgtgggttccgcctgctgctccctgtgaaatcacagggcatcttctggggccaaagccaacttaagttgtctgggccattaggcttgataggaaggaggactttgggagcacccgtatcccattctttcacttctctcctcgtttctctttttagacctggttaagaagttacataaagctgttccaggccccgtgccagcgctgcgggaagtttctgcaggacggccttcccccgacatggagggatttccgaaccctcgaagccttccatgacacctgccggcagtagcccccacgctggccccagcctcagaccccacccagcaccttcccagacacgcaggaagcccacagaaggctcagctggttcctcactgcccagatgtgtacagctgctcctccctttcataaagcagcgccatgtgtgcagaggccactcttgaagagcagactccctctgtggctgatgggactaattattcccactagccagcggactgaaggcaaagaagacctttctagaacctggtagaaggaagctgtgcagcatgctcctcgtccatgtgtgtcggcagtgctggtgtctgtcgtctccgcgagctgttactggaatgagcccttgtgttcatgggtrtcgtcatgcggggttcttgtgttttgtggggcttgggttttggtaacttatttttataagcaataaaccttttgtatcctggataaggctttgtctcctgtttgttacagcaccttataagtactacacattcagttcatgaacacataatggacctgggcctcttgaagaagcagaaaccagcacgtcccatgttcacagggtggttctttttgagcacgtactgccctgcgtcctgcttgcgggcgagagggcagtgctggcagatcctctatttcagagacgctgtgatggcttgaaaaatgaatgattccttttgagaaaaagaacatgcagaagtttctttttactaaaccagtcacacgcataccccagagggaaaggaacctgcccgggttagccggccagatgcgtgtgagcaggactcgcaggggtgtcggcttgtgggccccaggttttgtcctaaatattaccatgactcgatcccagccccatctcccgactttgttcagtgcctcagcaccaacttttaaagacatggcctgtttctgtgaagatcgttgacctggcgaagggcttgaggagggtggtggcatcgcccagagccagcctggccaggcccatgctagaacaatgttctctttgccgtgaacaaagcgtcaagagagatgacaccttctgagatgtccaaaagaaccagtgggtcctccctggcttctggtaccaccagccttccccccgccacccctggccgaaaagagccagagaatggagagggtttcgtgctgagggctctaggacagtgcctgcccacgtggcatcccacctgcagcactgccaccgtggacgcttactagaaatacacatccccaggcggggtgcggtggctcacacctgtaatcccagcacttgggaggccaagacaggtggattacttgagcccaggagtgcaagaccagcctgggcaacatggcaaagccccatctctacaaaaaaataccgaaaaaattagccaggcgtggtgttgtgcgactgtagtcccagctactcgggaggctgaggtgggaggatcgcttgagcgtgggaggtcgaggctacacctctgcactccagcctaggagacagaacaagaccctatctcaaaaaaagaaagaattacacatgctctggggtggggtccagcaacctgatctttagcagccctcaggtgactgtcacgtgccctggcacctaaggcctctgcccaggaggaatggtcgtgctttgatggcccactcggggaagtgggaggggcacacagggtaaggcaggacttttccagaccaggggtggctgtagattaaacgccacacctactttgtcaaattcaagatgccagtgctcctaagatacatcattactaaccactaataaagaaaaacatgctgccaattaaaccctggtcttgataatcctgtgtgacacgtgaatccgtcacaccagcctttcattgctttgacgtttctttcatctattccaagggagcagtcatttctcctgccttaagtcttattgtttagcctgtgataggcgatccctttacccaactcccagtaacagaccagcacacagcttcattgacttgctgtatcctttctttggtcttgtaagacacttgtttctttcttgcattgcaagaaaagatggaattgaggatatcgggtacataataacagtttgtctcagtgccgcacatctttccagagacatttaaaaggcaagtaaactgaccccgtgcagtatgaacgttgtgcacagctcatgcgaagtgacgacagtatgaccagctatgaccaagttggagcatgtgcagatagtggcacgcacgtcgtgactgccagctggcagacggcacacgccagagacgttcaaatggggaaaagcatctatctgaggattgatggatttgtggtcctggtaaatctcattgtgagaaagtgatctgggtttttaactgtttgaatcctcccaatttgcagcaagtctgagaacatccccattgggcactaaaggtcgctccaattcccgccagtctctgttttcaaaagagagaggagccttgagttgacagcctcaggcaggcgctgtttctacttggaactaaatgcgctggttttgtcttctctgtgtcgtcctcagagaaaccttctgtttatcgcaaatgatggcagtttcccatttacaggggtgatacaaagtgtccatttaaaataaatttatttaggtgaaaaagtgtgactgttaaagaaaaacattaaataaataatagcacaggaagagtggctatgacagaaagtgtgaaggatgtgggcaggtggcggggggcggacgcactgcccaggcctgcatcccagccttctgctagcggtggcaggagcctagagaagtggcttcatctgagaaccccatgccctcatccgtgaggcacaaggctggtgattcagtgatggtggaggggctrggggcttagagatggaacagatcggctgtgcattggtcacagggaggctacgcagtggggatgcgcgtgttgcctgctgttctgttttcctgctttttgacagtccctaattaaagagggaggttgaggccgggcgcagtggctcactcacgcctgtaatcccaacactttggaaggccgaggcgggtggatcactgaaggtcaggagttcgaggccagactgaccaacatgatgaaaccctgtctgtactaaaaaaaaaaaaaaagccaggcatggtggcatgtgcctgtagtcccagctactcaggaggctgaggcaggagaattgcttgaacccaggaggcagaggttgcagtgagccaagattgcaccaccgcactccagcctaggtgacagagtgagtgagatctcgtcccctgccccccccaaaaaagggaagtttggaggaaaacgagcctgagcagctagcctttaaggtcttcccatctctgacattctcaaccttcaatcaaggctgaacgggagtatatttgagatccagaaaggggagaggggctgaaagggtgatgggttcatttgccaaacactcaaaagctgggtactccaggagatgaacctgagggaggccggctttgtgtgtctcccactgaaacagaatgcactgacctgaagttgacacaaatagagaccaaggtgagttggggtcagttctaagatggtggactgcgagggaagccagagacgccgctgctgtgaggatggtcaccaggcctcagagccatcctttggtgcctgtcactgaaaggaacgtggccattgatgggtgctggttcaccaggggcaaaacatgagctagactgtccaagggtgggccaggtgcagtggctcacaccgataaccccagcactctgggaggctgaggtgggaaaatggcttgaatccaggagttcaggaccagcctgggcaacatagcaagaccccatctctacaaaagaatttttttcaattagaaatagactatccaagagggacctctaggcccgacctacaaggtattttatgggacttaattagggctcctgcagtgcagcccctctgcttgccaggccccctacgctgtcggctaatgtaatccccggagtggggtsggggggggtgtggtgttttccctgttttatagatgagaagccaagcagaggggttcacacagcagcacacggaggggctggctgccaggctggccacggccgagctctggggctcctcagcagcaagggactggccctgccgtgcccgagtgtgccgcatcgaacgtggcctaagccagaaccctcagccagaacttgacccctctgtcttgtcaatgcttcccatggccaccagaggccgggacgccgttaccccacgctgtctgctggccgggttaccccgtcttgccaatgcttcccgtggccaccagaggccgggacgccattaccccacactgtctgctggccgggttacggtgaatcccccgggtgcccagtaggaactgacagaatggagcgaggaggtctatgaaaggtggtccagattttttttttctgaactaaattgggaattggccttttggtacagagtgatgtttttccacttcccaccactgactgcatgaaaggctgatctttccgtgttaatgtgcaaactcaccattgcatttagggtgtcagagtgtgggcctgctgctacatcgagagccttttaagggcactggaattgggaggggcagggacgacaccaggattctcacaagatctggagcccctgcaaacctgacgggaggcactgttcggccatcaggtctgtgggtagaagacagaaaaggacaaggtgcccttctcatctgtgcccccagcctccacatctccagcagcatgtggaagatgatggggagcctcatggttccgggcctgatgggacagggtgggccagccccattccacctgctcacctgctgagtccactcaaggccgaatgatctgcacgtccaagattgtggacaagaggcagcggataattaggcttcactctctaggacacgcaggcggcctctttccccagtctctgccatccctcccccactctccttcccagccgggtccttacatccggggaaaggaacttcagaaactcactttcaagttgaattttaaattgcaggctgcctgtgccctgttattagtacttgaagagctaaaccttgaggttcacagcacatcccaggtagagcacttggcagctgtgcgatgattagttactcaggagcagctccagcctgtctcggtgctaattgagtttgaaatttcagctgcagattgactgtcctcggtgtgagccgcagtttggcgctaagggaacaggcaggtcctgctggcagcggcttcatctgcagcgtgctcctctcgggcttgatagagacaatgacctatgcctccagggaagaagggacaagggaggggctgaggccagggggacagggagaggaaactgaggccacaagctggagagccagcccgggacggcagcaagcgatcgtcagcacccgccgtgctcacaccctgcactcgggtgggatggactgttacttaatgcgttactcatctcagccttggctctcatcggcatcataggcttgctttcttaattacaaaaggaatccatatgttccttttgtaggaaatgaggtaatgtgaataagcgaagcaaaggaaataatacccatgattcccaccagcaggagctcatcactggagcactttggtgctcacctttccagaccctcctatggacgtgttgttgttgttgttgttgtggtttgttgttgttgtttttgcagaaagatgagatcagactgtgtactattttgaaacctttttcccattttagcaaaggctaaggttctatagcacagaggtccaaaaatgcagtggcttaaagacagcagacacgtttctcctccacttaagagccccaccagggagtggacagctgtgctccacgcagtcatttgggaatcctgctctcccatcttaggacattgtcacaggcaccttccaagtctgcagaaaggggaaggcacgtgaggagcacgtgccagtgttttaagtcccagacccagcactggcccacgtcagttcctcttgaatttcattagcagaaacttcgtcacacagcatacccagctgccagggctgctgggaaatgcagtctctaactgggcagccatggagccatctgcgaccctcactctggccgaggggagacccctttctgatggatgaacagcagcctccaccacacaacatgtgctgagcctcttccagtctccgggagtgtgtatcagtggtgctgtccttagcagcttgtttatttctttgttgtgtccatccttgggttttatgttacaagggtattcctctatttggttgcataccataatgcataccatacttacccaattaatctcctgttggatttttttcactttttattttgaaataattatagattcacaggaagttgcaaagaaacatatagggaggctccat

SEQ ID NO: 6857 - DNA, 52892 bp, Homo sapiens
accttgcctatgattaccctttgcctgggatggaattaacatcactggttaatgttcctgactagactttaccttgagctggagagcaaccttgataaccgacttccaaatgtatctgcgttaaccacacatacatgatcatgaaacattcataagaattctacctttttctttgcaaacgagtatttcttttttgtactgccatctaattctgctttaagactgctgctgggattaataagactcatatcttttaaatccaggtcagaaaatcttaaaatgcagttctccaggtcatctccttggtctggtgaagtggaagaaggcatctggtttggttgcaacagtgaagcagatattcctttcagttaaatacctcctagaatataaataagaaagaagcagccatgctattctttgatttcttgaagaaaatatgaagctaatcaatcacgcaaatcagcatgggcaaagtagcccaagctaaccatccatttacttactaaatcaatagtatttacttaggaacgactcgaagtcaagcactattctaagcactgagaatatagcagtaaacgaaagtgaaaaagtttctgcctgcttagagtttacattccagtggggtgaagtaaacaagtggataaattgattttttatttttaaagtcagatggtgtaaaggttatgaagaataatcagcagggtagggaggcagtgatggagaagcccttcgaacacagagagtaggaaaagcctttctgcagcaatagcatttgagcagaaacctgaattagggagcgagccatgcagtcattagggtaaataataccagaaaagcaacaggtacaacccaaatcaatcaagatgtgtgccagcaccttcagttataaacactttcttctttttgccccttaatttcagagctatgaaaatttccttccttagaagaaatagttcccaagacagccccactgtaatatgccagaagaaatgtcaaaatcgctactgtggccaaatcttgtcaaaatggacacactacaaccatcataccatgttggttcttttgtaaagcaaaggtgacaggtgacaagcactaagaggcacactgagaaaaagtatgggctttggtttgtgctgcagcagtttgccaagcatgtgaacatgggcaagctacttaaggtttctgagttctaaatctctcttgtggaaattgtgcattgtagtatctacattacagtactgtactgtagactggaaagaaatattaatatatagtgtctggcacaaactagggttcaatgaatggtaatattattaatattttaattgaatgctgtattttaaatttaacattaaaattttatttaaaaattagctgtgacagattatattttccaaaaatggctgcagcagtatttctggtccatttccctaagcctaggcaggcttgttaactactcccaaaaataaagcgtgatggaagcaatgctgtatgactgaggttgggttctcaaaaggatacgctagtgcaagctctcattctgagatgctcacgctgaggagaccaaaccactgtattgtgagtaagccaatccaacccatgcagagaccacacacagagaaccaggtggagaggaacagaggcctccagctgacagccagcatcaaccactagacccttcagattccagattggcctctgagctgagagcagagacaaggtgtccctgttgtgccctgtccaaattcctgccccacaacataacaactggttatttcatattactagtgaactggcaaagttagtttcttcaggacaatattgaaggaggcagccagaggtggacactgaaggttctgaaaatagtaacatgcaaagtagtcccaaactccacaagagggagcagaaaaagcaccactaagaatgagagaaaggaaggtgggagacactggtgacaaactttgccaattcacaactctgcctacagggtacctcaaccaggtgaaggcaacaaggagcagtttatgtgtgggggaacacacactgcttgttaacaatgctggataggactgatggagactaaacatacacagacacacacaggcaataccaactttcttataaaggacctttgttccttggattcataaattaagatgtcacttgcaccacataaaatgcatttgaatcagctaagtggtgctttcatggggctcaaaatgagctttgttataagggtaaggcaaggtaatacagatttattaaacctaaattctcttgtatttgaaaaataagtggaagagactgggtgaagaaatactaccttctttagcttctctttcctttctcatgaaaatgtctttcatataaagtcccactgaaaaaagtacatccctaactctacacaaacctgtaagccttccaggcagaagtaaaataagtagaagaatcttattcaacacacttcctccatgctcaaagctgttttattgtaaaggtagagaaagtacatatatcatttccaaattaaaattcattcaacaaatatttatggagggtcttctaggttccaggcattgttctagaaacagataacttatttacctataagggcagtacatttgggaggtaacattgtcgaaaggaattactatccaatccggtcccacctccagcatcttttccaatctccctctatatgacctgatgtagtctgtcccagcatttatgctttccactgctttgtttcccttactttttcacttctttccctccccatatgcttactatgtatatgaagactgaactcaagtgtcacctttcacttatgtcttgtctgctaccctgtgtcactgcttcctttgaaggcctgaaaaacttagtttccctatactctaggctcatctctgactatgctccccattccccatcagatatcctactctagccacactggaccatgcccagttccacaaatgagccatgttctttcctgactcaaggtctctgcacctgagtgtggggtgcctttcccaccaccccaaaatgatctcctccgactctgcatcttttttcagtctcagcttattttgatttatgtacatactctgaattattattatttgtggcacctctgctatgtgccgggcccatggaatagtcctgggaatgcagctatgaatgaaacagttgaagtacctgctctcttggagcttatattctggtaaggagagacattaagtaagtaataaacaaacaaacaaacaaacaaacaaatcatgaaaataccagctagggataacggcccctgcttctcagtttcctttgctggatcttccttattaccccaacctctaaatgttgaaccactctatctatacttaccctacaggtgatctcatctacttccaaggacttaaaactatatttgcctcaaaataattgagagagaggaggtaatatcaatgaaaccagattacccatgaattaagaattactgaagttgatgatgagtacatggggtttcatcataaattttccctacttctgtaaatatttgaaaattacatgagaaaagaaaaaagggaaacataaaggaaattttctgtttagaatactatataataaatgactccatatttatatcttcaacctgggcctttctcccaaactacaaattcatataccccactgtgtgtgaattttacactgtgtgtgaagccagctagcttcagcttcaaatacaactgttcaaaaccaaactttcgtcttccccagtcttccttatctgagtaaaagacaattttattcttcctgttattcagacaaaaaaaactttgggatgattcctgactccttattttctcacactatcattcacttgttcagaaaatacttttttttgagacggttttcgttctgtcaccaggctggagtgcagtggggtgatctcggctcactgcaacctccgcctcccaggttcaagcgattctcctgcctcagcctcccgagtagctgggagtacagctgcacgccaccacacgcagctaatttttgtatttttttttttagtagagacagggtttcaccatgttggccaggatggtctcaatctccagaccttgtgatccacccacctcggactcccaaagtgctaggattacaggggtgagccaccatgcctggccagctttgcttttgaagtacaatccaatcagatcactttgcaccaccatctttactaccaccctagttcaagctactatcatttgcagctagaattactgcaaaagctgaactatcttcctcctttgggagcatgagaagtaactattaaaaaaataagtcagactggccctgcacagaggctcatgcctgtaatctcagcactttgggaggccaggagttcaagaccagcctggccaacatggcgaaaccccatctctactaaaaatatacaaattagcctggtgtggtggcgcatgtctgtaattgccgctacttgggtggctaaggcacaagaattgcctgaacctaaaaggcagaggttacaacgagccaagaccgtgccactgcactccagcctgggcaacagagcgagaccctgtctcaaaaaaaaaaaatcatactccaatgacttctcaattcacttggataatgtccaaagtcctcacagagcaccttccccctacctctctgatctcatctaccactctcccgttgctcactacctatgatggcactatttgtgggtattcctgaatgggtcgttagaatatatcagcgccaagagagcaggggttttcctttgttcacctctacatcctcagcattcagaactctgcctggcacctaggaggtgctaaatgctaataaatataatattcgttgaatgaaataaaacagtgattgggtaaccaaagaaggcctcactaaggacctgacatttgagctgagacctaagtgaccaagagccagccacgcagatttagaaccagagaccttcaggtaaaggaaatagtataagttcctaaaataagaacaagcttgacttattgtaagaacagaaagagtggttggagtacagtgaggagaagtagaaccccacaggccatggcatggagtgtgcaatggaaagtcgtaggagactttttttttttgacacggtctcactttgttgcccaggctggagtgcagtgtgcgatcaccgctcactgcattctcgacctcctgggctcaagggatcctcccacctcggcccccaaccctcccctcgagtaactgggactacaggcgccaaacactaggctcagctaattttttttttttttcctgtaaagacggtgttcgccttgttgcccaggtgggtcttgaactcctaggctcaagcggatccgcccgcgtcggcctcccataagtgttaggattacaagcgttagctaccccgcccggccgtcataggagacttttaaacaaagcagtaacacgatctgattctggatttgtgttgaaagcagagcaggcagggtttacagataattgttatgtaaaaagagggaaaagagctaagaaagactctaaatttttggattaagcggccgacggatgacgtcatttactgaaatgggtaagaccgaaggagaattaggccgggagagtgaaatttcagatggccatggacaaagcagataagccagtatggtgctcataaagacatcaggggaggggacgctcacacacaggcatataggtacccaataacccttgaaaacagattactaaaacaatcatttgttccttcctaagcaaacaacttaaggaaaatgacggccagccggcaagcccggagccgcacgctcgcgtcagggccggcctttccataccaaggggcggcacgtgcggcaccgcctcccgcccaggccccaccccgcatgccgagcttggcccaacctctcctcccacttttcccaaggcggcaaaagccggaaagtgggagtagatgagcacatacccgccagtcctgatcctttctaaggtctctcttccctgcactgtctccgcctagcaattgtcactgctcaccgccctcgagcctattccmccgccgcgtatttgggtagaaaagctcgctcgtgacgtcaccaagctccggaagtctcctggcgtcggcgcaagggccgccgggaaaaccattgagaggccaccgggaaaccattgagaagccccggaggaccggcctgagcggaggcggrgactagagcggccgccggcacgacccgccttcaggcgtacgacgaccgcggccsgggggctctgagtggccaaagcggcggcactttctgcgtggccccggaaggacatagagcggaaggcgggagaaagaagtagccggcaggcggaggcagcccgaggrggcggttgcatgtgtgccagacgttcgtagcccactgagcttcctcacgccggctgtcgcagcgcctagccccacccggcggcctctcctgcgcttccggggccgtggcgagctagtgcgcctgcstgccggcccatccgcgcrccttgcagctgtccttgcgtcggccagcggccagacagttcctgcagcgcttaccgcctggcctctcggttccgcggcgcaccggagggcagcatgtcgcggcggcggcacagcgacgagaacgacggtgagtgcctgcggcccggccacggaggccgctcccggttgggagccgaggctcggcgtctttgggtgtccacggaagagactggaagctcttctccccgggaacgtgcggggagccgcggagggaaagaggagaatayggtggcggtgtggtcgggcggcttctagaaagcgacttctcccccgcccyagttctttgagtcaagggccgatcctcgggaaagaaggcctggtgaaccccatgggtagacccttggtctctaaggatgcttcagaatttcgtccgtaaaaccacggagcagggaagcacacctgtgtctgtgctgccgcctcttagggacccactggtcctagtgtctcgttttaaccttcaaagctgcacctgaaaagggctcggaagaattcactgaaggaaaggactgagagatctcatgagttgcagtctgaactctgttccggtagtggttatccgttgatttcacttctttcaagctgcagggaaagaatattgtcttacctgcgcccaagaggtccctaataaacagacacaggttactgcagattttgaactggccgtaagcgcatttcccttgtgtgagagagagtgctagaaaactaacttcaggcctctgagagagttagaacaggggttcccatctccgtttggatgattgtgctcgtggagatcagtgttgccttcataaagatggaataattctagttttaacaacaacaaaaaaaagatgcttatattacacataagccttacaatcggtcaaaaacacaaatccacacaccaaaaaagtaaaacttagagtaattctattgttaacattttagtgtattgttttttgaagagagtgtatagtagtggttaagagatgagactttggaaccagagggtttaggttcaaagccagaccctaccatttacttggtgatcttgtccaggttatgaaatctccttaaactttagtctgtaatacagaagtaatgatatttatatcttctggtttttgtgaaggttaaatgaggtaatacacatcagcaacaatgatgttttatcatttgccaacgcttaagaggcggtaaacgttagcagatgctgtcaatgtaagaaaaaaacccataacagacattttaaattgagtaaattttatctactaacgtttgtctctccttgagtgttgtggcagttgaggtggaggcagaatcgcatgcatttagttttaatagtgaaacaccagatttctacgaaggaatggcttgagaggatattctagtccagctttctatctgacacctaagggtctagagactgagcataactaagatggagggacagctgtcagttcccaaacaccagcaagagcgaatccagtccggggctctcttcactacacaggtataaattaaataactatgctgcgtgctttgatttctaacacgaggtttcttgtgtaacctctgtacaaggcacagaaaatacaattccctcccttttttttttttttctgagacggagtgtcattctttgtcaggctggagtgcagtggcgcgatctcggcttactgcaacctccgcctctcaggctcaagtgatcctcccacctcagcctcctaagtaactgggaccacaggcgcgggccaccacgcccggctaattttttttttgtttttgtattttttgtagagacggggtttcgccacgttgcccaggctgatcttgaactcctgagctcaggtgatccacccgcctcggccttccaaagtgccgggattacagatgtgagctactgcgcccgccgataatacaattttcatatgctttgtaattgactagtcaaaaactaatatacttctcaagtcattacttgggggctggagaacttgagtcttttgttcttttctttgttgttctaatgcttcctttttctcacttagaggtaatccctaaagagagaggaaatgtcattgtagggcatcctagagaattggaatgctaatatgtagaaaaataacttttgctttggttattgggagacttacataactttcytggagttggcttgtttttaacaccagctggcagccaaatcactgtccatttgggtcttgccgcgagaacctcagagtaaataagacaagtaaaacaaagcattcattaagcaaaggtttttatggttgatattttagtgtgggagaggcagatacaattcatgtttgataatacagcaaatctgaaatttttgtcagttgccacaatttggataacgatcgctggagtttaccctacacagtgatctgaatcagattattttggatgctttccttttagttaaaaatctattttttaaaaaataaatcttagaagcttaaggattatagaaggctattttaaaatagggtaggaattattacagtcagaattaaatagatgcatctgagcatttctggacaattgtcagctgctgtcagtcactgccctgactttccgtatgcttgactctctatatatagagtgtgtgtatatatataaactataatagaatgtattatatatatttatatattatataaatttatatttatatattatataagtttgtttattataagttttatataaatatatactctaatatatattttacatataattatatactgtatatatagaagcaagcatatggaaagtaatacatatatatatatatatatatatatatatatatatataaaatcatttattcaacaaatacttaacagtgccaagctctgtcctaattacttgccatacagcagtggacaatataaagatagagcctcccctctagagtagagagaagacagtcaagtaaagtatagtgtatcatatagtgacaggcgctatggagtgataccaggtaaagaggrgagagatttctgtgagggagaagttactattttatgtaagttgattagagaaggcttcggtgtgaatggcatttgaacaaagacttgccggaggtaaggtagcagccatatagctgtatggggaaaagctgtgatccaaaggtaaccatgggcacaaaagcctgaagactatagggttcctgtcatgttaacagaagagcaaggaggccagtggtgctggagcagagtgagtgagggggaagttgtaggagataagattagagagatagcagagggttgcatcttatagggagattataaaattatacttctgtgttgagactcgactatcaaagattaaggggggtaggattaggaggctataccaatgaagttcatgtagtagtccatttataaacaaggaaaaggaaatgctaaatggaaagtaatgtgtatggatactagtccagtgctaaatcttaactaattgcttagacttgctttaaaaatgtctctgaagctttttagttactatgggatatgcagtccattgtttgttcttttaagaaagtatttagattgttcaaaatcttagctagaaacaatacgaatacaattttgggaatttgggcaatttacaaaaatttcagatttgctgtattagccccatttaagcttcttagaattaggtccttgtcttttggactgtggctgatttttttacttaactaaagaaaaaaatagaagtgaaaggatttgttattttgagagagtatagtttatttcagaagtgatggttgcctgttttaagtctgcgggctcaaggcatgttatctttcaagttgttcaatatcaaaatagatgagccaaaaagaagggaacagtgtgcttaaggtttaaaaacgtaatgttgaagttgttggttttagttactttacttttctattttacagggttggtttttgttttccattttgtgggtctaaaatttcttgtaaggctataagatgtacagtgtacccrtataaaattaggattgacttatagaggggaaatttatttggtttattaagatcctttcagatggattttatacctgcttctctatactagccaagtctgtctgagtgaagtggtaatgttatctttaatttacattttaaaacttttacatagttaaattttaataaaaaatctgttcttgccttgggaactaccatagatacgttttcttcagggtacattgagcgaattccccaaattgtattcgtattgttttatttcatttccctgttcccttacccaggttgtcttatgagttcaatatcatgtttctgttcgtaagttcagattttgtctgtagtcttcacccctttatagtctctcaactatcaggtgaaagtggaacatttcttacctcttaatactttctgcctcctcccattctccagacaaatattgtcctttaatatagccaaaatgaacaaagggtttgcagttcagagatgtgactatgtacatgtattttctagttgtttctcagaaatcataccttctcttcccacagcactattttccccttttcaagcttataagagggcctaggagggttgctttaaaggctgtggtatgattccaaactggaacaagccagctggaaagttaagttaggaagactgtagaggtggaataaagggttggcaaaatagatgagccagaaagaagggaacagtgtgcttaaggtttaaaaaacagcaacaaaaaataactgctctcattcagctagtttttcagcatctgcattctcccaacctcactgaaatttggttctgaggagctctgctttctagaatacggtttcttaacatcagcactattgacattcttggccagttatttgttttgggagatgccctatgcaacgtgagatatttagcagcatgcctggcccctacccactagatgccagttgcttcccctagttttgactactaaaaatgtctccaaggtttgccagatgaccactgggggcaaaatctacaccctgttgagaactactgctgtagaagaaggctatttgaatgtcctagctggcagcttgcgtaaatattacatcaattatgctttttttcaataagtgaatcctggaaatgaaagacctttgtgtgaaatttggcactttgggtggtggaaccttgataggtcctgtgacttaggtttgatctatacttaagaatcaaggtccctgaacctctgtgccacacatgtctacaactttacacaggcagatatctccaggaataaatacatctcagctctcatgctgcatgcgtattatactttttgtggcattatcctttcaaaattatagtcagtggacattcagtcaggttatcatggtaattaatgggttgggaagttgacgtacagagtgtcttaccctgtaacctttataataccccccctcagatcctatgtggatagtaatagattcgttttattcagcttcagttcatgtggtatctgaagatcatttcagtcattcaatagatttaacattccaagcttagaatagccaggtgctgtgttttatgagaatcaccatacatcattttcaagccaagtgttccataggcaagtaagtgattatgaactttgtaacaataattcctttggctgttcagatctgaagattgaagttatatgtaacttgctactgtgtaaccatatatccaactgcagattttcattattaataccgattccctgcacagttacaggctcttgctttcttgtccatatgccgaccaaataattgaatcaatggaagtcgaaaattggattgtattagactagccaaagtgtttagcagcagcatcaggttccatacttaacactattattttaattttttaagctttatgttataccacaaaaggacttaggtgagtgtgttaaggctttaaacaaagtggtaagagatacaaacagcaagggtcttaatagacaggtgtttgaggttaatttttagcacaccttcattcaacttgaattgttgagcaatcaaaaagacagatgsttggtaatgattttagaatggtagatttaaaaaacatagagattattcgaatgatatggtttttaaataaagcagttatcagtaattcagttaataaaagctagttaaagcaggaattgtaaaacgtggtccttttttccaccaattttttgatatagtgctcaggacttttctttgaatatacgtatactgactgtcgttcccattatttaggataaactataccgttgtgctgcatcatatgcagaactgaaattgttaattgaagacttgagattagagcttagaaacatgtgaagcaagtgagaaatcctaatgttttatgctcctttttcccatcttttgaagctttcctctttatagctgatatgacagcttttttttctgatcaagtctttccaaagcattcgacttggttttgcacccttattttgtcatttacataatacattattagactaatgaatactactggtactaacaggtttcggaacaagcaactgaggatcagtaaacaactcaagttaaaagaatgggagtagcggtacatgagtattctaactactagtgtttaacatgttgttggcagctttccagcttgtccacagaaatggacagggctgctgattgcatagctccatgggcactactcacacaaaatttaacataaataatgcctcctggagttattgtatatagtggctctgggaatgggaggctgttggttaatctagcttagtctgagaaatggagggtctgtgaagagcttctactctgtaaaaacatagggcctggtagaaaagagattataacctaaaaaggttaaataaaatttgtgatagcagatttatcatgtaatgttaattttttatgttgctgaaataggtgggcagcctcacaaaaggagaaagacctctgatgcaaatgaaactgaagatcatttggaatctttaatatgtaaagtaggagaaaaggtatgtcacacaataggcacaggctgtgatgggtttaagaatgtggttaactgtgctttgattaatttttgcagctgaaaagttggactacattttggcaaagctggtattaccatgcatctgtatcccaaattgaatccatgttgaagcccctgggatgtagataattgatcatttttagtactttagtaattaataattttcatagaagatgagcccttagaagggacctagggtatagaccccttaatttatgcatgaactaaatcagccctgaatacttgaggtaatttgcccagagtaagagagtgaattagtaaaagaggtaaaatggagcccatggtgtcctcccatttctaatacttattctgttatcatagactgcttagtttttaaatttcactcgtccacttttcatggatttctgaagaacaataactatctgaattgatttatactaaacccattatagctctgtatgcatgtaagactattttaatgatcatgcagaagtttttattttagttcactaaaatagcaattgaaaggacagatgattggtaatgattttaaaatgatagattttaaaatatgtatatatttacatttaaatagatttttaaaaataaatttatgttgctgagtacttgacagatatttaatgtgatgtcctctacagagtgcctgctctttggagagcaacctagaaggcttggctggtgttttggaagctgatcttcctaactacaagagcaagatcttaaggcttctttgtacagtgtatgtatgcaaaagatttatgaatccaggtgataatgtattatctactcttaaatgctttgggaaatgttcaaaatacatgtttatgttctatatgtccttggctttacttctatggggaaatttgtacaaatgagccaacctttggcgctttggcgaactctttttcttagggataaaactaaaattgaacattttccttgtatgttcttacaaccttagaatcattttagttgactttttatagagatagtagatactgtctcattcagatatatatttttaagcatgtacatttaaatgtatgatacttacatttttaaattagtaccagacaaatttgggaattggtaactcaggtaatagcccttcttggaagactgaagatgctttggaagccactgttaataggcatactctctggataaatgggagtctttgtagttacatgaaattgtaatgtatccatgaggtgtttttaaattatgaaggtgatgtttatcacttctcagccttttagtttagatcaagtgaaggtaactttaagaaactactaaggaaatcttctgaaatcctttattaaaatggagtagtatttacacttaaactgttggaagccttgtttgtttaaggctgaacttgtattgcttcgcagtgttcttttttaatttttggttttgggagggtttcagggaccacagttaccatcaacacaggtattttttttgaagaccttgattgtccctgatgttctgctaggtactttaggaaaacaagtcaaagagaatctcttgcccacttaatgattatgaattcttattgctttttgagctaattctaaaggctgcctaaattaggaaaaattgctttttctaaaggtttattgtaatcctttcccatacttttaaaataactttaatgaaatcagcacacttggagtaagcaactgagacgtaaacaaatcttaactatatcagagtatgtttttaaaaaattcaataattaaactggtaggaacttagatgaaactcgttttaattgtgcatcttttctaaacaactagaatagtgtttctcaaagtagaattctagttccatgacatttggttagctaagtttagaaattctgaatgctgcacgcccccccttaatgattctgtattaaagaggcttgtttcacccaggatttctgagctattttaccatggaaaccatgttctgtggaaatgctattcagttccactaagcacacttgaagaaaaactgttgtagcattagttttatttatttcagtatgataactttacaattaaatcatttactttcttaactcttagattaactgatgaattaaaatgaaaaattacgggactatgtctgtaacatttctcaatgacatgctttttctgaagtatttttaaagacatagctaaaagtaatcctgttccaaagttaatggaatgataaaaagattcacataaaattcagcaacttaacgccattgttttggggttttcttgtkatactgggttcttaaatcagtgcacgcctattacctgagaagctgacaatttatacaacattagttggactactgaatgccaggaattacaattttggtggagaatttgtagaagccatgattcgtcaacttaaagaatcattgaaagcaaacaattataaygaagccgtgtatttggtaagttagtttgtttgttggtatgttatgactactgttgggatggagggaaaaggtgaactacaaccaaataatttaaaatgctctcctaaaacattctcattcactttcatagcttcataagccacctttattttgacgatacccccaaatctgtaactgtatctccaacctttctcctgagctccagtccagtattccagatgctagctgcatagccttcagataccttactaggaagtgcctaaattaatgcatcattcatacctccttttttctgccctctccccagctcatacagtggccactgtgtactgaataacccatctagaaagctgagcattaatttttgtcttccctttgccctctcgtaccataggtgttcccaatccctgtcaattctgtctccctaatttctctcaagtctgtcctttcttagtctccagggcctctagcatagtttatgccttcctccagatgttcttaatagcctcttaactgatctttttgcatctagattctctgcttttcactttgtgttctacagtggcaccagactggtctttctataactaggctctgcacatgttggttactggttaaaaaaaccttagttccttcccattgtctacagtgagtggtcttaaaagcctggtgcacaagatgattccttgggtttcaggaagtgaatattaagaactcttatttatcttaagtggaaatgaaattaaaccttactaataatacatagattaatggtgatccagtgtatatcataaatacatatgtatgtgttgaagatatgtgatcaaattcttttttactgagtacacaatcaaaaaagtttggacacccatcaggctataggattaaagtccagactctttagcctgaccctttatggtttccccagtctgtttctctattcttgtctcccataygctccccagcaatatcaaaataacttgcagatccctaaacacaccttgtttttgaacctctatgcctagactgccctccttgctcactacttgaggctgttgctatcctttatgacctagcctaattgttacctcctttgtgatgctttccccaactccctttgtcattgttcctaaaaaatgcttaatttgccttttagtgtgggagtcattcctttgtattgagattgtgcttgttccactagaatgggtcccctaacagtgacttttagtagtgtttagcaatagcacactaagcacacccaataaatatgtgttctgtaatttccatttctgtaattcagtgaaaattacagccaaacagaaaaggagattataggttgaagtagctagaatattttacaatctggattcttgatgtagtatagcatagaaacgtatgaactcacagattactgtcctttatatagtctttgttacaacttctcaattctgccattgtagcacaaaagcaaccatagacaatatgtaactgaatgagcgtggctattccactaagtttacttatgggcactgaaacttgaatttcatgtaatttgtatatgtcataaaatactcttgatttttttttcacgcatttaaaaatgtaaaaaccatttttagttcccagctatgcaaaaaacaggtagtaggctagattcagcccttaggctatagttttttagaccaatagtttagcctatacaagattgcttattttgtagttattataaagaacatttaggtttaatagcagaaattgtttgccccaacaggtccgttttttatctgatcttgtgaattgtcatgtgattgccgccccatcaatggttgctatgtttgaaaattttgtaagcgtaactcaggaagaagatgtacctcaggtaagagaacccctcatgctgaatcttgaggggttcttgaggggttactgaatcctggtacttccatatagtaccaggaatttttcgctgataacccattagcaataaagaaaaaaataacagcagactatcacactttaagttcttactatctaaaaattaagctgactggcacactggtgggttctcataatatctgtatgttgatttaaatgatgctgtctagtaagattagaactaatatatctagaaatgctctgtataaaccagatgtcttatttaagtcctattaaatagcttccataggatttcattcaagaataaataaaatatgaatgaatataattaaagcatattttaaacttaactttttaaaaatcctttaggtgcgacgagattggtatgtgtatgcatttctgtcatctttgccctgggttggaaaggagttgtacgaaaagaaagatgcagagatggaccgcatctttgccaacactgaaagctatcttaagtaagggcacagctcatagtactctttgttgcttaggtaaaggatatcttatatcagtgataccatttgagtttctcaaaaataagctgtagagttcctgaaggtattttctaggtaatcctgttctcctgctgttttaactcactgagacctcaaagtagtcagatatggtttgcttacttttgccagtgcaaaggacagttggcaatatagcttcttttaagctgcttttatatgtttgtttataaaagacataaaacaccctagtgcaatagttcctcaaatattagtgtggataagaattacctgtggtacttaaaatactcagaccccaacccccagacctgataaattatacaatttgagagagaggtttggacatctgtattattaacacatttcacaagtggagaaccactgtcctagcacatacagtatatttagttcatgtaaattaatcttaaatcaagctcttaaaacagtggtccttaaccctccatccagccagtacttcttaagtaatatgacacatttcaattaaaatagtcacatgtcttcccattactcatctctcctaagccaatgtaaaagcttggtttatattgttagatacaataataataaataggtctttttagtaaatttatgcttaactatccagcaacatggtaatggttatgtggcccttaggtttttacagattgattttgttgttaagtttcattttctcttttttaagtgctttttttggataactgttaatagctacttagttggttattaagtaaagttaaaagaagcttaaaaaataagaatcttttggccgggcgcagtggctcacgcctgtaatcccagcactttaggaggccaaggcaggtggatcacccgaggtcaggagtttgagaccagcctggccaacatggtgaaaacccatctctactaaaaaatacaaaaattagccgagcgtggtggtgggtgcctgtaatcccagctactcgggaggctgaggcaggagaattgcttgaacccaggagacggaggttgcagtgagccgacatggtgccgccactgcactccagcctgggcaacagagtgagactccgtctcaaaaaaaaaaaaaaaaaaaaaaagaatcgtgtgtgtgtgtatacatatcctttctcttttttattcaaatgatagcccaatatacacactgttcttcacttggctttttttttttttcttactataacttggatttgttgcataaaaatacttaactctacttcattctttttaacagttgtagggtatttcactttttaatgtaccatgatttccgtagtctcctgttggtggacgtttaggttattttcaatcttttgctcttataaacaatgtttcagtgaatatctttgtgtatatgtttttatgtacatgtgcaaatatatttatgggggatataaatttttagaaatggcattgccgagttgagggttctaaacaattttgatagatttagtcaaattaccttccaaagagattatactttcccaaagagattatatcagttaacctctttgtcaacaatgtttgagactgaatcttgacctgcatcttgatgatacacagtacattatcaaaacagttgatatctgccactccagtaggtaaaatgttatttcattgctttaatttgcattttaataactgtgagggtgactgagcatctcttgtttttaaaagcctaaatgtagattttcatttttatctttagaagacgccaaaagactcatgtacccatgttacaggtatggactgctgataaaccacatccacaagaagaggtaaatggatttcagtcccttgtgatacaaacacagtcagctcttgaatagattcttatctctgtaagatactcagaccattccattttaccctttgactgtgtttctacatttcatgatagttccttctcatagctcaaggtgtatggtaggtctttaatagatgatagaatgtaattgaaatattcccttgttctttggaatgccagctattacagagttgacatatatttatttaaatgcttaatttgaaaaatgtmaaaacagacagttccaaacaggtagactttgtaagtaaaataaaaacaaaaacttagcacctttttttgtaccatcttacaagttagcttacttttgtatcctgtattttaaagggtagtgattttttcattttgtctagtcaaaatgttaattatattaatgattaaaaattaatctgtctttagtatttagattgcctgtgggcccagattcagaaattgaaaaaggatcgctggcaggaacggcacatcctaagaccttatcttgcctttgacagcatcctgtgtgaagcactgcagcacaatctgcctccttttacaccacctcctcacactgaagattcagtgtacccaatgccaagggtcatcttcagaatgtttgattacacagatgatcccgaggtaagtgaccgactaaaagtcctagatattgacctgtgttgcattgtgcttgtgggttaatcccgcttgaattatgcctgtggtatgttttaattttgagttgtttttatctaagaaggtcagtagcaatgaagttaactttttaattcagtgaatgatatcacctcattatgcaagaaattatatttggcatgtgtaaatagattacagagacgtgcacagtttgcaggctaagagtgtgggttttgggtttttagagctacgttggtttgtgttttaatcttggtttagccaaatactagctgtgttaatttgggaaggttatttacctccctgtgctttcatttcctgaaggtaataataatagtatacatctcataatagtagtatatatctcatgttatgaggattaaattattcacatgtaaaatgcatagaacaagaacagtgtctgtcacatgatgaatgctcagtcattctggcaatttttctttcttatttttttcttttcgaaatggggtcttactttgttgcccaggctgcaggtgagatctaagctcactgcaacctctgcctcctgtgctcaagcgatccttccacttcagcctcctgagtagctgggaccacaggcatgtgtcacctagcctggcaaattttttgtagagttgagatttcgccatgttgccctggttggtctcaaactcctgggctcaagcaattcgtccgcttcgttttcccaaagtgttgggcttacaggcatgagccactgcacctgtccataattatacttaataaggttatttctcagtaaaagtacctagttttaggtatggtccctctctaggcaacacagcctgtcttgtgattattcatattgtatgattatttgaaaacaaatgttggaagtatttttaattaaaaaattccaaagattagtctaagctgactttatcatttttaatatacatgttctttatttcaaagtcaagtttcctggcagccattgtactgttataattgtatattgtacaattaagaaaatttataattttcattgtgggtactatcctgtgtattgtaagatgctcagcggtgtccctgatctctaccctctaaatgtcaatagcactctccctgcctcagttttgacaaccaaaaatatctccagagagtgcaatatgtcccctcaagagcaaaattgcccccagttgaaaactattgccataaaaattaatattaccacctaagtcaaatttgagtttcttctattgtctcttttctgttctatggtaaagtgctaatgaccagtaggaatttagtatatatgtaatctattttggaataaaaatttctcagataatcagttacatatacaaaattatcagcttgctgccgtctttgctatattccatatgtaaccaaatactttagtcaaaattatgtaatgatctacttagatatgtctaactgaaaatctggtttacatttaagactgctaatgtttgtggtcgggtatttttttttttttgtgcaggggaaactagaatgggacctcaaaatttgtttctcctgaatttgtatttaattggtatcacctctgtaaggtgcatatccatcccttgctagaagagtataaatatataaaatacatattactcccaaaacgaacaggattttgtttctgttctggccttttacaagttgtttattaaaaaacattagaaattgtaaaaaaaagattagaatcatccaaaagtcattattaaaggtttattttgtgtgttttgaacctgtttgctatgaatatacttaagaataaaataatgccatgtagggaatatgttttgagcttagacagtatattatgggcatttttcaattcatgcatgactttttatggctatgtggtgtttgaatagaattttctctctgcatagttattaatggaaataattcactctcggtttaaaaaataaactctgtaagacttgtattatccaaaattatttagtttcatataataattggtgtgtaaagtaggcagtggttgtatggttaggtatgagatgtggtagaaaaaacactacagctgatactctggggtataagtgaacatgacartggaatttcctgaaatatagagctktaacacttcagaacttttatccccatcacccagtttagtgcttggaacataatagtctctcaaatatttgttgaataagtaaaagaaatctgttttctaggcctgtagtgtacacatttggttttctttccagggtcctgtcatgccagggagtcattcagtggaaagatttgtaatagaagagaatcttcactgcatcattaagtcccactggaaggaaaggaagacttggtaagattcttttcatggtacttttagaagggagagaagcagcaattttgataattcagtaagagcaaaatatatgttgagagtgtaagaaaattttatcctcctgactccctgtcttgctaaaatcaatttctaaaaacacttgctttactttctcaaggctcttcacccttgtatagtacttttcgaggtgctttatagtaataagcgtatgatgccagtgtgtttggtgtggatatttagtatatgctatggagagcttgaatggcaagttattttgggtttggataccaatagttttgctctgttttctagcatttagacacccaagctttggaatttttttttttaaataaaattttcttaaactttgggaagtttggtttagattttaaggtggaaatgaatatagtattatgagagtgatctactctattaaaacttctttaagttagtacatctgaatatgcttccttagtattattacctagactccttttgagctttcaagaaattttggatgcagtaaagattttccttgtggtagacagaataatttatgccatagttaaatgaagtaactgaaatctaggacatttcaaaaaagatttttctttgcttatatctaaacacattgcttttgaaactgcttatttgacttttcttgtgtcttcgtatacttattaaacttaaattacactttttatagtgctgcacagttagtgagctatccagggaagaacaagatccccttgaactaccacatagttgaggtatgaattccatgtggagcgtgtttctgagtttcagaatctttctgttggctttaaagtatgatctactcttggcttatttatttatttatttatttattgctacttgtccagcattcagaattaatagaagcaaggaaattgctgtcggttttggtgctctattagccatgttagtaaagagaaaaaagattggaaccagtagccaaatggaattttgaattgcctataagttatttatatagtatgtcttcattcatggatagttgttgtggataatgtaagttacctctagctctgtcaatacattgtccacttaacagacgtataagtgatttaaatactttaaaatatcattttagacagataacatatctttaattgtgtttatctggcctctcagtactagcataaacttagttagtgtattatttcctgtaacacaaagtgtagatgaatcatcatttattcttagaaatctaaagagccaagcagtttagaaatagagtagcaacacttttgacttcatattaactcatacaaaaggttgatgttagtatacagttgaatacattatagagatttatatcaaaaaacagtgttcacttgacacgtgagtcaaactgttaactgcattttttttttttccaaatggagccttgctctgtcgcccaggctggagggcagtagcgtgatcttggctcactgcagcctccgcctccggggttcaagcaattcttctgcctcagcctcctgagtagctggaactacaggtgcacaccaccacgcccggctaatttttgtatttttagtagagacagggtttcaccatattggccaggctggtcttgaactcctgacctcgtgatctgcctgccttgggctcccaaggtgctgggattacaggcatgagccactgtgcccagcccactgcattatgtctttatattaaagtattcatgggccaggcttagtggctcatacctataattccagcaatttgsgggctcaggcaggctgatagcttgagctcaggagttcgagaccagcctgggcaacatggcaaaatcctgtctccactaaaaatacaagaaaaaaaagaaagagccagccatggtggcacgcacctgtggtgccagctacttaggggtgggaggatcacttgagcctaggaggtcaaggctgcagtgagctgaaattgtgcctctgcactccagcctgggtgacagagtgagagtccgtctcaaaataaataaatagtgttcatgaaagagacagcataggatgtattaagagtcgtatcctctaccgactgagctagctgggcctgataggatgtattaaggttcatattttgttaatattgcactttggtgcctttttaaaaaaagtactgtgtatttcctatctttacaaaacttggatatacttaatgctgtgaacttggctcaatgacatgtctgaaatgcaaaatgtcatttttaaatctgcaaaatgtatagaaattcatcagaccgaagtgtagaagtgtgagagataggtaagagtaaaggatgcagactagggctttagaattctagacaggtggtccaccaattatacagagagagtaggaaggaagtttctgaataagaggcatggcaaagaagtcttggactgccagaaagatctgagcatctatttcaagtaacagtgtggaatgacttgattttcttgtttcctgaccccaaagtctaaaagaatkctttttttttttttttttttgagatggagtctcgctctgtcgcctaggctggagtacagtgacacgacctcaactcagtgcaacctccgcctcctgggttcaagcagttctcctgcctcaggctctcaagttgctgggactataggtgcccaccaccacacctggctaatttttgtattttttgtagagacagagtttcaccgtgttggccaggctggtcttgaactcctgacctcaagtaatctgcctgcctcagcctcccaaagtgctgggattacaggcgtgagccactgcgcccagcctaagagttcttgttatttataggaatgaaactgtcatggatcttttgagcccctcaaaaagctgtacatcctggctcagctgtggtgctttcaaagttggaatttaattgcatagttctctgggaggagtgtagatcraataagcattagtgtcgtgtgtttttatttgatcgaattatagagagaagaaattttcattacagttttcagttttagatttttgtgtttgaaagagcataattttaaatattaaaaagtaattccattttcatatgaatgccatggagttagagctcagatttagaatgttaaggtctttctaatagaagtgcaaagatagcagttggattgaattgtgactcatgattcttttgtaggtgatctttgcagagctgtttcaacttccagcaccccctcacattgatgtgatgtacacaacactcctcattgaactgtgcaaacttcaacctggctctctaccccaagttgtatccttttctttatttttaaacttaatctctttggcctggtcttaaaagattattaaatatttctgcttgtgggtttaaattttgtaggtaaaaaatgtggcttttgaagtgtgttgtgtgtgtgtattacatgtatgtacttgtatgtctgtaaatacatatgtacctatacatatgtagatacatccttcactatttgggtcagggagttcaaaaatagacaacaataaaatttgttgcctagattgacttttcctctcacaatagatttctctgaagcatgtgatgcttgctgtttgatacagcattttacccacagtagaacttctttcagagttggaattaatcttcccaaaccctgccactgctttattagctaagtttctatgatattctaaatccttcrttgtcattcagcagtgttcacaaggagttgattccatctcaaaaaaacactttctttgctcatacatagaaagcatcttcttattttttaaagttttattatgggattgcagcaattaataatggaaaagcttgttttattgtaaaaattaccagtatgtgacacagagacaagaagcaagcagatgccattggaaaaatggtgccagtagacttgcttgttgcagggttgccacaaaccttcagttaaaaaaaaaaaaaagaagcaatttctgctaagcacaatgaaacaatgtatgcctgtgcgtatggaggggcatggggaaatttgggaggtgatgaaaatattatcttgatttcacgagtgtatgcaggtcagattcattatacatcactgatatttcaaagctgtaagaaaaaacaaaaacaagattgattgtgtgaaaagatgttcagcattattaatcattataaagacttgaaatgttttatttctattcttgtctattacaacttatttgggataaaagtggagaatagttttccttatcctaaattcacagcttgcacaggcaactgaaatgctatacatgcgtttggacacaatgaacactacctgtgtagacaggtacagtaatcgctttactgctgagctgagttagcagcttttacttcctgtacttcataaaggaatttgagaaagacatttttaagaatttccatgtttagtttttttcttgcctcccaaaataacctttgtataataaccagactcatacttaatgtaacattacgttttttgatgtccatgctatgattttctttaatttcattctctagtcaagtatcaaagactatactttggctctgccatttataaaatgttttatctgcaatttcttttttttatttgagacagggtcttgctctgtcacccaggctggagtgcagtgggatgagcatagctcattgtaaccttgaacttatgggctcaagcaatcctcctgccttagtctccatcccgagtagctgggattacaggcatgagccactgcacctggcctacaatttcataaaatttttttttttcttgcttcagtttcatcatcttttatatggagaaaataatatgtaccttggaagttgtgagaattaaataataaacatgttaggtgcccgcacaaaacaggtactagaattatatctgtcattgacctaaaaaggataaagagagttggcagaagatacaactgcatgtaggggaatatgcttttcattaactctgtaaagtcgggttttatctgtttgaaggcttatataagtttctgttctaaatcccagttattcttcctttttctctgcctacctcccccttctctacgtaggtttattaattggttttctcatcatctaagtaacttccagttccgttggagctgggaagattggtaagtgatggtttgttttatctttttctgtagtcaaaaaactactaatgtttaaaactgtaacataaaagtgtctgaaatatttaatttcttggaaactatttgtagttaagtacaaatagttacaagtgcaattataacttaacaaaacttgtaagttgttataagttaacagataattatagtacaaatgggtgtaagtgcagattatatgtaagcattgataaaactacatttcctccttaggtcagattgtcttagtcaagatcctgaaagtcccaaaccgaagtttgtaagagaagttctagaaaaatgtatgaggtaagttttttgtgttttctccttttaacttctttgggaggatttctttctcttctctgcacttgtgatgtgtgttcagaatattggattcaaaatccacttactcatcttccatcccatttttaatcaagacttaggctaagaaaaattaggcaaccatgccatatagattccatgtgaatttaagccaataagttcttttaaagatgtcacaggccgggcgcagtggctcacgcctgtaatcccagcactttgggaggccaaagcgggtggatcacatgatgtgaggagttcaggctagcatggccaacatggggaaaccccctctctactaaaaataaaaatttgcgaggcgtgttggcgaacgtctataatcccagctacttgggaggttgagggagagtcctttgagccaagatggcgccactgcactccaatctggccgacagagcgacactcttatctcaaaaaaataaaataaaaaaggtgttatatatgaaatgaattcagatttatagaaaagttggcacaacattacaaagaattctgtatcctcttcacctagattccatagctattaacattttatcatgtttgctctcatgctcactcccttttcgtctctccctagagacccattacgttggttttcctttgagaataagctgcatacccagctgatgtaatggcccattatcctttaatgttccattacatatcttcccaaaacaaaaccactctcctacctagccagcatacaaccttttagatcagaaaattagctgtggtacaatcctaccacataattcacaggtgctgctgaaattttgccagccgtcccaacacctgtatttcctgtctggtctggagtgttttttttgttttgttttgttttgtttttgagttggagtctcgctctgtcacccaggctggagtgcagtggcacgatctcggctcactgcaagcgccacctccgggttcacgccattctcctgcctcagcctcctggtagctgggactacaggcgcccgccaccacgcctggctmattttttgtagttttagtagagacggggtttcactgtgttagctgggatgatctcgatctcctgacctcgtgatccgcccgcctcggcctcccaaagtgctgagattacaggcatgagccaccgtgcccagcctggtctgaaatcttatccaggtacatatatagtgttgagttgtcattctcttcagattccttcagtcttgaacacttaactcttttttctatctttgtgtttttaccagtttgaaagagtctagaccttacttggattgctctgatatttctcatgagcagactgaggtcttaaattgttaatgctcttggtgtgtcacttctagaggcacatgattcccaccactggtgatgttaatcctgatccacctggtcatgtcaatatctgccagctttctctaccttaacctcaccatttttccctttagtagaattgataagtattttagatattctgaagttttactcttactctgttcttcatcagatctccatcctgcttttagcagctaccactaagatggttgccaagtgatgattttctcattccattattttttctacatttattagtgggccttctgtaagagctgtcctttctcccccatttatttattcctttatttatatatcagtagggactaattaatttatatttcattcgatgggttataaactatgaggattatttattttgatgcccaaattgtccctgrtatgtacatgaggagccccggtaagctctctctctctctctctctctmtatatatatatatatatattttttttttttttttaacgtccccagccattcattgagcattcccttattttctagaacaacatatttaggatcatcttgcgttttcttgccctatcactggaatcatctatttattcatggagccctagtttctagtaaagtagtaatggaatatggtatttaggagccaagatctgggcacttgatatgctcattgccattggggtgtcattggttctaagcctcttggtggacacacatccatccatccataactgtttttatgtccacctgtgtgtatatatgcctccaattccaactcaataccttatttctacacttcttctctaccatgatttgtaaacaccttctcaggcagtaacaaacttggcttccattatcctcaatatttatttatttgatagaatatagccagtttccaaagcgtgcagtcatctccaccatgccccatcatcaccccacatacttggccaccaggctcatgagctcactcacccgcacctcagtgcaagccagtgagttttgcagtatgcctgagatttggtgtgctggcttagacaaaaactcaaaggatttttttttccctttcacttcttggttgtcagctgagttcaagttgttggagatcatgactttccaggtaagtygggtgttaccgaagaatgggactgataaaagatattttctgaggctgttatttgtattgtaggttgtcttaccatcagcgtatattagatattgttcctcctaccttctcagctctrtgtcctgcaaacccaacctgcatttacaagtatggagatgaaagtagcagtaagtaatgaaactaatccctctgtctttaaaaggtaccagttcaagtatatctgaagttagttgtttaaagtggagaaattgaactttttcttttcttggggtttatatttcctgtatttgaaaggtggtctatcattagccactgttttatttgccctgtcatcattttgaggatttggttgtgataaaattaattactactggcttatcattttttctcttttgaatgtgttaagtatagcaagatgaatttatagttagaacttactaaactgaaaacgtgtatttgtcatggtgatggaggttacttgaattcattatcttgttcaggtgtggtattgagaacatagatgcacatatttgtggcagtatgcctttaaaagtaaattcttaattatgattttcttaccttttggtcacataatctctgaaattgcaccataaatcagggagtgtaatttgatgtgccattttgccctttgcatagtatttacacttaatgaaggtaaagtattatacattgttgatcactggtagagttaggtgtggagtttttccaacttgttctttgcagattacacttaacacagcccctccatgatccttccattttgtgttgtgtagaggttctttgtatctcacaactttctgctgttctttgcttttcatactgtgtgcctgtttctccacctctgtctctgactgtacctgttttccttgaaatgaactgtgtcggtcctggtacatttcctatttcattatgtcaactctgaagaatagatatgattatcaaaactacaatgaggaaatgacttccaagaggtcaagctagaatgagattgcttttgagtggtggagcccaaattcaggcgtaggtgcactaactgagtggccatgctgttagccactgtgctttttggcagatcaaaggtttatgcagtacttagaagtgctgggttttgagttttgtcctgtactggttccgagaatgataaggtrtagtctttgctatcagaaagctcaggcttttgttgaagattaagctttctttttgccccataggaataactccgcctaacattcaaggccttcataaccattgttcctactttgttatttttcacttctccccacatggacctctatttctgccaggtccatgtacttttttattttttccatactccctgttcttgactttgccattaccccagtctggaaagccctttctagctccacttccttttctccttctagattctagcccaagctcaatagctgtaaatattttttaaccgttagcaagccagttttgtattgcttcctggctgtgtctaatgtgaatatcttggttccccagctagaatgtagactggtgacaggggattctgtttttcttcgccttcttttttttagagaaaaagctcacagcaggtgtaatatgactgtcctcacatgactgttgtaatttactttattcattccagtaactcatactctataacaggattgccttttttgttacctctttgtctaccttacattaaaagcagatttcttgttgctctggtgatgccttacggtgtatattagcacaaatttttataataaggactcaactgataccaaccaatagtaaatacaaggagtcccatcacgtgagcatctgacttacgtagattcaagcttgtggactcagcaaaaaagaaaagtacaaaaacaaaacctytctgaagttggcagccattaccttgttgagactcagacttcatttccacggtcccgaggaaagaaagaggaagtgggtgttggcaaaatgaaagagaagtacgttggttctgggattttgagcccaggagagttgagggcattaaaagacagtttaactgtgtccacttttctccttaccattcatcttgaggatgatcagcaccttgtgctctaaattttacttagctaagtgtccttaatgaattgttgaaatgagaattgtccctttttaggtgaaaaaccattaacctattagaaaaagctttcacatacggtatttatatgtgattaaatattgaccttgggataaagagcatcctattttgaaaggaagaatttaaaaaaaatttttctcagttatttaactgttcattagaatagtcttgaaacckgatctgtcattccccttacccccaattctgtgtttagattctcttcctggacattcygttgccctctgtttagctgttgcctttaaaagtaaggcaaccaatgatgaaatcttcagcattctgaaagatgtaccaaatcctaaccaggatgatgacgacggtaagtggaattcagtatttcttaagtggaactatgtataggccaacttaaagcataaacataactctggcaacatgatgctcttaaagcaatatatctatatctgtttgacctgttcagactgttgttcttagcaccccaggtattttccccttatataaaaagagatcctaacatttctgtgatatagcttacttaagaatataaacttcatcgtaaatacaaagtgaaatatgttaccattcaaggatttttaacccctgctttcaccatagagaagttcctgaatagaaagacttggtgtgttataaagttggatgttttctccaagttaagctattagaataataatgtttaacatttactcagttatataccatgtaattccaaccagaatcctaggagtttttctgggcaagagtgggaaaattgacaaaataatttatacagttgcctgaatcaataaatggatatgcacatagaaaaactactgaatcaaaataagatattagtggcctttgggtatttattactgggattttgtttggatatctctaagaaatttgtattatgatattagagaaaatgagtttagaaagaataagccaaaatgatggcattaaattcagatgttgtcagacatcttaagacataagcttaagtgttttttttttttttttttggtattaatataatagaggctatgaataaggaaacctgtgtgatttttttttttcaaggaatggatgatagaattaagacagtcacataaaactaagacttaaaattacaagtggtttcatattttcagtgtttgaaatcagtgacggtcttttattgtttattagaaccaaaaaacattacacaaatatytgtgtatagatgtgagcaaccatctatttagcatttgaggtaaggcaccaaggaattgctgtgcttacatttttctgttttactataaaatatttttcagatgaaggattcagttttaacccattgaaaatagaagtctttgtacagactctgctacacttggcagccaaatcattcagccactccttcagtgctcttgcaaagtatgtatgagtacagagccttgcttgagagtttggaattttgcttggtgaacaccagtggtayggtaatttttacctaagattgttgaatatgaagatcttaatagtgtataattggacacagtgggtttgggtttgtggtagctgaaatccatatcctaaggcttccgtcagtctgtttgtacagttggcatatgtacatggtaagtgctttttttcatatagacatttaaagaaactagtgaaaaacctaggtttttgggacagtcatatgcagttggaagttcccacgctaaatatctttccaaagcaatgtaagaagaaattagaatcagctacactgttgggagtcacgcaaaggttggcatctgaagacaggtatttttaacttgtcagacagggtccaaaggaagaaagagcacatagattttccttctgccaagcagagaaactggacatctcaccccatctctgtctccaaggctttatattacttgcagggttcccacagaagatgcagtttgaatatttcaccatgtttgaagacagttccttagtccttacctattcttttaaactgtagccctgggctaacggtagtatattgtaaatgtcttgagattttgtgacagcttccttaaaaactatcaatctgtgatcacactttttgcatccttaatggttaatacttagttattttgcatttatatattgcattataaattgagtaacattgaaaaggctttgaaaacactaaaatgtttaatgaataagtatatatggtatttttttcccatcattatcaaaaggtttcatgaagtcttcaaaaccctagctgaaagtgatgaaggaaagttacatgtgctaagagttatgtttgaggtctggaggaaccatccacaggtaaaaattatttaattagacatgttgaagctctgattgtatgggtataaaaataaggccgttaattgccattgttttgtttgtaaaacatgaaatttgactctgcctagataatggtttttagatctaattctttcagtgctatgggagtaatgatgtttcattcattcttgaaagagtaagcattattatgatttggttttgaactataatatctcaatatgttttaaatgttcaggaaaaggtttatctagtctatccagtttctaaatgcaagctccagatttctcaaaccttgatatatattgtgtatgacaaagaaacatttaaataaatttcataaaacagtgagtgtgtaatgataaaacattgttttacatttaacttctggggttcattgaaattatgtatttttttgaatacgtattagtacctgaaatttaaatttttttttggagacagagtctcactctgtcacccaggctggagtgcagtggcgcaatcttggctcactgcaacctccgcctcccgggttcaagtgattcccctgcctcagcctcccgagtagctgggattacaggcgtccaccaccacacctggctgatttttgtatttttagtagagatggggtttcaccatgttggccaggctggtctggaactcctgacctcaggtgatctgcccacctcggcctcccaaagtgtgctagattacaggtgtgagccaccgcgcctggccagttttttcaaattttaactgttaccattcagagtttttgtttagtcaacctgtttcttgtagtgctagagcaaagcaaaggggagaataaatcttaagacctaatgatcaggccaggcgtggtggctcttacctgtaatcctagcactttgggaggccgagatggatggatcacttgaagccaggagttcgagaccagcctaggcaatacagtgaaaccccgtctatactaaaattacaaaaattagccaggcatggtggtgcacacctgtaatctgagctgctcaggaggttgaggcaggagaattgcttgaacctaggaggtggaggttgcagtgagctgagatcgtgccactccactcccgcctaggtgacagagcaactctgtctcccaaaaaaaagacctaatggtcagattgatcaatcaattccatagccaccaaaactaaattttatagccctcctattttacttttatagcagcagtgtggtggcacatatatatgtgtgtgtatgtgtgtgtgtgatttacttgaataattctctcattgtagatgattgctgtactagtggataagatgattcgtacacaaatagttgattgtgctgccgtagcaaattggatcttctcttcagaactatctcgtgactttaccaggtaatataaattattttatgaaacttgtgttccctaagaattgatatatgtgtggtctcttatacataagcttcaaattctggtccaaaccaggttgatattaatatactaatggtccaatctggtaggattggacrtggcaaaaattcctagacagtggaaacatacacagcctatcaggttgcagcgtctcttagcagggacactcttaagttgaatcaagrctaagccagtgaagtagaaatcctgttgaaggatccagactgttgggagagaaaactagcaagagccagctatgtgcagagtctcagctagtccagatggaactcgggaagggttccagcttcagtggggatggcacctagaatgcacaccaggaagtaggagaaatcaaagtcaaagtagagtaaatcatggagggatccaggaaagcttggtgattaacaagacacctgagggatgggggaaaggggttctcaccacagtcataatcttaggtttaatgcagaagattcattctgccctcattccccctaacggaaagaaagtttttgctgtttggttcttatttatgaagttcacggactttacagctgataggaccagggcagcaggagttgacacaaagcaggaaactaaagcaaattacttgtaaaaacataaaagtccatcacaacctttaacttttccactgtatctgttactgccagaggacactgatcagaaatatactgaattgttagggtgatagggtgtgatctaaggttgtcataccggccaggttggccttcataaacaaagacaacagaagaaccttttcagatttgtaaactctcagaaaactaaccacccgagtatgttttaaccattgtcctgagtgatttacgttttcaattcattttatccttaccgcatcaccgtagagaaggttccattattgtccacattttacagaatagggaagtgtcacagagtgctttatcctgcccaaagtcacacaactaagtgcagagccagcattcaaacccaggcattctggaatctgtatagtgctcaacagctccatctgttctttaacacctagctcaaatatttgtaactctgcaaacctttccctgactatagtccaccccctccagagttaaagtgctctgctcttttgtcctgtttcctaacattctagacttggagttttatgaacagattgttttattatcttccacttaaactattatttgggtcaaaatttgtagaaggaagtacagttcacccttgaacaacaacaggggttagagacaccgacttcgccccacccaccccaccccacacagtcaaaaatctgcatagaacttttaactgcatggaaaatttaactagtagcctactgttgaccagaagccttagtgataacgtagtcaattaacacatatttgtgttgtatgtgttatatcctgtattcttacaataaatcataagagaggaaacattcatgaagtgagagtggatcatcataaaggtcatcttcattatcttcacattgagtaggctgaggaagaggaggggttggtcttattgactcaggtggaagaaaacccatgtgtaaatggacctgcacagttcaaacctgtattgttcaagggccaactgtactattctgtgctgggttaggagacctagtttatagacacaaaagtagctgagaagttactttttaaaagaaaaacacttatgcaacaaacatttcaaagcacctacaaagtgatcttagtatgtatttgctagtaagaaagctgacatataattatctcattcttagagcccatcagttgatacctattatcaactaatgagtttcttaaacattccaagagaataattggctgagtgtgtgctagttaaatartataaagcatgggaaataagtctcaggttaggtcaccattttgagaaaatttctacacataaygtttacatttaggagaggaaaaatgtatttccatttttaatgttaatgtccatcatagtttgccatttcaattcagtaagtatgtacctctggtaagggatggaaataagaaaaatgactacacagtrctgccctcaggggrctcgcctgaatctaatgggtgtgaagatagatacttgcacaatttacaataaaagaccaatttgtaagtattgctggagaaagatgactaattcagccccaaggacagaaggctgtatcagctgttaagaatgaaattacaaargttgaaagattttattttctgtaaccatagcttgacatacagtaaccaaatgccatatttctttaagattgtttgtttgggaaattttgcactctacaattcgtaagatgaacaaacatgtcctgaagatccagmaagagctggaagaagctaaagagaaacttgctaggcaacacaaacgggtaagttttgtgtaaacttgtaagtagttaaagaaaatataccagaaactctggagaggattcagagttcattatcttgatgatatttcattttttctgagcccaaattaatgcagagcagaaatttttctgagcccaatttaatgcagaagcagaagaggaggaaggagcaggtagtgtgttgtgtgctgttacactgcatgatgaaccagttcaggaagccacaaacttcacttcccatagttcactatctctgggtcggcctcacgtttgcacaagggaagtagcagaagggaagaggacacttgtatttctrtaggagtctctgggggaagagggagaggactatagatacttaacactttccccgtactgtgaggaggaatggggcagtcattcccaagttaacggaatacttctcatagtattaatttagtattttagccattttggagggaagcagtgagtgacttaacatgatactactattcattatgaaagtattttccagtgttatgcatatttaccatagtagaaggtgaaaaaaagttgagtttagtgccctataggaacctttcgcaagtttgagtaccagtctccatgtagacatacctgtatacatatatggatataaacactcagacctgaaatactgtaaggtaaatggtgtcatctcattttgtagatgttataaagtgagacatagagaagttaagtaacatagctagtaggttgcatagctggtaaatgaccagagctaggttctgacacaggtctgtcagactccagagacttttctctcatgccacactgtttctagaagtgtgctgtccaacacagtagccactagctgcacgtgactattttagttaaatacaatttaacattcagttctttggtcacacaaccatatttcaggtgctcagtagtaacgtgtggttgcggtcgtaacaggctgcacatatttatataacattggccccattgaagaaaggtctatctattaggtagtagtgctctagaaccttacctttgagtggtgttaggaaaggacagtcgtgtacccacgtgtctagaacatagagcagacctcataaatgggctgtgtttatagagagaaaagcaagattctgtgatatccgagagcagggttctgataattttgcttaaagtggagagatcagtagatggggccttagcagttaagtattaacctcgaagaattaccaggctttctagattcagtgatgccaccttcttgctgaaagtaccttggtatgtaacaccttagagccacgttctggctctgccactttctgactgggtgatgctgggaaagtcatctaacctctcagccttttttctctgtaaaatggaaataaaccatgccttgtttttcttttcctttaaaaagaaaaaattaaattctataaactcttcagagtgagctgggggcagggattattaaagctttacaggagtatattgagcccatcattgccagcagaaagtcttaaacagcccactttgaattattatatgtcggctggagccatttctaaattataacaagaatgagcagccttggcccataggacttgcccagtttttctgtatggcccattagcagatgaatgattagcaagctgtctccctgttgttamtgctcaaatggtcaaatagtgataaattgtagccaagtccccccatgttgttaccaagacaagtgccactaaatttccctggcctagataagaacccayggaatttctgaatgagaagacagtgtctctgaaccacaacaggactttgaggtatatatgtgtgggtggcrgggtgggggggtactttcactatagaatataagtcttaacatttggccagacacagtaaaatgcttcccctggaggagatttaacacactggaatctaaatggtattttccttttgttcatttgccttctatagcgaagtgatgatgacgacagaagcagtgacaggaaagacggggttcttgaggaacaaatagaacgacttcaggaaaaagtggaatctgctcagagtgaacaaaagaatcttttcctcgttatatttcaggtatcttggcttgggacatttatacataaaaggaaacaatacatttctttagttttagtttttaaaaatgttatttttcattgtaaaaggaatacacattcatttatagaagagattaaaaatacaaaaatttaggaaggaaataaaagttcactactcagaggcaaccatgtatgtctgagtttctctgctgtttacttagtattctcgcatgagcatttctccatgcttgaaaaaaaattgtgggttgctttttttatatatgtctcgtttaattattcctcattgctgatcattttccttccatgaacattttaatgcatagattcctgttaaaatttctgattacttcgttagaatagattccaggaagtaatattactaggataagtaatttaagacattaaaggtctttatgtattgccaggaagaatgtaccaactcatgttattaccagtctgcccttctaggttgacttcatgaataatggaagctaggcacacacaccacaaagacagggtggaacaggcaatactttggggtttctttgtcatgaatttttttccaaagtataagattctgtctgtagtactaccttaacttcttctccctttccagcggtttatcatgatcttgaccgagcacctagtacgatgcgaaactgatgggaccagtgtattaacaccatggtataagaactgtatagagaggctgcagcagatcttcctacaggtatgtggggaacttcgattaggtaataacactattctcagccacaaagatttttcattaaaaaaaatccttgtcaaatttgttaggaggttatatagtacctgttagaccctttagttcatgtccatttgctgctaccattgstcatcagaatatttaggcttaaactgattctgtaccacttagattcctaattgccacccccccaacaaccccccgccccaccttttttttgagatggcatctcactctgttgcccaggctggagttcagtgacacgatctcagctcactgcaacctccacctcctaggtttaagcaattcttctgcctcagcctcccatattgctgggattacaggcacccgtcactactcctgcctgatttttgtatttttagtagggacagagtttcaccatgttggccaggctagtctcaaactcctgacctcaggaggcctccgcctcccaaagtgctgctgggattataggcgtgagccacggtgcccagtctcctaattrtcattttctatgctggggatcctagctgtaatataaaatgtagaggacaaaaatatcaagaggacagtaattggatttataagtccctaaaaagccagtgttatccaatgtgcaggtggtaaactgtccacagaatcaaggtaagctccctggggtctctctgcaaaagcaaaatgccggcacctattctcacctagatttaagttaaaggtatataggagagtggagctaattcattgtatcttcggacactactcccctaaatcttcatttgttcattctagaagaatgattaatgtagaagtcactctaagttcaattctttgagcctccaaataggaattccctctgattttatagttactgccagttttaaaagctttaacagtctctagtcctataagaatctctgagagtattcatggcttatagaggaacacatagacaagagtatttcgttttctgactgtttatcttcctgtcagtccgtctggctgctttttaaaaagttacaatgtattatgccctgactggggagagagctagctgagcctagtccgtaatagtactaggagcaagcaggcactgctgccactgccttgaatcatgaattctgtttacatagaagttggtaagaactggattttttaaaaagctattgagcatccatttttttcatttccctttttatttttttaatgttggggattttcaggggtccattrttcctatcagcacttttttttccccttcctcttttcatcattctgcagcatgggtgggctgctgaaggaaatgttccacaagattgcttatatgctttttcctgacctaactacccccttttgtgtgtccacagcatcaccaaataatccagcagtacatggtgaccctggagaaccttctcttcactgctgaattagaccctcatatcttggccgtgttccagcagttctgtgccctgcaggcctaagggtcattttttcctcatgtcaaggttttttttgatatcttaaaataatttgtcttattttttgatggtttgaatgcttgctttcttgtagtatcctttcacttcttaaaggaaacaaaggggaagaggacagtgaatgaacatggcattacttttaattgccctgaaaagcaaatacttcctaacggcagtaatgtgactatgaccatgatatattatatatgtgacagatacaaattctctgtgatcagtttgttattttttttctccttaaggcacaaaataattggtttgaggtatgtgaaacactagaggtcaaccttacatagtatatagaactgatgggtttacccagctacccagtagcataacttttcacagctcggggatgaattaacatggctgaaataaaactaaaagtatggtttttaaactttggcatttcatgatttatcatctcactctactctaaaactggtggtttcttactgaaggtgttctccatttgaaattttatcttcaaagtatttttaagtagtatctttaagacatgacttgttagtaataaaagtgttactagttggaagagtagctctcaaatttgtcttaatgtaaatcacctgggaatctttcaagttattttgaaatttaaaccaccgtctgggggtggaacgcagacatcctcagtaatccttaaagtttccccaggtgattccaggtttggtcaccattatcttagagcatctactcacttcctctagccttggggttatttgtccaaggtcttgtagtgagttacagaatactaaagtggatgtagaagtggtcagattgactgaaactataccctgaattagatgtgagtttagattttgtttatatggaacctgatccaaaaaactacgaagtcctgagcttgtttcctgtatagtactgatgctgaaataagatgacagcagtttgtaaaataatacacaaatatgaggaattgtctgacattccaaatttcgaggatttttagacttttttcattaaaccttagaaaaaaattaccagtaatcctacaactactggtagtgttgttgtgcatttgcacaaaataggtataattttttcttattacatcccaagtttatgatgcattaagcgttttgcatattttgatatatttttgctttggtttaccatacattttagtggctacagaatgtagtctgcttaataaatgggaattcctagaatgtttaaataccatactatttaagacaaaatacaaaatatccagaaaaatccaggttgcgtggctggttagtaaaggactaaaacccaggttcttggctaaatgttttcgtttatactgtttatctttcccattgcttaagcacagcacaaactatgtaattatatataattacagttgacccttgaacaacatgggtttgaactgtgtgagtctccttacacacaggttttcttccacccctgagatggcaagaccagccccttgtcttcctcagcctgctcaacgtgaagatgatgaggatgaagacctttatgatgatccacttctacttattaaatagtaaatatatttttttcttatgattttattttcttttctctagcttcataagaatatagcatatgggctgggcgcagtggctcacgcctgtaatcccagcactttgggaggctgaggcgggcggatcacaaggtcaggagattgagaccatcctggctaacacagtgaaaccctgtctctactaaaaacacaaaaacttagccaggcgtggtggtacatggctgtagtcccagctacttgggaggctgagacaggagaatcgcttgaacctgggaggtggaggtttcagtgagccaagattgtgccactgcactccagcctgggtgatggagcgaggctctgtctcaaaaaagaaaaaaaatatatagcatataacatacaaaatgagtttatcaactgtttgttattggtaagtcagcagtgggctattggtggttaagttttgggggagtcaaaagttacatgcaaattttttactgtgcggggtgtcagcatccctaaccccatgttgttcaagggtcaactgtagtttaaaatgactcctgtctcaaaaaaccaaaggataacctttaagggattggtaactttgactcaaaactgctttgtaatcttttcacaatgtactgaaaagtgtggctagttatgtttgatccacattctagagaaatttgtaggttttaatttcttttctcttggtcctctcttcatgtataatggttgcttttaacagctgttcgctgatgtggtcctgctctgtcccagtctagcagctttagtgtatggaaaaattgaactaggaattgagttttgaagaaataaaggtgtaagagcaaacattcaacagttgctgtccccagtaatgaagttcatacagacaaaagatgkcatgtcactgtacatcataccttgcaataaatattctgttaaattgtgctggtgcaatttaacatgcttttgtcaaagtaaacatactgttttcctaatttataactgtacttgaaaatgaaagatgaggaagggaccttgccaacctatgtagagcaggtttagctgttagtgatttctggataccaggattgtcttaaactggtaagggtgtagagggtgaatagaagcatcccttaactagacaaatctattttctgtaacatagtggccttggtaatacatgctcattaactagtggttattatgtgccaggtgctataggttcaccctattaactacttcaaacagtcctttgagatawawbtttacaataaaaacaggttttggagtaatttacccacggtccacagctagtaagtggaatttgaacctagatccagttggcccaagagctccttccccgcccccataatgctcttacaacaacctgaacccctagttattctgttgtcatcatctgttgtcatcaagctgaaagcttttttccccagagacatcttgctgcccattcagaatcaatttttactaagctgtaatatttagcatagcacgtattagtcattgagtgtgaaggtgtttaaaaaaaaatcaaacttgaaaaatacacaaacatttctgtgtagtctgaattatttggacatgacttgttttgacttagcctttctccaagcataatctccattaaagaaaaaaaaatggaaatgtttaaacttcctattctatttgtacagtaggataaaatgtcatgtcaaacaatttgaaaatatcaggttattttaactaactggaatttgtttttgtcaaaaaataatgcatagacccaataattcttttgacaagctacaggaaaatttcactaaagttgatgcagatgcctgcggtgatgtgagacttcaccttcctttccttagaagtctgaaagcagcatggaagcaagcctgggactaaatgaacatactcctaaggcacttaggtgcatgcctggcacctggttggtaaatgctcagtaaatgttagcactacttaaaataaacatcagtgccttctttgatcaacaatcagatagtcaaccatgaaaacagctcttttccattttaatccagcatttaaaaagctatctagactaatgttaagtcccacaatagaggccccaagagtacagaaaacatgatcagactcgtacaactcaatgtttatttctgctattagggctttttccagcagtagttccccactgtttccaccatcgtggagacagaaatcgtcctaaaaaacacatgactagaacctggggtacagtggtgcaccaccattgctattatttgtttcttggttaagaatccagttcagcctttgttgaacccttttccctctaccccaatctagggtttgccttggtatcttgtcctcaaatttgtagctgacctaccacttctgcacctactctagcactcagctcccatctctgttgtaagaaggcaatcacagacatgacattgtgcacacaaccaggccaggtgaccttcactgaaacttgcttttaagccataacatacataattattactgaagtattacttatacaagggtttcattcatctatgaagatgttgcttttttttttgaattttgaaaaggaccaatctaaatttcctttatttaaatataaaattctataaaacaggtcactgaactaaaaaatcacattttttcatatgtcagttcatggccacacatagtacaagtcttacggtacatgtcatcttctaggttttcttctggtccatactcaygttgatgaacaatcgtctcccttttccacacgctgcttcttactgctcgccgcaattctgaaaaaaaaattttaaagtcatcttttcagtggtgctattcaggtgaatccaaaaatccaactccatcaagctttcagccatgtacatgtgtgtgtgtctatgtgtatttaaaccatatatagtttaccttaattttataacaaagttgattatacaaacttggcaaacttactttcttacctcactagttcggcctgtgaatcaagttgtcactggagcagtgtgaaacaagagattcagaaatggttatgtgggttggtggtatgcaaaacagaaccatattcagaagtgagttgagtaacacaataggacacattcaggtacgtttgacttcagataacagaatgccacagtaggaaaaggagtcagctgaaataattaagaaaaaggagtgtttttaagttcctgttaggagctacgtcaataagcatcaagtcaagctttgcaagaaaactagaaagtagagaactctaccactatgctggtatgttttcatcttagaaaaagtgcttgtgcaataagacctcaagtctgttgaagttcttataagatgacagcattattttaggagagggctaaaaataagaatcacagaatgttaagagctggaaagaaccacagagttttgattttacttcactttattttgcaagtagggaaactgagcaaagatagtttaactgtgaagccaggacactggtcatattctaatgtttggagctttttctgctacttcgtgtcaaaatcattttacaaagaaaattatattgggttctttgaaagcaaccaagtaaatcatattttaataaaaagcaacactttacacttctattctcaccagtgatccacccagttcttcattatctttgacagtggcattacctaagggagattatgatagctgtcttgtataatctcagctataaaaataacatacatcaagtaatcacatattttccctgatccattttagatctataagtagtatcaaaatactacttgaaccttattttcagcttttatgaggatgaaaacacagggctatgtataaggcagtgttcttaccactttaaatgcatttaatcctcacaaccctttaagataagtagaattactccaattttacagatgagaaaaccaaggcacagagaagttataagttgctcaaggttatatagttgatggatacctctagcatgaaaagtactttgacattattttagtgcatatacctctagatagtttttggtctggaagaaaaaaatgttcatccaaactcttcatttctttcagcatcctctcatattctgaagaccttggtttttctagatatagatctggaatgccctccttcctttaaattttacttaggatattttctaaataaaaaatgatatgctaaccagaactccacagatgccctctggtttcagataatgtaaggaagatgttgcctacttgaattctaatacctgcttttcaacttggttctcacgtaagacatctggccaccttatcccactgaaaatcctacaaaattttactgcagcgcaatcatgctaaactaacttctctgcctaatttgaatattatgtgtacttaaaaagaggtaccaaagaaaaattttctgaatactaaaaaaaaatacttgtagtaaaagtctgtctgtctagccataattgaacctaaggttttacattgactttgactttttctccccactcttcagccagtatgtcaggctatataatggtgagaataaagccatatctttaatacttactagacattcctagaaaaacttgtgccagaaagtaagaaagtattcggggccaggtgcaatggctcatgcctgtaatcccagcactttgggaggattacctgagcctgggagttcaagaccagcctgggcaacacagtgaaaccccaatctcttaaaataaataaataaaaaattaaaaaaatttttttaattagctagccacggtgacatgagcctgtagtcccagctacttgggaggctgaagtgggaggattgcttaagccgaggagtttgagcctgcagtgagccatgattgcaccactgcactccagcctaggtgacagagcaagactgtctcaaagaaaaaaacaacagaacataagaaagtatttaaaaatggataggtttgggtttttcttttttttttacccttctttccctttctgaacaatccagtcctatggagcaagcaagcatccataggagggtgagagagcccaagaaaaagggctccctccagaagaggaggcagcaacagtaatgggaattagtcacacatagggctttgatcaagtcactatattaaggatcatgggagccaccaggtttctcatcatccaaaaagccagtataagtaaaactaaaatgaaccatgaaattttaaaactggatgtatcagtgtaaactcaaggtttacatatatttatagacagagacatagaaatacagatacatgtgttgtgctagaaagcagaaaggagtgctcaagaaatgatgacataaggctgggcacggtggctcacgcctataattctagcactttgggaggccgaggcaggtggatcacctgaggtcaggagttcgagaccagcttggccaatatggtgaaaccccatctctactgaaaacacaaaaattagctggacatggtggcatatgcctgtaatctcagctacttgggaggctgagacaggagaatcgcatgaacccgggaggtgaaggttgcagtgagctgaggttgcgccactgcactccaacctgggtgacagagcaatactaggtctcaaaagtaaataagtaaataaaaaaagtaaggaaatgacatgtcaaaagatacaaaagctagtcactaggccaaatcagaccatttgagcaacaaagtaaggacagaaatgaaccaaagccactggagaaaaacagaaattaatgaattcataccaatgataagtaaatggggcaaaggatgctgcagaatgctgactgccaattgcttaaatgcagaaggaatgctggaattagaagacagttcttataaccatcatactaaagactggttctagcaagcaccatcaatggatggacactaaatctagggggatacaatttctttttgcttatcaaatcaaaatcagaattaccactgagggctgatagacatcagtgcctccagatatgaggcccggagaaaagcacatcacttactgtccctagcctgaaatgcataccctgcatccaaccagcaggacacaccagaaactgccccaagtgagaagcatgttttgaagggcagggcaggggaagcagacttttcttcaaaaatgtcaatgtcataaaaaatacgagctgtgtaaatatcccagaaaagtttagaaagacttggtacctaaagccaatacccaatcctagactggattctgttctagaaaggaattactaaaaagaacattagatcaactaacaaaactagaatatggagggcagattagacataaatactaaatcaatgttaaatttactcaagttaacaatatactttggttatgtaacaaaatatatccctattaggaaatatacactgtaatacttaagggtaaagggtggtgatgtatacaacttagtcttaaatggttcggaaaaaaataaatactgtgtatgtatagaaagagcatgcaaatgatgatgcaaatagcataaagtgttaacagtaggtaatctggaaaaaggatatatgagtggccctttgtattattatccttgcaattttttataagtttgaaatatttccaaacaaaatagtttaaaaagacaggagctaccttgaaggggattctactgggcaaattttggacaatttcaacaccaaaatgaatcatgactggaatggactataatacattgacttcagaataagaaacaatcagtccagctgatgcttaaaaaaaaatcagtttctaagagaagaaaagctcttctttccaaaagccaaataacaattacagaaagtgaaagaaatagaaaatcaccatttatatccaatataataactaaagtaagactcagccctgtgtactaaaaccactgagtgaaaggtaaggaatgagatattcacatagtattagatttctcactaattacaaaggataaagggtacctttacaatggaaaaacctggcagacaccaccttaactaagcagtcaaactaccactcccttaaaagacagagctggtaccatgtgtctactgataaatgctcaaacacatcaccttgaaagtattcctaccaaaaacattcgacctgagtctaactgaggaaacaagcagctaacaaatctgaatggagggacacactgaacagcagctggcctgggcactgcaaaatgtcaatgtcgtgaaagacaaaaaaggctgagggactagtttaaaagcagctatcaatatgcatcatccttgaataacacctggatccgacaaaaagctgtaaaggacaccaaaacaactggagaatattaaattatacacaag

SEQ ID NO: 6858 - DNA, 44554 bp, Homo sapiens
attactgataactgctttatttaaaaaccatatcattcgaataatctctatgttttttaaatctaccattctaaaatcattaccaagcatctgtctttttgattgctcaacaattcaagttgaatgaaggtgtgctaaaaattaacctcaaacacctgtctattaagacccttgctgtttgtatctcttaccactttgtttaaagccttaacacactcacctaagtccttttgtggtataacataaagcttaaaaaattaaaataatagtgttaagtatggaacctgatgctgctgctaaacactttggctagtctaatacaatccaattttcgacttccattgattcaattatttggtcggcatatggacaagaaagcaagagcctgtaactgtgcagggaatcggtattaataatgaaaatctgcagttggatatatggttacacagtagcaagttacatataacttcaatcttcagatctgaacagccaaaggaattattgttacaaagttcataatcacttacttgcctatggaacacttggcttgaaaatgatgtatggtgattctcataaaacacagcacctggctattctaagcttggaatgttaaatctattgaatgactgaaatgatcttcagataccacatgaactgaagctgaataaaacgaatctattactatccacataggatctgagggggggtattataaaggttacagggtaagacactctgtacgtcaacttcccaacccattaattaccatgataacctgactgaatgtccactgactataattttgaaaggataatgccacaaaaagtataatacgcatgcagcatgagagctgagatgtatttattcctggagatatctgcctgtgtaaagttgtagacatgtgtggcacagaggttcagggaccttgattcttaagtatagatcaaacctaagtcacaggacctatcaaggttccaccacccaaagtgccaaatttcacacaaaggtctttcatttccaggattcacttattgaaaaaaagcataattgatgtaatatttacgcaagctgccagctaggacattcaaatagccttcttctacagcagtagttctcaacagggtgtagattttgcccccagtggtcatctggcaaaccttggagacatttttagtagtcaaaactaggggaagcaactggcatctagtgggtaggggccaggcatgctgctaaatatctcacgttgcatagggcatctcccaaaacaaataactggccaagaatgtcaatagtgctgatgttaagaaaccgtattctagaaagcagagctcctcagaaccaaatttcagtgaggttgggagaatgcagatgctgaaaaactagctgaatgagagcagttattttttgttgctgttttttaaaccttaagcacactgttcccttctttctggctcatctattttgccaaccctttattccacctctacagtcttcctaacttaactttccagctggcttgttccagtttggaatcataccacagcctttaaagcaaccctcctaggccctcttataagcttgaaaaggggaaaatagtgctgtgggaagagaaggtatgatttctgagaaacaactagaaaatacatgtacatagtcacatctctgaactgcaaaccctttgttcattttggctatattaaaggacaatatttgtctggagaatgggaggaggcagaaagtattaagaggtaagaaatgttccactttcacctgatagttgagagactataaaggggtgaagactacagacaaaatctgaacttacgaacagaaacatgatattgaactcataagacaacctgggtaagggaacagggaaatgaaataaaacaatacgaatacaatttggggaattcgctcaatgtaccctgaagaaaacgtatctatggtagttcccaaggcaagaacagattttttattaaaatttaactatgtaaaagttttaaaatgtaaattaaagataacattaccacttcactcagacagacttggctagtatagagaagcaggtataaaatccatctgaaaggatcttaataaaccaaataaatttcccctctataagtcaatcctaattttatatgggtacactgtacatcttatagccttacaagaaattttagacccacaaaatggaaaacaaaaaccaaccctgtaaaatagaaaagtaaagtaactaaaaccaacaacttcaacattacgtttttaaaccttaagcacactgttcccttctttttggctcatctattttgatattgaacaacttgaaagataacatgccttgagcccgcagacttaaaacaggcaaccatcacttctgaaataaactatactctctcaaaataacaaatcctttcacttctatttttttctttagttaagtaaaaaaatcagccacagtccaaaagacaaggacctaattctaagaagcttaaatggggctaatacagcaaatctgaaatttttgtaaattgcccaaattcccaaaattgtattcgtattgtttctagctaagattttgaacaatctaaatactttcttaaaagaacaaacaatggactgcatatcccatagtaactaaaaagcttcagagacatttttaaagcaagtctaagcaattagttaagatttagcactggactagtatccatacacattactttccatttagcatttccttttccttgtttataaatggactactacatgaacttcattggtatagcctcctaatcctaccccccttaatctttgatagtcgagtctcaacacagaagtataattttataatctccctataagatgcaaccctctgctatctctctaatcttatctcctacaacttccccctcactcactctgctccagcaccactggcctccttgctcttctgttaacatgacaggaaccctatagtcttcaggcttttgtgcccatggttacctttggatcacagcttttccccatacagctatatggctgctaccttacctccggcaagtctttgttcaaatgccattcacaccgaagccttctctaatcaacttacataaaatagtaacttctccctcacagaaatctctcccctctttacctggtatcactccatagcgcctgtcactatatgatacactatactttacttgactgtcttctctctactctagaggggaggctctatctttatattgtccactgctgtatggcaagtaattaggacagagcttggcactgttaagtatttgttgaataaatgattttatatatatatatatatatatatatatatatatatatgtattactttccatatgcttgcttctatatatacagtatataattatatgtaaaatatatattagagtatatatttatataaaacttataataaacaaacttatataatatataaatataaatttatataatatataaatatatataatacattctattatagtttatatatatacacacactctatatatagagagtcaagcatacggaaagtcagggcagtgactgacagcagctgacaattgtccagaaatgctcagatgcatctatttaattctgactgtaataattcctaccctattttaaaatagccttctataatccttaagcttctaagatttattttttaaaaaatagatttttaactaaaaggaaagcatccaaaataatctgattcagatcactgtgtagggtaaactccagcgatcgttatccaaattgtggcaactgacaaaaatttcagatttgctgtattatcaaacatgaattgtatctgcctctcccacactaaaatatcaaccataaaaacctttgcttaatgaatgctttgttttacttgtcttatttactctgaggttctcgcggcaagacccaaatggacagtgatttggctgccagctggtgttaaaaacaagccaactccaagaaagttatgtaagtctcccaataaccaaagcaaaagttatttttctacatattagcattccaattctctaggatgccctacaatgacatttcctctctctttagggattacctctaagtgagaaaaaggaagcattagaacaacaaagaaaagaacaaaagactcaagttctccagcccccaagtaatgacttgagaagtatattagtttttgactagtcaattacaaagcatatgaaaattgtattatcggcgggcgcagtagctcacatctgtaatcccggcactttggaaggccgaggcgggtggatcacctgagctcaggagttcaagatcagcctgggcaacgtggcgaaaccccgtctctacaaaaaatacaaaaacaaaaaaaaaattagccgggcgtggtggcccgcgcctgtggtcccagttacttaggaggctgaggtgggaggatcacttgagcctgagaggcggaggttgcagtaagccgagatcgcgccactgcactccagcctgacaaagaatgacactccgtctcagaaaaaaaaaaaaaagggagggaattgtattttctgtgccttgtacagaggttacacaagaaacctcgtgttagaaatcaaagcacgcagcatagttatttaatttatacctgtgtagtgaagagagccccggactggattcgctcttgctggtgtttgggaactgacagctgtccctccatcttagttatgctcagtctctagacccttaggtgtcagatagaaagctggactagaatatcctctcaagccattccttcgtagaaatctggtgtttcactattaaaactaaatgcatgcgattctgcctccacctcaactgccacaacactcaaggagagacaaacgttagtagataaaatttactcaatttaaaatgtctgttatgggtttttttcttacattgacagcatctgctaacgtttaccgcctcttaagcgttggcaaatgataaaacatcattgttgctgatgtgtattacctcatttaaccttcacaaaaaccagaagatataaatatcattacttctgtattacagactaaagtttaaggagatttcataacctggacaagatcaccaagtaaatggtagggtctggctttgaacctaaaccctctggttccaaagtctcatctcttaaccactactatacactctcttcaaaaaacaatacactaaaatgttaacaatagaattactctaagttttacttttttggtgtgtggatttgtgtttttgaccgattgtaaggcttatgtgtaatataagcatcttttttttgttgttgttaaaactagaattattccatctttatgaaggcaacactgatctccacgagcacaatcatccaaacggagatgggaacccctgttctaactctctcagaggcctgaagttagttttctagcactctctctcacacaagggaaatgcgcttacggccagttcaaaatctgcagtaacctgtgtctgtttattagggacctcttgggcgcaggtaagacaatattctttccctgcagcttgaaagaagtgaaatcaacggataaccactaccggaacagagttcagactgcaactcatgagatctctcagtcctttccttcagtgaattcttccgagcccttttcaggtgcagctttgaaggttaaaacgagacactaggaccagtgggtccctaagaggcggcagcacagacacaggtgtgcttccctgctccgtggttttacggacgaaattctgaagcatccttagagaccaagggtctacccatggggttcaccaggccttctttcccgaggatcggcccttgactcaaagaactrgggcgggggagaagtcgctttctagaagccgcccgaccacaccgccaccatattctcctctttccctccgcggctccccgcacgttcccggggagaagagcttccagtctcttccgtggacacccaaagacgccgagcctcggctcccaaccgggagcggcctccgtggccgggccgcaggcactcaccgtcgttctcgtcgctgtgccgccgccgcgacatgctgccctccggtgcgccgcggaaccgagaggccaggcggtaagcgctgcaggaactgtctggccgctggccgacgcaaggacagctgcaaggygcgcggatgggccggcasgcaggcgcactagctcgccacggccccggaagcgcaggagaggccgccgggtggggctaggcgctgcgacagccggcgtgaggaagctcagtgggctacgaacgtctggcacacatgcaaccgccycctcgggctgcctccgcctgccggctacttctttctcccgccttccgctctatgtccttccggggccacgcagaaagtgccgccgctttggccactcagagcccccsggccgcggtcgtcgtacgcctgaaggcgggtcgtgccggcggccgctctagtcyccgcctccgctcaggccggtcctccggggcttctcaatggtttcccggtggcctctcaatggttttcccggcggcccttgcgccgacgccaggagacttccggagcttggtgacgtcacgagcgagcttttctacccaaatacgcggcggkggaataggctcgagggcggtgagcagtgacaattgctaggcggagacagtgcagggaagagagaccttagaaaggatcaggactggcgggtatgtgctcatctactcccactttccggcttttgccgccttgggaaaagtgggaggagaggttgggccaagctcggcatgcggggtggggcctgggcgggaggcggtgccgcacgtgccgccccttggtatggaaaggccggccctgacgcgagcgtgcggctccgggcttgccggctggccgtcattttccttaagttgtttgcttaggaaggaacaaatgattgttttagtaatctgttttcaagggttattgggtacctatatgcctgtgtgtgagcgtcccctcccctgatgtctttatgagcaccatactggcttatctgctttgtccatggccatctgaaatttcactctcccggcctaattctccttcggtcttacccatttcagtaaatgacgtcatccgtcggccgcttaatccaaaaatttagagtctttcttagctcttttccctctttttacataacaattatctgtaaaccctgcctgctctgctttcaacacaaatccagaatcagatcgtgttactgctttgtttaaaagtctcctatgacggccgggcggggtagctaacgcttgtaatcctaacacttatgggaggccgacgcgggcggatccgcttgagcctaggagttcaagacccacctgggcaacaaggcgaacaccgtctttacaggaaaaaaaaaaaaaattagctgagcctagtgtttggcgcctgtagtcccagttactcgaggggagggttgggggccgaggtgggaggatcccttgagcccaggaggtcgagaatgcagtgagcggtgatcgcacactgcactccagcctgggcaacaaagtgagaccgtgtcaaaaaaaaaaagtctcctacgactttccattgcacactccatgccatggcctgtggggttctacttctcctcactgtactccaaccactctttctgttcttacaataagtcaagcttgttcttattttaggaacttatactatttcctttacctgaaggtctctggttctaaatctgcgtggctggctcttggtcacttaggtctcagctcaaatgtcaggtccttagtgaggccttctttggttacccaatcactgttttatttcattcaacgaatattatatttattagcatttagcacctcctaggtgccaggcagagttctgaatgctgaggatgtagaggtgaacaaaggaaaacccctgctctcttggcgctgatatattctaacgacccattcaggaatacccacaaatagtgccatcataggtagtgagcaacgggagagtggtagatgagatcagagaggtagggggaaggtgctctgtgaggactttggacattatccaagtgaattgagaagtcattggagtatgattttttttttttgagacagggtctcgctctgttgcccaggctggagtgcagtggcacggtcttggctcgttgtaacctctgccttttaggttcaggcaattcttgtgccttagccacccaagtagcggcaattacagacatgcgccaccacaccaggctaatttgtatatttttagtagagatggggtttcgccatgttggccaggctggtcttgaactcctggcctcccaaagtgctgagattacaggcatgagcctctgtgcagggccagtctgacttatttttttaatagttacttctcatgctcccaaaggaggaagatagttcagcttttgcagtaattctagctgcaaatgatagtagcttgaactagggtggtagtaaagatggtggtgcaaagtgatctgattggattgtacttcaaaagcaaagctggccaggcatggtggctcacccctgtaatcctagcactttgggagtccgaggtgggtggatcacaaggtctggagattgagaccatcctggccaacatggtgaaaccctgtctctactaaaaaaaaaaatacaaaaattagctgcgtgtggtggcgtgcagctgtactcccagctactcgggaggctgaggcaggagaatcgcttgaacctgggaggcggaggttgcagtgagccgagatcaccccactgcactccagcctggtgacagaacgaaaaccgtctcaaaaaaaagtattttctgaacaagtgaatgatagtgtgagaaaataaggagtcaggaatcatcccaaagttttttttgtctgaataacaggaagaataaaattgtcttttactcagataaggaagactggggaagacgaaagtttggttttgaacagttgtatttgaagctgaagctagctggcttcacacacagtgtaaaattcacacacagtggggtatatgaatttgtagtttgggagaaaggcccaggttgaagatataaatatggagtcatttattatatagtattctaaacagaaaatttcctttatgtttcccttttttcttttctcatgtaattttcaaatatttacagaagtagggaaaatttatgatgaaaccccatgtactcatcatcaacttcagtaattcttaattcatgggtaatctggtttcattgatattacctcctctctctcaattattttgaggcaaatatagttttaagtccttggaagtagatgagatcacctgtagggtaagtatagatagagtggttcaacatttagaggttggggtaataaggaagatccagcaaaggaaactgagaagcaggggccgttatccctagctggtattttcatgatttgtttgtttgtttgtttgtttgtttattacttacttaatgtctctccttaccagaatataagctccaagagagcaggtacttcaactgtttcattcatagctgcattcccaggactattccatgggcccggcacatagcagaggtgccacaaataataataattcagagtatgtacataaatcaaaataagctgagactgaaaaaagatgcagagtcggaggagatcattttggggtggtgggaaaggcaccccacactcaggtgcagagaccttgagtcaggaaagaacatggctcatttgtggaactgggcatggtccagtgtggctagagtaggatatctgatggggaatggggagcatagtcagagatgagcctagagtatagggaaactaagtttttcaggccttcaaaggaagcagtgacacagggtagcagacaagacataagtgaaaggtgacacttgagttcagtcttcatatacatagtaagcatatggggagggaaagaagtgaaaaagtaagggaaacaaagcagtggaaagcataaatgctgggacagactacatcaggtcatatagagggagattggaaaagatgctggaggtgggaccggattggatagtaattcctttcgacaatgttacctcccaaatgtactgcccttataggtaaataagttatctgtttctagaacaatgcctggaacctagaagaccctccataaatatttgttgaatgaattttaatttggaaatgatatatgtactttctctacctttacaataaaacagctttgagcatggaggaagtgtgttgaataagattcttctacttattttacttctgcctggaaggcttacaggtttgtgtagagttagggatgtacttttttcagtgggactttatatgaaagacattttcatgagaaaggaaagagaagctaaagaaggtagtatttcttcacccagtctcttccacttatttttcaaatacaagagaatttaggtttaataaatctgtattaccttgccttacccttataacaaagctcattttgagccccatgaaagcaccacttagctgattcaaatgcattttatgtggtgcaagtgacatcttaatttatgaatccaaggaacaaaggtcctttataagaaagttggtattgcctgtgtgtgtctgtgtatgtttagtctccatcagtcctatccagcattgttaacaagcagtgtgtgttcccccacacataaactgctccttgttgccttcacctggttgaggtaccctgtaggcagagttgtgaattggcaaagtttgtcaccagtgtctcccaccttcctttctctcattcttagtggtgctttttctgctccctcttgtggagtttgggactactttgcatgttactattttcagaaccttcagtgtccacctctggctgcctccttcaatattgtcctgaagaaactaactttgccagttcactagtaatatgaaataaccagttgttatgttgtggggcaggaatttggacagggcacaacagggacaccttgtctctgctctcagctcagaggccaatctggaatctgaagggtctagtggttgatgctggctgtcagctggaggcctctgttcctctccacctggttctctgtgtgtggtctctgcatgggttggattggcttactcacaatacagtggtttggtctcctcagcgtgagcatctcagaatgagagcttgcactagcgtatccttttgagaacccaacctcagtcatacagcattgcttccatcacgctttatttttgggagtagttaacaagcctgcctaggcttagggaaatggaccagaaatactgctgcagccatttttggaaaatataatctgtcacagctaatttttaaataaaattttaatgttaaatttaaaatacagcattcaattaaaatattaataatattaccattcattgaaccctagtttgtgccagacactatatattaatatttctttccagtctacagtacagtactgtaatgtagatactacaatgcacaatttccacaagagagatttagaactcagaaaccttaagtagcttgcccatgttcacatgcttggcaaactgctgcagcacaaaccaaagcccatactttttctcagtgtgcctcttagtgcttgtcacctgtcacctttgctttacaaaagaaccaacatggtatgatggttgtagtgtgtccattttgacaagatttggccacagtagcgattttgacatttcttctggcatattacagtggggctgtcttgggaactatttcttctaaggaaggaaattttcatagctctgaaattaaggggcaaaaagaagaaagtgtttataactgaaggtgctggcacacatcttgattgatttgggttgtacctgttgcttttctggtattatttaccctaatgactgcatggctcgctccctaawtcaggtttctgctcaaatgctattgctgcagaaaggcttttcctactctctgtgttcraagggcttctccatcactgcctccctaccctgctgattattcttcataacctttwcaccatctgactttaaaaataaaaaatcaatttatccacttgtttacttcaccccactggaatgtaaactctaagcaggcagaaactttttcactttcgtttactgctatattctcagtgcttagaatagtgcttgacttcgagtcgttcctaagtaaatactattgatttagtaagtaaatggatggttagcttgggctactttgcccatgctgatttgcgtgattgattagcttcatattttcttcaagaaatcaaagaatagcatggctgcttctttcttatttatattctaggaggtatttaactgaaaggaatatctgcttcactgttgcaaccaaaccagatgccttcttccacttcaccagaccaaggagatgacctggagaactgcattttaagattttctgacctggatttaaaagatatgagtcttattaatcccagcagcagtcttaaagcagaattagatggcagtacaaaaaagaaatactcgtttgcaaagaaaaaggtagaattcttatgaatgtttcatgatcatgtatgtgtggttaacgcagatacatttggaagtcggttatcaaggttgctctccagctcaaggtaaagtctagtcaggaacattaaccagtgatgttaattccatcccaggcaaagggtaatcataggcaaggtgtggtcctggaatagccatggtggagtacttgaggagggtggatcctagacagatggattagatttcattccccaccccccaggtcaaaaaagaccataaacaaagttgaaaaccaaatgacaagtgaagaaaaaagttggtaattatgatcaacaaaagatcactaaaaacacgtatcagtaagaagataaatgctataatggaaaaataggcaacagatttgaacaggcaagccagaaataaacaaatagattaagcaggaaaaagtattcagcattactactaatcaaaaatattaaaaaaaaaaatagggtagcatttcttttgccttttatttggaccaacattaaaaatattgatgataaaaaatactgatagaactcagtgaggctatggataaaatggcacccacatgcttttctggttagagtataaattggtacatttttcctggaagtcactattacagattaaaatttcatgttctttgacccctcaatttttattttagatattctaagtaggtggttaaagatatagaaagatagatgcatggaatgctcattcaacatggcttttaattgcaaatattagaaacaatctaaatgttcatcagttggtaactggttaagagaattttctgtttgattgttttacaataagcataagtaatttttataaaaacagtaatattattttccaagaaggaagatattttggtacgtttcttcctggtctttttcaatgtactttttaatgtggttaagattacattgcataagcaattttatccaatttttttcacttaatattatatcataaaatatttttccatataacttaaaactggctgcttaatattccatggtaagcatacttcataatttactttccatattcctttcgaaaataactaatagtgttatttgtgatattttaggccaaactgtattatgtattttccagtgtgacttagtcttatatcctgagaataaaattatgatgctgagagttatttaacctcctcaatataaagcctagttttaatttctctaatagtctcttctaaagcttactaataagagaagtgttacttctcagagaattgtataacataatggaacataaaactagaagcccctgtggaaagataatctaaagaatcttagtgagacttctattagccataaacctaaggttatttaacagtgttagcatttgaaatctaattgcaggcctttgccctttttgtcaaaaccaaagaagttccaacaaaaaggagttttgaatgtaaagaaaaattgtggaaatgctgtcrgcagctattcacagaccaaaccagcatccatagacatgtggcaacacaacatgctgatgaaatttatcaccagacagcttctattttaaagcaactggctgtgacattgagcacctcaaagagtctttcgtctgcagatgaaaagaaccctttaaaagagtgccttccacatagccatgacgtgtctgcttggctccctgatataagctgctttaaccctgatgagctgataaggtaagattttcattctgtattttggtttgatttaaagtatttttccaaccacaatgagatactacaattcacccattaaaatggctaaagtgagaaagaccaactgtgtcaaatgtgaaatgaggatgtggaacaactgsaacacccagtcactgttggtgggaatgtaatatggcacaaccactttggaaaagtgttcggcaatttcttaaacatgcatcgttcctgtggcccactcctgggtataataccaacagcaataaaaacatatccacagaaagccttgtacaagaatgctcatagcagttttattcataataacaaaaaactggaaacaactgcaaatatccatcaacaggagaatgaataaactggtatagtcatgtaagaatattgcacgacaataaagtgctatgaactgctaatattcaagaacgtatatgggtgaatgagaaaatccttatgctgagtgaaaatagccagacaatacatattttctgatttcatgtacttgaaggcaaaactaatatatgatgatagaaaggttctggcagaaagtttgggaatacacaagagattttttgaggtattggaaatgttctggttttgatagtggtgtggattacacaggtatacttgtgtcaaaaatgatcaaactttacacttaagatctgtgtatttcacttgtaaactgtgccatgctttaaacatttttaaataaatagggcaggaaaaactaagcaaaaaaaagggggggtttcttttaagctagatatcattatctgtatgatttcaaatatacgtatccagaaaaatgcatcatttactaggtttattggggaatgtagcattgcacatagggaatttttaagaaagcaggtaaatgtagcttacattttaaagcatctaaactttctttgatttaacctttttttttttctggagtctttcaaactgcattagactcttctttaattgcataattaaacagagtatagtgaatgtgattgaactttttgtgagtgctttaatgccatcaggatgaacttaagtaggatgccaaggtataaaagtttgtctttttactaagacggctcagacttactcttctgttacctctcctccctctcttctaattctagatccaaactctctgtattattgctatgtaccaaattcagcttacagcagcatagttggtgttactagctcagagtctctcatgaacttgcagtcatctcattgcttgactggggccagtaaatctgtttccaggttcactcatgtggttggtggcaggcttgttttttcagtggcttttagtcaaaggcctccattcctctctgtgggggtctcttcataggctgcctgagtgctctcatgacatggcatgtgatatgtgagagacagagacacttcaagacagaaaccacaatcttttatgacctaatctcagattgccataccatcactttttattgatgctattggtcacgtagactaacctcagtacagtstaggagagaactatgcaagggtctaaataccaggaggcaggatcatcagggatcatcttggaggctgggcaccatacctcagagttgttactttttagtgtgtattacctagcagcactgcctgcactttacctattctttcaggatcttaactacttgcaacagctagatccttaaggcacagaattctagaggcctaagttaggccaataacatgcatactatatatagccaaagaccatagcctgtgcagcagcatwtacccagtcagttgacattgtttgtgaggttttttctttttttttttgagacagagtctcactctgtcacccaggctagagtgcagtggtgtgatcttggctcacttcaacctctgcttcccaggttcaagtgattctcctgcctcagcctcccgagtagctgggattacaggcatgcaccaccatacccagctaatttgtatttttagtagagacagggtttcaccatgttggccagactagtcttgagctcctgacctcaggtgatctgctcaccttggcctcccaagtgctgggattacaggtgtgagccactgcatccagcctgtttgcaaggtttcttggagaccattctacatattctttagggaggagaggtaaagaaagaaaattatattattttcaaaaacaagtgggaagacacagagacattaatgattcctctaccctatgtaatgtcagagcttaaaaaagggttttgtattagtctgttttcatgctgataaagacatatccaagactgggcaatttacaaaagaaagaggtttaatggacttaacagttccgcatggcaggggagacctgatgatcatggtggaaggcaaggaggagcaagtcacatcttacgtagatggcagcaggcaaagagagagagcttgtgcagggaaactcctgtttttaaaaccatcagatcttgtgagacttactatcacaagaacaacatgggaaagactcatccccgtgattcaattacctcccactggggtcctcccatgacacgtgggaattgtgagaattacaattcaagatgagatttgggtgggggcacaatcaaaccatatcattctgcccctggcccctcccaaatatcatgtccttacatttaaaaaccaattctgtcttcccaacagtctccaaagtcttatttcagcattaactcaaaagtccacagtctgaaatgtcatctgagacaaagcaaatcccttctgcctatgagcctgttaaaagcaagttagttacttcctagatacaatgggggcataggcattgagtaaatacagccattccaaatgggagaaattggccaaaacaaaggggccacaggccccatgcaagtcctaaatccagcagggcagtcaaattttaaagctccaaaatgatctcctttgactccgtgtctcacatccaggtcatgctgatgcaagagattggttcccatgatactgggcaactccgcctttgtggctttgcgggtatagcctccctcctgactgctttcacaggctggggttgagtgtctgcatcttttcggcacacggtgcaagctctcagtggatctaccattctggggtctggaggaccatggcccttttctcatagctccactaggcagtgcctcagtgggaactctgtgttggggctctgaccccacatttcccttctgcactgccctagcagaggttctccatgaaggccctgcccctgcagcaaacttctgcctgggcatccaggtgtttccatacatcctctgaaatctaggcagaggttcccaaaccctgattcttgacttctatgcactcacaggctcaacaccacctggaagctgccaaggcttgaggcttgcaccctctggaaccatggcctgaattctacattggcccctttcggtcacagctagagtggctgggatgcagggcaccaagtccctagactgcccacagcagggggaccctgggtttggcccatgaaaccattttttcctcctagaccctcaggcattatcgggggaaccagcccccaatatgtcaacgtaggttcttttctattttctctaagtgttggccggcctgagaaataaagagaaagagtacaaaasagagaaattttacagctaggtgtccgggggtcgcttcacatgktggtaagttctgtgatgcccacctgagccacaaaaccagcatgtttttattagggatttcaaaaagggaagggtgtacgaatagggagtggatcacagagatcacatgcttcaaatggcaataaaaaagataacaagggcrgaagggcagagcaaggtcacaaggccagggctaaattagaattactgatgaggtttcatgtcccactgtgcacgcattgtctttaataaacatcttaacaggaaacagggttcaagagcacagaaccagtctgactagaattcgccaggctggaatttcctaatcctagcaagcctgggggcactgcaggagaccagagcgtatttcatccctcatcttcaaccgcataaggcagacacccccagagtgtccgtccataggaccacccgggaatgcattcccttcccagggttattccttactgggaaaagaattcagcgatatttcttctactcattttcttcaataagaaaaatatgactctgttctgcccggccccgcaggcagtcagaccttatagttacctcccttgtgccctgaacatggctgttaccatgttctttttcagggtgcccagatttcatattgttcaaacacacatgttttacaaacagtttgtgcaattaacacaatcatcacagggtcttgaggcgacatacatcctcagcttatgaagatgacgggattaagagattaaagacaggcataggaaattatgagagtattgattggggaagtgataaatgtccatgaaatcttcacaatttatgtttagagattgcagtaaagacaggcataaattataaaagtattaatttggggaactaataaatgtccatgaaatcttcacaacttatgttcttctgccacagcttcagccagtccctccgttcagggtccctgacttcccacaacaaggcatgtgataggaggggctgtcatgaggacctctgacatgccctggagacattttcccctttgtctttgggattaacatttggctccacattactcatgcaaatttctgtagccagtttgaatttctcctcagaaaatgggatttccttttctattgcattgtcagactgcaaattttttgaacttttatgttttgcttcccttataaaactgaatgcctttaacagcacccaaatcacctcttgaatgctttgctgataccctaaatcgtctctctcaagttcaaagttccccaaatctttagggcaggggcaaaatgccacaccagtctctttgctaaaacataacaagagtcacctttgctccagttcccaagaagttcctcatctccatctgagaccacctcagcctgaagttcattgtccatatcattatcagcattttggtcaaagccattcaacaagtctctagggagttccaaactttcccacatcttcttgtcgtcttctcagccctccaaactgttccagcctctgcctgttacctagttccaaaatcacttccacctttttgggtgtcttttcagcagcaccccactctactagtaccaatttattgtattagttcattttcatgctgctgataaagacatacccaagactgggcaatttacaaaagaaagaggtttaatggacttacagttccacatggcaggggaggccacacaatcatggttggaaggcaaggaggagcaagtcacatcttacatggatggcagcaggcaaagagagaaagcttgtacaggaaaactcccagttttaaaaccatcaactctcatgagatttattcagtctcatgagaacagcatgggaaagacctacccccatgattcaattasctcccactgcgttcctccaatgacacgtgggaattgtgagaattacaattcaagatgagatttgggtggggacacagccaagcaatatcaggtttttattgccagatacagttttctgagctgaatatgttttaggaagtgtattaacttttaaaactgaatcataggattagatgtttagatcctggccttgaaaaactcaccaagtcatattacagaattccagaggacaaatttctgactttaagcaattattgaactatttggtaaatagaaatacagttgatccttgaaaaacacggggtcaggaatccaaggattaggggcagttgaaaatttgcgtataacttttaactcccccaaaactatactaatagcctcctgttgactgaagccttatcaataatgtaaacagtcaatgaacacatctttctatgttatgtatattatatattgtatactgtattaaagtaagctagagaaaatgttattaagaaaatcataagaggccaggtgcagtgacttattcctataatcccagcattgtggagggccaaggcaggaagatcacattaggccaggagttcaagaccagtctgggcaacatagtaagaccctgccctacaaaaaaaaaagaaaaaaagaaaatcgtaatacatatttactattctttatgttaaatggttcgtcataaaggtcttcatctttgtcaccttcacattgagtaggctgaggagaaagagggattggtcttgttgctgcatgagtgctagaggcacaaaaagatctacaagtaagtggacctgcacagttcaaacccgcgttgctcacgggtcaactgtagtccaaatttgatcaatttttgtcattactactcagtgccacattcccttttacttattggaaaggagcaagaaagcaagttgaagtagaagtcacacttgagctagtcactaaaattttctgtaccttcatttcctcacctctaaaattggaataataatgcctgccttgcctacctcccagtactgcagaatgagttatataggacggtgatagtataagcagttgtgaactacactgtgctatacagatatggcccttccatttcatatggccccacacttcagggaatttacttactagttagaaaaacaacgaaaaagacacatgaggcaattagcagatgataacgggttacataattatcagttgaattgtatgttacagagactaacttgttataggagcttagagaaaggaaaataggatctaaaatagacaagaaggtttcatggaggagcatggaaagcatggaagagactaggccctgaaatatgatgaggctgttgaggagggactcagactccagagctggataggaccttaattgtcrtgtactgtagcattccctaaaatatgttctgtggaacactagttctagaggatgctaacaaggtattgaaaaaaggggtattaaagacaaatttgggaagcactcagtcaaaatgttgttactgcaagacttctcagagcctttaagaggctttggctgtgattcttaaggagggagatgctgtctgcagggtttccaaacataattttatagaacagcttcataacatactttggaaaatatagtttatttccattctctgattttacagatgaggaaaccaaggcccagaagtgatgaaagacctgcctagctagttagtgtaagacagcccagtgcagtagaaagagtatagatctggtatcagaagactggcgtttaggtccttactatcactttctggctgtctgacttgggaggaattggcctcaatttattcagctgttaaatggggataataataacctgcatcatagaaagagggttataagaataaatggaagtgaaacttttttgtatgatgattcatacagatactgctttatgtgagaggataggccagaatggaaccaaatttctaacttttctatgaattggagttactaatacctgtctcttggatgtgaccattaaatgagggatcaaagtaaactcactttttgtaaagtaagttcagtgcagatactgtcttctgtagagcaaatataaaaagaagttgcttctcatttcaggaggagaacaatcatcacagcaaagacaggcatgagtgtcctcatcttasccttccctcagactgcctgggtgtaytttatgaattgtgacttctttaygccagcgactcaaatgctctttgccttggattttcattttatagtggccagggcagtgaagaaggggaggtgctcctttattactgctaccatgacctggaggatccccartggatctgtgcctggcagacagctctgtgtcagcacctgcacctcacaggcaaggtaacaccttctcctatattccttccttcactgggtccatcttgcctgccaaccttggattgcaaatgctgtgctcattataaaaaagattcactgttgagttcttaaaagttagggaaattctgctgagcatttaagtasaatattaggcagccattaacatggtattttataagaatatttactggcataaaccaggagtcagcaaactttttcttgaagaaccagatagtagataattttaggtgttgcacaaaaaactattcagttttgttatagcatgagagcaactatagataataatgtaaaagaattggatggctgtgtttgaataaaactatatgcaaaagcaaggataatatgccgaccctggtatagggaaatgtttgtgatatattaattggaaaaacattttatagaacatagaggtgtgattccaagttgcttcttaattttctggaacctgccagggtcatttaccagctcagggtattgacatttgctgtttccttcctctctagagtgctcttccctgcaccttcacatggcgcataccccacttcagatctcggctcacatattgtctccttagagctgcagtctgaagtagtcctctccagatctcatcacattctatccctttctgcttttcaaaggatttattactatctgaaagtataatcttcatttataagcttcatgaggacagtaactttggtcttaattgatgtattctcagtgctggaacagagcttagcatgtagtagaccctcagtagatatttggagaatatagaatgaaggaatgaatgcatgttcatgacaaaaccagaagtgcatgtataaacatggaaggttgtgtataccaaaatgttagtaaggattatctaggcatgtaggattatcgatggtttttattttcctaaaatattctctgattacattatacacatgcatatgtctatgtattttatatgattttcaaaatttaaatcgaaaggaagtgaactagtttcccccaaaaccccctctggttatgacactgtgctgccttgtttcatctttcccaacatatgacccaggtctgaattgatcagtgatatttttcacatccatgttttccaacagataatgacttcatttacctcattcagttcatcaccaaggcctgccatttccacctcttcaaatattccttaattccgttcccttctctcttccacactcaccactttagaccaaaccaccaccctctcttacccagtccattcagtagctttcaaattactcttcagcttgccatccctgcctgccacttaatccattctccacacagccataatgatcctaaaaggtgaatcaaatcacatcactccctcctcaaactctttcagtggctgccacttctggtgcatatggaggaaatccagtgccttaaaaatgcccttaggttcctgcgtgagttggccccttcttaccttttcctctcgtctgatactgttctttgctcattatactccagcaacatggtctttcagttttttggaacccaccgagttcttttctctccttgggccttcttacaagcaaactatcttcaaggaactctcctacacccactctgctgctccagtctgatttttactcaagcttagttttcaattttcatgacacttcctcaaagagacctttcctgtcaatctaaattcatttttcccagtgcactctctcatggcatcttgtaattgtttttcataacatttgtccatttgtaacttttattttaatatctgtgacctcccatagtctgtaagctcctaaaggggaaaagctatatttttttcaagcactgtatccctaattcctagcacaattcctggtgtaaataaataaataatatttaatactttcatcaccattcctattcagaaaacttccacaccctgaaagatggatactctcacagtaaacctgaatgtacaaggtttgaaaacagcctcttggtttagaggcagatcatttttcttggcccaacccaagtgctaaattagcaatgagggatcttacccacaaggtggcagcacttgcctagatcttggatataaattcctaggtgtcaaggatacatgcccagtttaatgagagttttgtgtttggagatttggcaaaatatcagtgcctaagtagggaaagagaagaacctgacagttgtagaattatgggaaaaaagcctctactctattgctgtgtattctttattgcctcaaaaaatttgaggggatacattgaaggctttggaaaggaaaagttataagattgggagctagtaagatctggttttgaatcccagatttaccagctatcagctataccactgggcaagttacttgatttctctgagcttttgtttccttttctgtaaaacggggattatgatatctgcctttcaggattataatgtaatgcttctgtctcatagcaagtgctgaataaatgctaatgattgttcttctcagtttcttacaaggccttcctcactaaggagctttgaaggatttctgttagagaatcctgggggttcaaagtctagtgcacgagtttagagcatgctctgccctagctatatagggagcagatgtgcttgtcttctctttgggttctgagattaaaataaattagaaaagaatctactagcctaccccaagagaggtacttagacatacatacttcatcctacctgctgtagtcagaaactcttttggagtgggttttctgactcttacactgattgggctctatttttctatgtagtccactataagttggtagtggggacagtagcctgtgtagcagagatgtcacaggcttcctgcttccctctcccatgcccagaactggcttcactagactgcagcactgtttctcaaggagtctggatgtgacccggaatctttgtcatggaactctggaaaacattttacagtactatacgtagaggtgtgattccaagcttcttaattttctagaacctgccagggtcatttaccagctcagggtattgacatttgctgtttccttcctctctagagtgctcttccctgcaccttcacatggcgcataccccacttcagatctcggctcacatattgtctccttagagctgcagtstgaagkagwsctctccagatcttgtcacgttctatccctttctgcttttcaaagaatttattactatctgaaagtataatcttcatttataagcttcatgaggacaggaattttggtcttaattgatgtattctcagtgctggaacagagcttagcatgtagtagaccctcagtagatatttggagaatatagaatgcatgttcatgacaaaaccagaagtgcatgtataaacatggaaggttgtgtataccaaaatgttagtaaggattatctaggcatgtagggttatcgatggtttttattttcctaaaatattctctgatyatattacacacatgcatatgtttgtgtcttttatgttctttcaaagtttaaaattatataccacttccaatgagttggcattggcttgtgccatgaatcttgttttatatccataccctaaagagttgatcaggtagggctgggtgcgatggttcatgcctgtaatcccagcactttggaaggccgaggcaggcaggtcacaaggtcaggagattgagaccatcctggctaacacggtgaaaccccgtctctactaaaaatatgaaaaattagccgggcgtggtggcgggcacctgtagtcccagctacttgggaggccgaggcaggagaatggtgtgaacctgggaggcggagcttgcagtgagccgagattgcaccactgcactgcagtctgggcgacacagcgagactctgtctcaaaaaaaaaaaaaaaaaaagaattgatcaagtgaggcatcaactgatgtgtcttctctggaccctaaaaaaggacagccattaaaaattttcaaattatgaagtactggtatatatcagtgttatatgactagaacaatataggaccttgaattaaatcatctctttttccagacagtgccatgatgccacatgtgctgcccttgctagcacttttctttagagagctcagttccctttaaagatgatccatctttaaactcatccacaggattttgtagtacgaaaacaaccaactctgcagggcccccagaacactgcctcttaaggctggggctttaccccaggctctaatgtcccctaaccaggggagcatttcaaagagaatatgggacttgagatgccaaagagccccagatatggatgcatattcatttattcaacaaatcgtattgagtgcctactatgtggcaggcactgttctaggggatatgctggtgagcaaaacagacacacacccaygtggaacttgtattccagtggatggtttgcagtggtaggctgtcctccaaacaccatgcagagatacatgctcatgtataccctcagccctcagatgtactctgtgctttaggattttggtagtatctcctcagcagttcttttcatttctggtgctctttagttccctttttattcatataaagaaattaagattcagagaagtcaattaactttctcacagctacatgcaagtgagtggcagagcttaatcttgagcctagatctgctgacctctgtggaggactctgttaagctacctggatttagattaagctcagaattcacttctttggctgttggactattgtagctcsatagcaaatggggctttccaggagttttattcacattcttttgttcagcatgcatgaaacagaatacctcatctgaactgaaggctatgccattttagaaaaatacaagtatccagctgggcacggtggcttgtgcctgtaatcccagcactttgggaggccaaggcgggtagatcacttgaggccaggagttggagaccagcctggccaacatggcgaaaccccgtctctactaaaaatacgaacattagctgggcttggtggcgcatgcctgtaatcccagctactcaggaggctgaggtaggagaatcgcttgaacccaggaggtggaggctgcagtgagccgagattgtgctattgcactccagcctgggcaacagagcaagactctgtcttaaaaaacaaacaggtatccatctcacacctgtcagaatggctgttattaaaaagtcaaaaaataacagatgctggtgaggttgtagagaaaaaggaatacttatacactataggtgggagtgtaaattagctcaaccgttgtggaagacaatgtggtaattcctcaaagacctaaagacagaactatcattcgacccagcaatcccattactgggtatgtacccaaaagaatataaattgttctgttataaagacacatgtatgcatatgttcattgcagcactgttcacagtagcaaagacatggaatcaacctaatgcccatcagtgataaactggataaagaaaatgtgggaatactatgcagctataaaaaagaacaagatcatgtcttttgcagggacatggatggagctgggagccattatccttagcaaactaacgcaggaagagaaaaccaaatactacatattttcacttataagtgggagctaaattatgagaacgtggacacatagaggggaacaacagacactggggccttttggagggtggagggtggaaggagggagaggatcaggagcataactaaggggtactaagcttaatacctgggtggtgaaataatctgcacaataaacccccatgacacagttttacctgcagagcaaacctgcacttgtatccctggacttaaaagtttaaaataaaaaagaaaaacacagatatctttgtccagtaacactttggtgtcctcatcagcgtctctgcttttcctgttaaactcattgacacacatgagcctattgttcttccctggaaagataaccaagctaagaacaatctgttctctttttcaccgtcttgtgtctcagattcgaattgctgcagaaggaatcaatgggacagttggtggaagcaaattggctaccagactttatgtggaagtcatgctttccttcccattgtttaaggatgacctgtgtaaagatgattttaaggtaagagaaaatgaaaattaaatggatctagagccatctgcttctgcctctgtgcatgttattgaagaggagttcaaagtagagaartaagcagtgccaaataaataccctttcccctttattttttggggcttggggagtttttttgttttgttttttgacagggtcttgctctgtcacccaggctggagtgcagtggcgtgatcatggctcactgcagcctcaacctccctgggctcaggtgatcctcccaggtagctaggaccataggcgtgcatcaccatgtctggctaatttttttgtagagacggggtctcactatgttgcccaggctggtatggaactcttgggttcaagcagtcctcccacgtcagcctcctatagtgctgagatatggacgtgagataccgcacctgccccctttcccctttaaatgtgcttttctctttaggttacgagacagtacaatagaaggagtatgctcgtccccattctttcactgagtcaccatatgattttggaccagctagtgctctagacctcagtatcccttcttataaaataagaatgttacagctcatgcaatctgggactccaaatcttggacatattagctcacttgagagaccaccagcctggtcagcagatcactgtgtttttagtaaatctggaattgtaagattaacacttcataccacatgggggaataaagttgttgctctcacaggtgggctgctttgtttgagtgactttataccttgtcataataagtgataaggtgatgggaaatgccttgctagcgttcatgctggcaatgataggaaaagaatgaaaaccgggtatagtcacatgttagaattgctcagcggtgttgcagttttataattaaatgcttacacctaaagaaacactttttcagcttaacattcctgcacatggcaggtatgcartaagtatttatcaatgttgaattatctggaacattctgggccctaactagaggttttttaagacttcagctattgttattacaaaacagaccatcattcttatattggcacttgtcttatacctggagatgggacagcaagactgtattctgttttgtttctcattggctagaccagcaaaggaggagctcactgttttccagaattgcgtgttggtgtatttgaagaaatcgtgcccatggggatcagccccaaaaagatctcctacaagaagcctggtatgcttgcttttagaagattgtgctttaattcacagggacaaaacttaatagacaaataagaaagctaggyactgtgatcagcagcagtcatgagtcctctctaaagcagctgtggggtggctaacacttggctgcatccagwgcttatactgtttctctgtggtgctgtggggttgaagactcacctcttcgagtgacctatcttattcctcttggtgatggtttatcaattagttgtttgctctttccaaagacagcaagcagtttgggaagagtgtaattattacttgtaaacagttcattagcagaatagagcaaataggccttttgctacaggaaacaagttgctttcaacaccacagcagttttcactgtgctctagaatgttctttccccatcttctccatggtaaatggttgaaagacatttgtttggcaggtttttgggggttttattgtagtttttactatgaaaaattttaaacattaaaaaagtagagaaaataatatagtgaagttctatgtacctatcatgcagctttagcagttaactgattaatggccagctctcacctataccccatcccttctcccatcttggattattttgaaagcaaccccaatgtcaggccatttcatttgtaaatatttttagtaggtatgtctaaaagataaaaatttgttttaaaagatgcaaaacgatatcacatcttaaaacattttaactgattccttaataaattatcaaatatctagttggtttagtcactcaattcccggttgtctcatactttttaagcttcatttctattaggatttaaataaggttcattcactgtgattcatcagtatgtctctttaagtgtctttcaacctatagatttgtttccatctttttttccccccttgcagtttatttttgaaggaactggatcatttgacctttagagtttcccataatctggacaataataattgtattcccaagatatatttctctgtcctctttatttcctataagttgatcattagatttagagtagtgctaatagaagtataatgtgagctacacaattttacattttctagtagccatgtctttaaaagtaaaaaatagatgagattaatttaaataatatggttttcttaatgcagtatatcaaaaatattatttcaacatgtaatcaatataaaaaattattagtttactttttttcatgctaagtccttgagattcagtatgtatgtcacccctattatagcacaagtgcttgtcagccacatgtggctagtagctactgtattaacaaccaggactagagacttgatcagattccaatttgatttctttttctcccgccaccaagactacataagcactgttgtcttctttgatcaggaagcacaaaggtctggttgactccatggtgttcattttgtaatatgtaaagttttgaaagaagtctaagagtgaagccagggggaaacgggattaggatacaggcatctgggaaagagactcatgcatggggagatgagggccagaaagagctgttgtctgcttactgttcccatcttagcaggaggcagtatgactacaaacagcttttcctgggcactgcaggacattgcaggcagagagtgggctctaggcagtgctgtcttgttttcacttgaaggaagtttaaagggacctctttttctttttttgagacagtcttgctctgttgcctgggctggagtgcagtggcgtgatttcagctcactgtaaccttttcccccggggttcaagcgattctcctgcctcagcttcccaagttgctgggattacaagtgtgcgccaccacacccgggtaatttttgtatttttagtagagatggggtttcgccacactggccaggctggtctcaaactcctgacctcaagtgatctgcccacctcagcctcacaaagtgctggaattataggcatcagccaccgcacctggtaaagagatgtcttttaaacacatccatgctggtcactgtccaaacaatcgttctcagggccagtagaacaactgcaatcatagcagcagggaacaggtttggtttcctgtggcttcctgcaggtagaagtcttagcacatttccatgcttttcatcccatgtttgtttgtttgagatggagtctcactctgttgctcaggttggggtgcagtggcgcaatctcagctcactgcaacctctgcctcctgggttcaagagattctcctgcctcagcctcccgagtagctgggactacaggcatgcgccaccacgcccagctaattttttttgtatttttagtagacggggtttcgccatgttgaccagtttgatctgcaactcctggcctcaagtgattcacctgcctcagcttcccaaagtgctgggattataggcgagagctgcctcacccacgcctggcctttttttgagacggagtctcactctgttgcccaggctggaatgctcactacaacctctgcctcccagttttgtgtagttctcctgcctcagcctactgagtagctgggagctaaaggaatgtgccaccacacctggctaatttttgtatttttagtagagacggggtttcaccatgttagccaggctggtcttgaactcctgacctcaggtgatccgcctgcctcagcttcccaaagcattaggattayaggtgtgagccaccatgcctggcctacgtcccatgtttgaatctcccttttcaccccactctttttgtatccatgtaattgtgtgacagtaccttatatagaatctggccttactacattctcattacaaccataactcaggcaggtagcaatccagattccttggcctggctctgggccctcatctctccttggtgtggagtagtttcattggttgttggggttcctctctgaggggaatgaggctcctttggtgctgtaaagctttatcatgagtggtaggtaactgagtcaccagagcccctgcccatgaggcatggctacctcataatgcagattcaccaaaagttcctcacaatctactgagatttctggaccctcaaagataggggaatatttctatcctagagagttacaaggcaaagagccccaggagactgaggttctctcctattagtccctttgtatatatattttttgagacagggtcttgctctattgcccaggctggagtacagtggtgtgatcatagctcactgaggccttgatctcttgggctcaaggggtcctcctgcatcagcctccaaagtagctgagactacaggcacacactaccatggccagctaattttttaaattttttttagagacagagtctcgctatgttccccaggcttccccttgtattttaatacttacccatcttctagctttcctgtctttttctctcctttactttctttctcatatgtcgtttctgttgtccacccctcttgcccttttctcttttactcatgcacacacacttagacacattcttcttgctcctttgcattaaaaatgtatctattccaactttattccataactttttgctcacacctgcctgtgggttcttagccttcaacgtgggttcgaccttaatatagaacagtttacaaagcctgtagtcagccacgtacttgcccagctcctccatgtacagtgacaatagagcagtggccatttcctgacctaccagtgaccatacaatggaccagcaaattcacatggcaatttagatcccagttgcctggtttttatcactagggttaggccaagtatgaggatgcaaaattctttgactagttatttctaaactaccaggtctccattgccctcattttaggaggagggagattgaggatacctggaattactggaattactaagttatttcatcatgatcatcaagtagtgttcttttcagacagttgtaattatgaagagaagagatttgggtggaaagaaacaaagcaacacgtaagtcaggctgggtgagtcatgattgggttttggtttttttgtctttgttttaatataatttttttggtttggttttaggaatccatttatccccaggtgaatttcataaagaagtagaaaagtttttatctcaggcaaatcaagaacaaagtgatactatccttcttgattgcagaaacttctatgaaagcaaaatagtaagtaaaagccagaactgagttctctgaattggtagatctccccattcccacagtgtggtatatttcccaaggggaccttgtgtgtgcccacctgtggccacatggatctcctcccagtactggcagcttcagagaaaacccaagtcctaaaactcagaaatctggtgagagagtctaagaaaatatgaattaaaggcatccaggcacataatatactttgtgactcccatgagcctgcctttgacatstatcaaggatcttgcaaagttgcctttgggcagcctctccagttcccctgaggaccctgggaaggtgacccacagcccacagcctcggttttaagttgagatcttgaagttgaaaggtcagagtggggatgagattagcaactggcaggggcttctttgctaagtagggtttgttgggtacaaaaagaacctttgttcctaccaggtatgtttttctgataattttccttttgttgctcctatgttacagggacgattccaaggctgcttagccccagacatcaggaaattcagttacttccctagctacgttgacaaaaatctagaacttttcagagagaagagagtgctgatgtactgyacygggggcatccgctgtgagcggggttcagcctacctcaaagccaaggtgagccaccaccccggggcactgtgggcatggcagtgaaggaggcagctccaccagcagcttacgtggagctgtccgctgcccccagtactccccacccccaggcagccaaagcatgccttcacccctcrtatggctccagcatggagttcgtaagtacaaaatctgagggtctttaatctcaagatatgaaaaacacttaacagtcatagagactcatcagatgtaaaagggagagattagttaacatctcccttttcctgatccttttgcttgatcctgagaagagcaaattcagtaacattacatgtcccaacaggtgtcttcctatatttagggggcagcaaaaatagttgggcttcccaggatctagagggtgaaggccctgcctgctgtcatcacccatccccctaggaggcaagatctggccagttggtgccttgaccccttggtcagcarttcctcagtgtcccgcagtgggagccaggagcccctgactgatagcagcggccatgagtcctctacgtcagcactcctcgccatgcgccgttcttccgtgagcatcttaacaggtctctgctggctcttcagatttcctgttgtttttccacacctagggagtgtgcaaggaggtgttccagctcaagggtggcatccacaagtacctggaagagtttcctgatggcttttacaaagggaagttgtttgtttttgatgaacgctatgctctgtcctacaacagtgatgtggtgtcaggtaggtcagcacaggctcagagcccaaactgaaatgaagcacattgtcagttcacyattctagaaaaatgacacagggaagacaggccagtgctcattactgagcactgaataagcagggaaaataagtacattgtgccaccattttcccagctgtggagctgagagaaccctagcccaggagtcaggaggcctgggttgggatcctggcttcamcattgctagctggacaagcccattaacatggggatcatctcacctgccctgcctgcctgtctacctgccaagagctgtactactgggctaattcagggctcttaacctggaattggtacatagatttcagggattctgtgaatttggatggaaaaataattgtatctttgttttcaataacacctcactaaaatgaagcatttcctttagttatgaatgtaggcaacaaagtaccagttgtattaatgtacctgtgactttgtcttcagtaggattcacaatactttcatatcatgttctagttgcctcagatatctcaaaatagtatttatactcatcactgcttcaaaatgaaaatagttattaggcccaccactaagagttgatatataatgtgttaataaatggcacgtcttattatatattacagattttgaaaaagactttgatattttgtatttctgtatagttggtttcctttgtaatcttacatattttatgcatttaaaaatatttttctaggtcaggcacagaggctcatgcctgtaatcccatcacttttggaggccaaggtaggaggatcacttgagccctggagtttgagaccagtctgggcaacatagctcactatgtctctacaaaaacttttttaaattagctgagcatggtggtgtgtaccagatactcaggaggctgaggcaggaggattgcttgagcccgggaggttgaggttgcagtgagtttaaatcatgccactgtactccagcctgggtgacamagcaagaccctgtctcaaaaaagtttttctaggccaggatctatagtcttcaccagactaccaagtaaatccgtagcacacatgattttaggaactcatagctctctgtggacccaggtggcatgcacatttgagtaagatttgcgtttgattgtcctctcctactttcttggtcttattttcattttagtggttttgagttgtctcttattgatcactacttcgatctgttttggagctagatggagtataaattctaaacaagtagaaagagtagatttgattttacagaggttatattggctggactcgatgggtacctgcgtgtgagtatgaaggagagagggaaggctcagaggtagcttagataagcaaggtaaggaaaagtgaggaagaatgatgttatcaatagtaacaggaggtcatcagggaaaaacaggtgaagaagatggtgtgagttttaggaatcagatggtcaagtgccctagcaacagcaggagagacacaggcctcggggagaggggtgtggactgcgcatgttcmctgtaggtgggttatcgcctgtatttaggtgtgttgtccccmctggaaaagggaacaatcaaagaggaaaagaccacttaacaagggggttgggaggtagttggccagctttggaatagctggtgagagagagaaactttcattaccatctagttaccacctgttctctagatgggaaaaagaaaaaaaaagtcagtaaatactggaagcagacagttaccagaagtcacccccacaaaaaaataagctgggtggtgggggtggtggttagttgttgttgctagaagacagaagacttactatttggaaaccttccccgggttccacaggatctacgagattctagtcagcaaagggagcaatgcctgtccacgtgtgtgtgaatgyatgtgtttataatgatggcttttccttcctccccagagtgttcatactgtggagcccgctgggaccagtataaactctgctctactccccagtgccgccagctcgttttgacctgccctgcctgtcaaggacaaggattcacagcctgttgtgtcacatgtcaagacaaggggagcaggaaagtttcaggccctatgcaagacagctttaaagaggaatgcgagtgcacagcccgacggccacgcatacctagggaactcttgcagcatgtgcgacagcctgtgagcccagagccagggcctgatgctgatgaggatgggccagtgcttatgtgagcagcacctttggcattttcccaggccctcggtaaaagtaggtttggggtgactatacagagaaagcatggcaagactgcagaaacagagaaatcgggaacttcagttctggccgctgccaccgtggcagccgtctacacttcacagcgggaggggaggagtcacgttgtctaccacttacctgagacattctgatttggatgatgctagagcacagaaaataggtgagctgcatgggatcccaaagctgctgagggatagagcctgagcctggtggccacagcatatgccctttctgtkccatgcagctggggctgttagtagtcattgcccttgtcagcagaccttctaccctggtggcaaacacatgaaagstgtggccctgggagtggcctcctaaaacaagccacttaggtcatctgccatctacccttaacctctgtctctcgcctgaggggaatctgcaagctgtgcattgggcttacctcctgcttttgtagaaataaccatcctttggtatacatggaggatagttccagaacgcctgagtatacaaaaacccaatgcatactcaagtcccacagtgggccctacagaacccacgtatgtgataaatcagccctccatgtacgcaggtttcgccccctgccaatactgtattttcaacctgtatggttgaaaaaaatccatatataagtgcagccatgcagttcaaacccatattgttcaagggtcaactgtatagtttattgaacagccacacccattcctttacacatgatctatggcagagttgaatagttgcaacagacactatgtggcctgcaaaatcggaaatttttactgtctggccttttacagaaaagtttgccagcccctgatctagaccagcagctcatctgatagaggcagaggtggccttaaagatgtggccttcttcattttctgttggtttggtttcgtttctatgagagatttcctctgatagctctgctttccccagcacttactctctgagcttttaaatgttctctctgggagcttcatataagctcggtgacatttgagccacagtttttagatcagcacctggaatacatgacacattcttactgaggtcatccagcactgccatggtggctgcccagtcttctggccagtgtgccaggcacatgtccctgtcacacaggttccaagaaacacatacgcagccatgcatagaccaacagatttaatattatattgcagttttcagcgatgcagaatgcagctgcaattgtgttttaaggagaagccaaatggggatggttgtccctgcaacatggtgccactcctgggccatgtgcagcctcagtggacactcttccatagcgctgaggccctggccccgcctccagttaccctgtactgcccactgccttacagttcagtgcgcaggccttcaccttttcatcaccagcctctctgctcagtgctctggagttcttgaccttgtcctttatcatgagatttgctgaaatcactaatgaaaataactcccaaaagcaacaaacaaaaatattagtttaactggcactgtggtatattaaaaggcacaagggcattgtggcttaacacttttgctggatcccaagagacgcacatgatgttaaaaagagatctggcagcagtactaatactacatttcagtgtaatcatcttggggtggtttggccaggatttcccaattccttgatatctggagtttcttcaccattgtccggcatcctgcggaggcttaatatacaggcgtaaggtcagcagcaatttgtctaataagtgatgagatcagtagctgaagtctctaagctgggccattactaaataccatagccatgttgatctggaaatttatccctctagtgtcttacctcacataagccatttgcccactgtgcaatatagaaaggtgttttcaaaagtatttggccgtagattttcacatccatcataaggttggcattcaataaggaaaaagttctaactccagtattaaattgtacataaatcccaaatgttcttaaagaacactcagggacatgtttgttgcctgggattggtaatgaaaggttggtttttgaaacttgaaatttcaccattggtttttttcctatcatttctgcatatccagcaaaaggaatctcatgttgactcctggcagagttcagtggcttcagtctgtctatctgttctgaggggaaaattgtgttctggatccagtaatcaatttggcaactttaatcgaggttttcaaaattccaaggagggttaataaagaatgataatcagttttatttgctaatagctaagacaaatttgtaataaagtgttttataatacttcaaaagcatgtggaagagtgtgccgtttctgtgtcacacattttaaatgcacttgaaacaccacacagcaaggccattgaaactgggctcctggggctaagtcgctgctgctggaacatcatcttcagtaagatctgctggtttgggggcttctagtttttaaataataaccagattcaacttctgtgactaaagaaaaacttcacattaacggtattttataaaattttcaactacaaccactagtcaacctaaaaccttagtgcataaagaactgaaccacaaaagggtttcatgctgccagcattttgccttctggtttcccctgcagagcacaggtcatcaatagaacacatccagttcaaaggcatggactccaccgccacacactagacaccactccggcacttgggaatgatgggcccagtcaggtccgcaagcctcctcttcctcactggaaaggaatggagataagatataaggcacttttccctgtagaccagggrccagcactgttgctgagaaagcactgtgaaacctcgcactaattggtttgttaacagagtctgaagtctgttgttttgaaaggacagtatgtgtgagttgtacaacagccctccagtctgtcagtgttcattgatgagggtctgtggtagtggagattcattcatagatatctgctaagtggctgaccacacagtcccacgttataagtcggctattttctttgcttacagaagctccagttgaagatctttactccggtgttcagataagagttaaaagtttagtcagtcttcttaatgagattagggtcttaaccaggtggaaacatttcccccagctatgtctgggagctcctggcctacctcctgcctatataaacgagagtttccacccgaaagattaccctgcagtatctgtatccccttatgtttaaccttgccattttccccgggggcaagacagttatgctcaacactgttcaagtgacaaagtagttaaatgccatgaagaggaaagcactagccaggaggttgcaggctggagacgttagcttaaaggatgatgaggatgcagggaggggcaggaggggctctgtttgttgtaacaagggagagtgttttgaaattaattgtagtgtctgcagataagaccaagcagcaagctctatgagccacaagagaaaggtcaaagaagtctgtagagccagtaggtggcagtcgagaggcctgctggtgttggcagagacaggaagctatggtggagggaaaaaaagtccgtctatacttagatgtcttcaggttcccaagctgaggcggtagacctgcagccaccagatcgatgaatacgagctgcaacaaaaaccaaatcagcttgtgcatgacactggccatacaaagcagacccacaagggaggtggggccagcccagttccttagatgatcagaatgtccaacttcttgggggtagatgtgaggggacaaaaaccaaaacccaaagagcacaagaggtttgctcaacgtgaccaaagagtttacatgaaccagacttttaagcatctccatagtagctgtgcaggcatgcccaccagggccatcctcattgcctcatcggagcccctccaacgctgctggaatgttagttaccattcccattttatggatgaggaaagtatggcagagagggtatatttcttgcttaaagcaataaagctagtaccagacaggaccaagcctttttttttttttttttttttgagatggagtttcgctctgtcacacagactggagtgcagtggcgcaatcttggcccactgcaacctcgcctcccaggttcaagcaattctcctgcttcagcctcctgagtagctagcattacaggtgcccgctgccacacccggctaatttttgtgtttttagtagagatgggggttcaccatgttggctaggctggtctcgaattcctgacctcaagtgatcccccacgcctcagcctctcaaagtgctgggattacaggcatgagccaccgcacccagctagaaccaagacttttgactcatcttgagcctcagtccagtgcctccctcagtagacttgagccttgtgtgggtagggtttccatatccatatcgcatctgattctcacagggaggattagctccttctccctgcagaagaaaagagccccagtccctgagagctggcagcagagccaggactgaaatccaagtccctggcccatggttgagggaacagaaaggaccctatggcttggtgggggggttattttccattacttgccctcattgtgtccactgggccggatctgtgtgtgtgtgtgcatggttcccctggcactggcttgcctatttttttttttttttttttttttttgagacggagtcttgctctgttgccaggctggagtgcagtggcccgatcttggctcactgcagtctccgcctcccgagttcaagcaattgtcctgcctcagcctcccaagtagctgggactacaggcatgcactgccatgcccagctaattttttgtatttttagtagagacagtgtttcaccatgttggccaggatggtcttgatctcctgacctcatgatctgcctgcctcggcttcccaaagtgctgggattacaggcgtgagccaccccacccggccccctggcactggctttttcagggactggatggagagaagggaaaggcatccatttattcaggtattatttttttccctttttaatgatgaaggaagttgagaccaggagagggaagtaacttattccaagttacgaataagtcacaaaactgggagtaaaagctgggtctcccaatatcctccttcaattctgtctggtctttactttctttaaaaaactcttcactgcttattgcaagagccagagactccttttattgtgaatgccagaagggctctccagtcgtccggaccaacctccatctgctgcttgaactcctctgccacttcttgccaaatttgaacatttccatcatgtttttggaaagcactttctattcatttaaatattcggcagcatgtactgagtgctgtgtgccaagcacaagaatcagaagtaaagacacagtataacaggaaccaagatatacaatgtttgagaactactgtttgagaaatatgaagtattagagatgccctggcagctctctgaggtatgagaggcataaagaatgaagtggtcagaccttcccaggtggcaactaacaggtcagctgaattttaaacaacaaaaaggtagaggatgagaaggtggggggcattgggagtaaagaccctctaagggtaagcttttccttggtcacttgggggcactcaggctacctggaatggtagtaacatggcaaagggatggcttgttggagatgtcaagagacgacctcctgatgggaccatctcccaatgtggagcacccaggcactggagccacattgccaattcaaatcccggtcctgcccacggattgtgggtaatgttaattacctacttccctagacttctgtttccttcttgtaaagtgtggataacaatagcacctgtctcacctggttgtggggaggactacatgagctagtgagatgggaagtattcagaacagtctctaacacacagtaagtgccatgtaagagtcagctattattaagagacttgggagtcatttcaaggggcctgactgagagcaatgggaggcaagtgagggttctaagtggaggggtgacaaggcaagcttcggaaggagacttgggatgagtgccaggggtgcctgccctggaggagctgggggcctgaggatgttggaggagatractgtgacgagggctcaacatacacggcaggacactgggattggcaaggaggtgactggctggctggggtggaggcagcatctaggaacaggcccagatttctggcttgggtggctgtgaggaaaggagtagccttttctttttttcttcttcttttttttttgatggagttttcttgttgcccacactgaagtgcaatggtgtggtcttggctcactgcaatttctgcctcccgggttcaagcgatcctcctgcctcagcctcccaaggagctgggattacaggtgcctgccaccatgcccggctaattttttgtatttttagtagagacagggtttcaccatgttggccaggctggtctcaaactcctgacctcaggtgatccgcctgcctcggcctcccaaagtgctgggattacaggtgtgagccaccgtacctggctgccttttctgagataggtttgggggactatgatgaaactgatttgggatccagcagtcccacttctggatatttacccaaaatattaaaatcagttgaaaagatgtttcactccatgttcattgcagcatcattcacaatacccaaaataaggaatcaacctaagtgtctatcaacaagaatggataaagaaactgggggatatatgcacaatggagtacgattcagccttttctttaaaaaaaaaaaaaaaaaaaaggaaatttgttcatttgcaaccacatgagtggaattggagaacattatactaagtgaaataagccagccacaaaaagacaaattatatgtggaatctaaaacaattg

SEQ ID NO: 6859 - DNA, 117289 bp, Homo sapiens
  misc_feature (1)...(117289): n = A,T,C or G, or insertion/deletion polymorphism (see Tables 1-2)
tgttgctggtttcagtttgctaatattttcttttttttttttcttttgaggcagggtcttgctctgttgcccaggctggagtgcagtggtgtgatctcaccactttaaacaatgttctgtaaagagttgcttttcagatggtatacagcaataagtttggggttgggtgagttataaggccacagaataaaaattgtgcagcaccactgagtattaattttacaaaaaattttagggaaaacattaaacaaagatgtccatattaagaagtaaatgaaaattttaagataaaatactgtttatagtggtttcaaagatattcaagttaccattttttttttaatttttttaaaggctttgcctcaccctgctccctcacaagggctggctgcacatacacagccatttattcttttttttttattattatactttaagttttagggtacatgtgcacaatgtgcaggttagttacatatgtatacatgtgccatgctggtgtactgcacccattaactcgtcatttagcattaggtatatccctcatgctatccctcccccctccccccaccccacaacagtccccagagtgtgatgttccccttcctgtgtccatgtgttctcattgttcaattcccatctatgagtgagaacatgcggtgtttggttttttgtccttgcaatagtttactgagaatgatgatttccaatttcatccatgtccctacaaaggacatgagctcatcattttttatggctgcatagtattccatggtgtatatgtgccacattttcttaatccagtctatcattgttggacatttgggttggttccaagtctttggtattgtgaatagtgctgcaataaacatacatgtgcatgtgtctttatagcagcatgatttatagtcctttgggtatatacccagtaatgggatggctgggtcaaatggtatttctagttctagatccctgaggaatcgccacactgccttccacaatggttgaactagtttacagtcccaccaacagtgtaaaagtgtccctgtttctccacatcctctccggcacctgttgtttcctgactttttaatgattgccattctaactggtgtgagatggtatctcattgtggttttgatttgcatttctctgatgaccagtgatgatgagcattttttcatgatacacagccatttattcttattctttgtcctttcattgggtggaaaagcttgagaccatctgaatctgaatcccagatctagtactcattgaatgagtttacctcctggcttcagtgttctgatttgtaatatgggcatgatagatttatgtcagttgtaagagacagatgagagagcttatagaaaagtacccagaaaggtttgatgtaacttgatagcaagttacagtaaacagttcctaggggaggaaattttgataccagggttagggaagtttagatggtgtattagtcaattttcatactgctgataaaggcatacctgagacttggaaggaaaagaggtttaattggacttacagttccacatggctggggaggcctcagaatcatggcgggaggtgaaaggcacttcttacatggcagcagcaagagaaaaaaatgaggaggatgcaaaagcggaaacccctgataaatccatcagaacttgtgagacttactaccatgagaacagtatggggtaatctgctgtcatgattcaaattatctcccactgggtccctcccacaacatgtgggaattatgggagtacaatttaagatgagatatgggtggggacacagagccaaaccatatagtttcacccctggtccctccaaatctcatgtcctcacatttcacaaaaaacatgccttcccaacagtycctccaaagtcttaagtcatttcggcattaacccgaaagtccacagtccaaaatttcatctgagacaaggcaagtcccttccacctatgaacctgtaaaatcaaaagcaagctagttacttcctagataaaatgcggatataggtactgggtaaatacagccattccaaatgggagaaattgggcaaaacaaaggggttacagtccccatgcaagtctgaaatccagcagggtagtcaaatcttaaagctccaaaatgatctcctttgactccatgtctcacatccaggtcacgctgaagcaagaggtgaattcccatggtcttggacagctcctcccctgtggctttccagggtaccgcctcccttctggatgttttcatgggctggcaatgagtgtctgtggctttaccaggcacacagtgcaatttgtcggtggatctcccattttggggtctggaggatgctggccctcttctcacagctccactaggtggtgccccagtagggacatttccctttcacattgccctagcagaggttctccatgagagttccaaccctgcagcaaacttctgcttggacatccaggcatttccatatatcctctgaaatctaggcggagattcccaaacctcaattcttgacttctgtgcactcacaggcttaacaccatgcggaagctgccaaggcttggggcttgcatcctctgaagccatggcccaagctctatgttggcccctttcagccatggctggagcagctgggatgcagggcaccaagtccctaggctggacacagcatggggaccctggtcccggcccatgaaaccattttctcctaggcctgcgggcctgtgatgggaggggctgctgtgaagatttctgacatgcccaggagacattttccccattgtcttggggattaacatttggctacttgtcacttatgcaaatttctgcagccagcttgaatttctcctcagaaaacaggtttttcttttcttttttctttctttctttctttttttttttttttattatactttaagttctggggtacatgtgcagaacgtgcaggtttgttacatgggtatacatgtgccatggtcgtttgctgcacccatcaacccatcatctacattaggtatttctcctaatgctctccctcccccagccccctaccccccgccaggccccagtgtgtgatgttcccctccctgtgtccatgtgttctcattgttcaactcccacttatgagtgagaacatgtggtgtttggttttctgttcttgtgttagtttgctgagaaggtttttcttttctattgcattgtcaggatgcaaattttccaaacttttgtgctctgcttcccttataaaactgaatgcctttaacagcacccaagtcacctgttaaatgctttgctgcttagaagtttcgtctgccagataccctaaatcatctccctcaagttcaaacttccatagatctctaggacagggcaaaatgccaccagtctctttgctaaaacataacaagaatcaccttggattccattcccaacaagttcctcatctctatctgagaccacctcagcctggactttattgtccatatcgctatcagcattttgggcaaagccattcaacaagtctctaggaagttccaaattttctcacattttcctgtcttcttcggagccctccaaactgttccaacctctgcctattacccagttccaaagttgcttcctcatttttgggtaacttttcagcagcatcccactctgctggtaccaatttactgtattagtccattttcatgctgctgataaagacatatctgagactgggaagataaagcagtttaattggacttacagttccacatggctggggaggtctcagaatcatggtgggaggtgaaagacccttcctacatggcgggtggcaagagagaaaaatgaagataaaaccgtcagatctcatgagacttattctctatcataagagcagtatgggggaaaccgcccccatgattcaaattatctcccactgggtccctcccacaacatgtgggaattatgggagtacaattcaagattagatttgggtggggacacagaaccaaaccatatcagatgggtcagggtaagtttggctggatgtaacaaaagatggacagtaagtgtaactaggtgaggggaggttgtccctactgtctagcactgatctttaggtatatcattgttgaggctattttgtccacaccatcttcatctttcaagatctctaccctctattgagggcatggatggaggaagtggggagtaccatgattgttgacaaggtggccacccacaagggcagtttgaatggcagggggcatgaacaggcattcttctgctgaaagatttatggataatgtttaggcagccatcaagagaaggctggtgtccagcactgtatttcctctgtaaggactgtgtgatgttctctgtcaatggcaatggatggcatgcaggttttgctttgacttccaatagctcccacgtcttttttgtctggccatgtttccatcctcccctgtagagttctgacttcctactgggaaggcaaggagcagcttcccaccccactgttcttaagaatgatcaataagctttgctcctgtctgaatctaccttgctgacttcctataactggggttggaactctctctctgtaaaatgtcagatagtgaatattttagcttttgtgggccaagaggcaaaatcgggaatgtttacacaaattttttgaaaaaattcaaaactttattcacagacactgaaatttgaattttaggtaagtttcatttgtcatgtaatattattattttaattttttcaaccattaaaaaatatgaaaaccattcttagctcaatggccagatagagtcaagtggccaactgcagacaatagtttgctgacctctattctagagcctattactgaaggaaaaaacctaaccccccccacacaaaaagaaaccctctgaatattaagtgtcttgcagtccaagatgcctctgactgactcattcactaaaatgaatggaaagagttaggaagcataggaaagaaaagcataaagattgtcaatactttaagctcccatttcccataagcaggaagtcaaaatgttttaagtccaaacaactggccagagcagtgtcttttgaacttgcttcatgaccagaatcacctggcttcttgttgaagctagattcccggactagaggttttgatgcaagggagacttctgggtgggggtgtgctctcgggatcaggtaagctgaagaaacactattccagggggtgtaaaggaacctcaaaagctgtagttcttaaagtgtggtccgtggcccagcagaaccagcattacctgagagcttgtaagaaatgcaagtctttggcctaccctagaaacactgaatcagaaactgggggtggggtctggcaatctggttttcatcaagccaggtggtcctgatgccaactagaatttgagaacgcctgcttcaaggcatcattaccagcatctggagaagtgattgagaacccacctgagcagtgaaggcctgggcgctcttaaaccactgtgttcgcaagagcgcaggtctgtgggtgagagcaattctaacacacatctgaagccaaaggcctaggtttccacaggaagatctggaaaccctgttcaaggcaagccttttggaagtcaaggctgtattcccctaagagggggcaccatggatcctagagatagcaaatgccacccaaggtgatggtgagggagttttcagcttttctgcacgtgtgaccgtttactgcaccaggagctttctagtgacttccacctttttcaggtttttctaaggttcaccggggaacccctgtcctgggcctgccagtgaggtgctgggagcttcccgacctcacaagcggctcttgtgatgtaattgccacctgaggcgtgcccctcctggccctggcgacatcacagaggctacctgggcacggaccccgcagcttcctggggcccagtcagccgctccaggtgcttaagtctggactgcggaggccggggcggtggcgtgcagggtgaggtctcccgggctggcgcgcrtgcaagccccctgctgctacctcgcgctaggccagctccaggagggcaacagacgacaggacattkcaaaakggccacttaaattttcyttcgagtaaacagaacacctgccaagacmctcgarcctgggcgtgccccaagacaggtggttggggtctaggagtcggctgcagctggcgatgctctgaggggacgtcagggcctcaggatcgccccyatgaagacgaagtgcatctgtgaactgtgctcctgcgggtaaggtggccacgcccagggcaaggctgggggagcctgggttttcagactcccgaggaagggaagcctcccccagctgcktcatcaggcggcatcacggtggkttcgtccacttgctacgttttttaagccacaattgtgtcaactagcgttgtgcccgcggaygccacatcagttctggcgaatgtggctgttttcgggccttctgtgcckcttcacttgagaactgcaggagggttgaaaatgggcgtgaccgcgcagtctgcactcccttccctgaagcccagaaagtgtcagccaaggagggagaacacctggcccagtgggaccagtcttgctccttttgggaaagtgataggatgggaggagaattcctgtagtataactgaatttctcattcagagagattgttactttgtcagagaagtataaggtattagtaaaacttgttccacattgtgtagagttgaataaggataatgaaaacattactttcacagtcgcctggcctgccaggtctcccttctaacctttaaggaccatctttgggtggaagcgcagtaaaggtggtcctrggggaaatcatggactttagtcagagtcccacgggctgactggtctgctgtcactcacatgatctcttagaggctccttctatctgcttcccagggcagctgggtttctgcttggctggggcagggagtgggcagcagaggagcaacaggcaagagggttctgaggtcacctttcctgggctgtcattaattgtgggatcttagattggtaactaaactccaggtcatagtcgcctcatctgtaccaacaatacrtacctcataggactattgtaagagttaagatcatgtatgtgagtcctggtacatggattgtgcttaatatgttagtgtcctgaaatctgaaaaaagggcaaatatgacacatgcatataaaaatggtatcagtagtgtggagaattaaagggcactctaaaaactggatcagcaaccttctatatctctggcatcaataaatggttcccaactctggctgctgattagaatcacacagggagtttgaaaactatcagttgctcaggccgttgaattgataatctcagagtgggccctgtcaactgtctaaaggtgattctggccatttgctaggactgggactcactgaactagatcatgtacaaacgtgggtcttgcttttgagctttgttaagtggggccagagcagtgtatagtctaggactacatgttaccaagcaaaacctttttttctaaggccgcctttcttttttctttttggmgrcagtgtcttgctctgttgcscaggctggagtgcagtggtgccatctcgcttcactgcaacctatgcctcagggttcaagtgattctcctgcctcagcytcctgagtagatgggattacaggcacatgccaccatgcctggctaatttttgtatttttagtagagacagggtttcaaccatgttgtccaggctggttttgaactcctgatctcaggtgatcgcctgcctcggcctcccaaagtgctgggattacaggcatgagccactaaggccttctttctactgggatgctttacattaccctcctgtgtcctcctgcattgttctaggcattgggattgaatgtataagacatagtctccatctttgcacagcgtgcagtctaggtaggaaggcagaatgctcattaagaggtgcagagcatatatagtgagaagtstccctcctgcccctgcagtagggttatgactcatttgggtgttccttctctgactctgttctcattctgtccctgcaaaggagtcactttccattggaagcagagtctgttcttgtgtctcttctccttttcttctctcctcatcctgtattttctcctccattttatggtttcagccaatagtttctcctgtcttctgaattccagtttcattttcatcttctcaaagtgctttggtgatccatctgtctcattaatctcaacttcaacaaccttcaaacattattctggtatctgccccattcatggtgccagcaatcttccattcaccctgggtgaaaattttgaatcatctcttactctccctcaaacagaacattgaatctttttcttcttcttatttttttattttttttatttttttgagatggagtcttactctgtcgtgcagtggcgcgatctctgctcactgcaacctccgcctgctgggttcaaacgattctcctgccccagcctcccaagtagctgggattacaggtacccaccaccatgctgggctaatttttgcatttttagtagagatggggtttcaccatgttggccagctggtcttaaactcctgacctcaaatgatccacctaccttggcctccaaaagtgttgggattacaggcgtgagccaccgagcctggcacattgactcttttctaaagtctgggtccctcctccattgtaatctttctttaattggtcccttcccttttattccggttacaacctccctggttctctcatttttgtgtttggaaactgktcctaaattaccttcctagtttttttttctcccatgattcccttacatgaaactacaccttgaattggatcaggtttcttggcatcccctgagtggacctgctgatgtcccttttctgatccttatcctttccctttctctaaaatacctatgttccctcctcctgctggacttgtaaggcccggtttcacttgyaagttccctgttaacccagccctgtggctccccatcaaagaaaaaccccgctccgtgttctcatcctctatgcatcagcatgctttatatcctygattaattatatgtacgctgggaaaacagatattttctatttttgtgtgtgcactgtatcatagcaacacagttttctttattaacagctaacacatatctttttgaatgaatggatggcgttttttgtttgtcaaggtcataacatgctggactgggttaggaatgtaagatttagagatgtactgtccagtatggtagccagctgtggcaatttcatttaaataaatgaaagttaaataaaactaaaaattcagtttctcagctgcacaagccacatgtcaagtgctcagtagctactcgagtatagtcactcccataccggcacatgcagatagggagtgtttccatcactgcggaaagttctgttggacaacactgatcttgagtctcattatttggaagtcttgatctctcccaccccaattaaatccctcccaccccaattaaatctgctcagtgacyggttgggatggagcgaggaattttataggtgttttctaagctgtggaagtctgtatttggcttttccagtctgaggtcatgggaaaaagcaatgggaaatctggaagacaagcatgcatgaagaagtcagagacagcgcccttgagtgggagggggagaccggggttcctgagtgagtcactggttctctctgggcttcagttcccccattttttaatcctggagatttgtggagaccctcagggctgccagggagggagagaggcacatttattcccccttctctctcacattctcttcttccgaagtttttcttgagcaaataattctttaatgtcctttcaactttaacttttgaggacattgtacttgttggcgagtgggctctggagatgctcagaggcctggataaraaggtgtccatctgcaggagcagctgcccacrgctgctgaggaaaagccaccaatgggtgactctcttggagcaagttcttatatttggccacaagatggcagacgtttcctgatcaattctcactgcgggttaaaccaaatcagcctgaatggaaaagcaaaacctttggagttctggattttattttatttttaaatagatttatctttagttttctaaaatgagcaattagagtttagggtccagcagagctcaggaaagtggtacgcctttcagagtagatggcagattacgaagtgaaaagtgtttcaaatgtctaaatttaaagattccaatcacttgtaaaacttttcagtgagctttgctgggctaaaaaaaaaatcagacatattttactgcgtcaagctcaaggctttgcctccacaacaatgctctacttctttccttgaagatcaaaatcttgcaattggaattattaccatagaatgtcataatattctcttttcaacataatcagcaccaaaaaagcagagtattgtggtttgcagaaacagtaaggtcagcatctaaattttttttgaaactaatgtaccacttaattatcttgacttaagaagctacatggtgggggagtgctttgaatagagtaactctaattttgtatatgagagtataatgtttccaattgcatctgattatctccagcatttcctgttattgaaaaaatgctactccgaagagttttattttttattttttttgagacggagtctcgctctgttgcccaggctggagtgcaatggcgcgatcttggcttattgcaacctccgcctcccgggctcaagcgattctcctgcctcagcctcccgagcagctgggattacaggcgcccgccactacggccggctaatttttgtattttttttgttttgttttattttgcctctaaaccatcttttattgcgcacttcagccgcgagtccggggctggcctgccgtgccctaggcgtagtactgtaggttggctttcttcttggcctggacctccaggatgccttccatgtagtcctcgtgggtgagctccgtggcacccctgcgcagtgcgatcatacccgcctccacagacacagccttgcactgggccccgttgaagtcatctgtgcagcgggtcagctccctcgcagttcacgtcaggactgacgttcatcttttgggagtggatctgcatgattctggcccaggcactcgatcttgcggtccaggccgccctagcgtagcagggcggggtccaggatgtccacccggtttgtgactgcaattaccttaacttgggtgttgggctggaagccatccagctggttcagaagctccagcatcgtcctctgcacctctcggtccccggacttctcgctgtcaaagtgcttggtgcctatggcatccagctcatcagtgaagatgatggagggcgctttctccttggccagggcgaaggcatcccggactagcttggcaccatctccagtgaacatctgcaccagctgggggccagtcagctttaggaagktggccttagtctgtgccctacaggcccaggccaggagggtcttctccgtccctgggggccagcaccccttttggatgttggatccgcaagttctcaaacttctccttgtggttcattgacaagacagtggcctccaccagttcctggatctgcttgtccaagcccccagtgtcactgtattgctccgtgggtctctcatccacctctgtggccttcacccgcgagtcgtactctgggcagtgtctccaggattggataggagtctttgttcacacccaccaggtctcctggctttagcttttcaacatccaccaatccaatcacaggtaggaagtatgtctgtcgtgtagaggttttgatcacagcacacttgtccttcctctgggagtccaggtcaatatttggaccatcctcctcttgatcattgggatcaacatccaggagctcgatgatgttggagacaaggtacaccagggttttgttcacattgattttctcactgttctctttgatcttgtccttcatggcttggagctcatgggtgactctcaacagttaactcttcatgatcttgatctcactgtccagaagccatgtgcgctggatgatctcctccgtggacatsttgagcacctccaccccagttccatcttgcttggcctcatcccacacggttgccatcttcttttctagtttttgaatttttagtagagatggggtttcaccatgttggccaggctggtcttgaactcctgaccttgtgatccacccacctcagcctcccaaagtgctcagactacaggtgtgagctaccacgcccggcccagcattttataatattaaaccaccttccatctttacagtattttgaaaattcaaaaagtattttcccatatattattatcttactgtgggtccctcaacatgggaagcattgcttagtttggaaattcgattccttgattttagcctctcttttccctggcgatgttttcagtctattgagctgttctttcccagatgactaaatttgaaactgtggttaggtgggggagtgggtggcgcaaggcagggttgctgtaaagtaaaacgttaatcagacttttaaagctgaaagggatcttagtggtctctagctcttttattttacagataaggaaatagaaacattgagattaattttaatatatgggaacatgttaagcttcaggcacaatttargtcaatcaattaaattttattcatattttactgggtatcagacactgctaggtgttaaaatttatagtctggtctattttcgagtcacactggaccatttaaaaaattgatacataatgattgtacatatttctggggtacaagtgacattttgatatattcatataacatgtaacaatcaaattagggtaattagcatatctatcacttcacacattgatcatttatttgtattgggaagcttacaaataatcttctagctattttgaaatatatggcaaattataactatagtcaccctactgtattatcaaacactgtaatttatttcttctatccaacttatttttgtatccattaaccaacttaattagttcccccaactcccacaatgggccatttttgattgtagagtacaatatgaaggctctggtccaactgagaaaatagtatctgatataaaaaaaaaagtgtaattctaaaagccttttagtaaagtaatataaatagcaaatctccctcctgagattaaaatgtagtaacactactttttctaaaattcttgtaaaaaattgttaatgaagggattgatatagcttacttttatatctgattattttacagcttacagtgcaccattttaaagattttgtgcartcttgcaggaaattccaggactggttaatgtatcatgaaatatttatgaagcattggtagtatgtgcagcatttcataaaaaaggtagtcccatagaggactcaaaaattgctgaaaaggatgtggatttggccctttcacagagcttgtggaggaaggtgatctcaggggcagccatgtatctgcaacttaaatcagttatgttaaccagggaggaacttgttattttaattttggaaaatattttcttcatatcgatggaaatttccttaaccttagattttattttcttagagtctctgttacaaattaagaggaaggaaaaaaaattgaggacttggtttcatattacatgttttaagaagaattcttatttttaatttaaataaaattgacttcataaattctgattaaggaaaaaaaacacaaagaacagcctttaacagatacttgctgatgacttatctttagcagaatccagatagagatgccaagaaaaaaaagaaaaactttcacgttaagattgaatttttattgtagatttcatgtacttttcatgttaagctatgttatgctccttaaaaatggccttttttggatatcagaattaatgtttaattgttcataaatacctttcatcttataaaatgagtacaagtgggtatatgtcaaatttcagatattattagagtacaacttcatattccaattacagcagtaaacatgatctattcgaccttatagtctgcagatggatccgttcagagtaacatgttctgattctgttctgtagtgggcagttttaaacgtcattccctccattgatattaaaatatttattactgaccttcaggtgatttatagtttatttggaaagatgacatgtctcgggatgggtggtggaggggtggaaacagctacccttagatgaatgagaccaataaaacaagtgatgtaggatgtgaggggtgggagaggcgctttgggatggggtagccggggaaggctttaggatggagaagtgatgaggaaagtgaagctggagtgagactgcctggtttcaaatgctggctctgccacttttttttaaattttattattattatactttaagttttagggtacatgtgcacaacgtgcaggttagttacatatctatacatgtgccatgttggtgtgctgcacccattaactcgtcatttagcattaggtatatctcctaatgctatccctccccccstcgccccaccccacaactgtccccggtgtgtgatgttccccttcctgtgtccatgtgttctcattgttcagttcccacctatgagtgagaacatgcggtgtttggttttttgtccttgcgatattcttaaggttggtgtgaggattaggcgggagaggagcacaggccctggaggaaagggtatgttggggtttagtgcggctgcccttgctgcagggcagggcagtcagagagacacggaagacatcatgtctgcctgagtacttgagcctgcaggagatcgtgccggaagcttgctggaggcaaattgcagagggactcttacatgtctcagaatgtgaactcgccagcaaagagccatggatggattttgagctggagagtaacatagataaatagtcttttcccccgcaaaaaaaaaaaaaaaaaaaaaaaaaaaaaagccttaaagagtagcatttcttcttcttttttaaaatatagagatgaggtgtcactatgttgcctaggttagtctcaaactcctgggctcaagcaatcttcccacctcggactcccaaagtgctggtgtgaggagctactgtgcctggccccctttgttcgttccttcgttcctttcctccctttccttcctttctttcctttccttgctttcctccctcccttccttccttctttcttcttcagaaatgcccaatatctgaattaggctgactttaaatctgttaatgttttggtttttctgagtggatttgtagtttgctaatatttccttaaagatatattatctccattccattcttgtcacttttcttaacttgatttaacacatgattaagygatgattgactacgagaagtggcagagtattgcagttccaagcgcagactgtggagccagcctatcttggttcaaatcccagcctttctgctccctaactgtgtcatgttaaaccatttcacagtgaagtttctatttctgtgtacctcagcgttctcatcagtaaaagggagatagaacctgactcaacagagttattgagaggattgaatcagtattaagcaagtagaacaatgcgtgcatccacagtaaggcataggtagatgttattaaataagcataaaggtctgttctaggcaatgaagaatgaagaagtgtacttgcctgagcacttgagtctgagtgggagatcctgccagcagctctgtggagctcgcaccctagagaagagagttaggattgtttactaacttgcatgtaataaaaaatgccctgcagagaattaactccggtggggcgggggggtggggggggatgtaatctggtgtttggggggcttgattaaatattgatgataagaatggtttgcaaagacttcatctactccttatactctgggaggctctctgccctttctgggatgcctacacttgagtccagcatttattaggctttgtkagttcatactgacattaacaaacactaaggttaagttgctgttcagttttgaactttgcaagtcttcaaaacaatgactctggggattaaagacgtactccctgcatagcataccctactattctgttttattgtctttaccagcttgttcaaagtaactttgaagtttctctggttgtttctctaaaaggaaagaaaaatgtttctaaatggctgtcaaattagctgctaagcaaaatatatccttatattttaaatatctagactatccaaaagcccttcattctaatgttaacaaattggggttgtaatgtaaaaaatcagttaagtttctcccagtgctggtcaataacttaacttttagaaactacccattatgagtaactatttttaaaaatcactatctttccccataatggtccaatttctctttcaagtatgatgcatttcaagtcttctgcaaatgaaaaaaactctacatacaatctgtgaacaacagctccaaatgaagagcagagtcaattgaataccctgttctttatcttgcttcacatgggagggcagtgagtaatattaggggaagaacatgctattgtgtctggaattggttccttctggtggattcttggtctcactcacttcaagaatgaagccgcagactctcgcagtgaatgttacagttcttacagatggtgtgtccagagtttgttccttcagatgttcagatgtgtccagagtttcttccttccagtgggttggtgatctctctgacttaaggagtggagctgcagacctttgcagtgagtgttacagctcttaaaggtggcgcctccggagttgttcgtttctccccgtgggttcgtggtcttgctgatttcaggaatgaagccacagaaactcacactgagtgttacagctcataaagatagtgcggacccaaggagtgagcagcagcaagatttattgtgaagagcaaaagaacaaagcttccacaatggggaaggggacccgasccagttgccactgctgagcaggttgcccttgctggcttgggtggccagcttttatttccttactgggccctgcccacatccttctgattggtccattttacagagtgttgattggtccattttacagagtgctgattggtccattttacagagtgctgattggtgcgtttacaatgctttagctagacacagattgctgactggtgcagttttacagagtgctgattggtgcatttgcaatcctttagctagacacaaaagttctccaagtacccacctgacccagaagctcagctggcttcacctctcactatgactgttgggattgcagtcctggatttaattacttacaagctttgtgaacttgttcaggtccttgaatatctctagactgtcaaaaatcagtgatcctcagacagtgggattcccatmatctatagcggtgttttttcaggtccagagaacttccatgtcagggcccagaaggtgtctgcagaggtcttctacagcctctgctggcgacctcaagagaagtcagggaaaaggggacatggggcacagacctgaaggtggacagatgttttcctgagttcatcaaaagtatttaatggctagttgggagtatgtgtctttctcggaccttatggctcttgcggtgtctgatctgttttcttctgggtactctgacttcctctgcacgttggctgtctgtggctaccccagccctagcttcataccacttctcatttcagagaactaaagagtttaatgtgctgtttccaaattccacagaaaagagctcctggttgggtccagcctgtgacaggtggctcttctggcatgaggctgtctcctgtggtctaatcagctgagcatcaggaggggtgaggtcacatagaacaaactgggcagctagaggagagcagttttaggtaataaagatgtagtttggaagaaaataattaagaggaaacaattggccttgcaacaattcttgccaagataatcttgtggataaagctagtgaaagatgggttggatgacaatawtaggttaggtggattcccaggtcattgaacaagcaggccagaagagtttcaacagatggctttttacctgcttaaaacaatgtcaccattgttagtgatactggaacaatatccccatgccctagaactctattgttagctttgtcatgttcaacatttttaatcaaaacttggatgaagacacagaagacatccttatcaagtgtgctgagaacacaaagtgagaagaacatagcaagcataatagatgacagaatgaagattcaaaattatcttggttatgcccagtggctcacacctgtaatcctagcatttttggaggctgaggtgggcaaatcacttgagcccaggagttcaagaccagcctgggctgcatggtgaaaccctgtttctacaaaaaatacaacaacaaaaaattagctggttatggtggtgcgtgcctgtagtcccaggtgctggggatgctgaggtgggaggatggcttgagccttggaggcggaggttgcagtgatgcagtgagctgagatcgcaccactgaatcccagcccaggaaacaaggcaagaccctgtctcamaaaaaaaaaaaaaaattatttcgacaggctgaaatgctgggccccaaacaaactggaacttagcaagagtaagcatgaagttttacatttgggatgaaaaatcaattacacatagtcataatggaggtggtttatcttggccttttcagtttgtgaaaagatcttggggttttacttcactacagttttatgtgatctgagggtatgatgtggctgtgaagaagcattaacttagtgctacgctcaatggaggtagagtgtccagtcattggacttttgctttgtcagaccacaactgaaggatgctttccacgtggacacttttttttttttttttaataatacctgctggtgaccaggatggccagtttatatggaatgcattctgaaagtgagaaaacttgaacttgacaacagcaggagatagatggataataacgtagtatttgaatgctgtagtttacagaagagggcttttacttgttctgggttgttcagaatgtggaaccaagacccatgagtggtcattgcgtgaaagtggatttggggtcaatactaataaagaattttgcaacagttagaaccataagaaattgaagtagactactttttctttctttcttttttcttttgagacagtgtctcactgtcgccgaggctggggtgcagtggtgccgtctgggctcattgcaacctctgcctccctggctcaagtgatttctcctgccttagcccctcgagtagctgggattacaggcatgcaccaccatgcctgggtaatttttgtagtttttgtagaggtggggtttcaccattttggccaggctggtctcaaactcctgacctcaaggtaaacaactgccttggcctcccaaagtgcctggattacaggtgtgagccaaccttgtccggccgaagtatactttttctgactcttgtgttgggtgtgtgtctgtgagatgctatggaaagggctcctacattgggcaggaggtttgacaaaattatctctaggatcactttcaacactagaaacctagatttctggaaagacagaagagccttttttcttttcttaatttgtcattaatgtctcagcaaagaagagcatttattttaatatgatcatcggacttgaaaggcttctacagagagctrtgggtacatgtgatatgaagaataagctgagatccatatgcacttgaaaaaccaagaaaattaagagggttcttttttttttctttttttttgagatggagtttcactcttgttgcccaggctggagtgcaatggcatgatctcggctcactgcaacctccaccttccaaattcaagtgattatcctgcctcagcctccccagtagctgggattacaggtgcccgccaccaagcctggctaattttgtatttttagtagagacagggtttctccatgttggtcaggctgggttcgaactcctgacctcaggtgatccaccagcctcagcctcccaaagtgctgggattacaggtgtaagccaccatgcccggcataagaaggttcttaaggcagctatatttaacatataaagcacatacccagacttcagcgtcctgtctctaaccactgctcctactgaatctgcctttttacctggtgcctctgcttttctgagagtccttggataacttttgggtactgtattaaaaaccttcatctgttgtttccacaacgtcccctgattatgtctgcatgtagcagttcatgttaaggaggcttttatgggctagcctgggactctagccatgacgtgaagcaatacttttgtgggaaatgtatttcaggcttccaacagcgtgtattgacttttgaaacacgttccattgcaaagctggaatgacccatgtttctcttctaatgtaccacttcacacccaccttggagctgttcctaaactgggttctggtcttggaagccttctttgcaccttcctgccaacratggcagttcctgaaattctgacacttacatgaatcaagacttcctgtttctcttccactgctctatctagaaatgaattttaagaggcttttcttccccaaaaagaatttgaagaatcataaataactttacatgatatagtacaataaaaaacaaaaacatggagaatggttctgtggtggtgtttttgtttgtttgtttttttttttttgagatggggtcttgctctgttgccccagctagagtgcagtggtgcagtcatgactcacagcaacctcaaactctcagactcaagtgatcctcccacctcagcctcccaggtagctgagactacaggtgtgtacaaccacacycgactaatttttgtattttttgtagagatgagattttgccatgttgcccagggtcatcgtcacctcctaggctcaagtgatcttcctgccttggcctcccaaattgttgggattacaagcgtgagccactgtgcacagccagttccatgttttctrtgccagtagttcacttgtgtgcatgcctgaaatcatcacatgtggatttaaggtttttgttttggtgttcttagcttcttaggcatttaatccttgcattagaaggtgtaggagataggcatggatatttttaaatgatggaccrgggaaagctcctggaatggttatattattcaggattcttggttgaagtaactaaaatggacactggtttgtttaagcaaaaggctgtggggcagtttgcagaagtgtggagaggcaaggttggaatatggacaggtataggagaggccagaaggccagagccacagcccaaatcactctgcagagactggtgagccagccgctaaggcctgctctggtgcagcatgctgtagctgcaacaactgtcactggccatgctctggtgctgccagtgtccctgtctgtagaatgaattcttcactgtcaccccagttttttaaaaaaatattttttcatcttttattttagattctgtgggtatgtgtacaggtttgttatgaaggtatattgtgtgatgctgaggtttggggtgtggttgaacctgtcattcaggaagttagcagagtacccaataggtaggttttcaattcttgtccctccccttgtattctccagtgtcactccagattttttggcatcaattgatctttttttttctttttctttctctcttctttctgcctttgccctttgcctttgccttgcaacaagttctcactatgttgtccaggctggtctcaaactcctgggctcaagcaatctgcccacctctgcctcccaaagtgctaggagtacaggcatgagccaccatgccaggcccaattggtctgcattgaagttgcagaggggagcttctgattgaccaggccttggtcacatgctcaggcctcacagaggaaggtgggtggttgtcaggggcgtctcactttttggtttctgtagtggcgggtgggcactgccttccacaagatgaatatggtgggaattcatcaaacgaaaggtatctcaaaaaatgttaggtagctaaaaaaaaaaaaaaaaaaaaaagtcagatgttagatagttaaaagaaaatggctagcgaaaaataataacttttgtttacatttctgtattcatttatgaaaaggctcaacttaggttagagcagggtttctaatctgtggcaccaatggacattttttgttgtggggcctgtcctgtgcattgtagggtgtttagcagtatccttgaccactacccactggatgccagtggcacctaccccacttttgacaatcaaaaatgtgtctgcacattgccacatgtttccttgggggcaaaattgcccccacctgagaatcactgggctagaggcattctcaagccatgggttatgcttttatttatttatttacatatttattttttgagaaggagtcttgctctgtcgcccatgctggagtgcagtagcgcaatctcggctcactacaacctccgccacctgggttcaagcgattcttctgcctcagcctcctgagtagccgggactacaggcrtgcaccaccatgcccagctaatttttgtacttttagtagagacagggtttcaccatgttcgtcaggccggtctcgaactcccgacctcagtggatccacccgcctcggcctcccaaagtgctgggattacaggcatgagccaccatgcctggccgggttatgcttttatagccttgcattaatggctttatcacaggaatggatcttatattattgtccttggagagggacaaagcttttctcatgatggtgcccttcccctgcatgtgaatgtctgaatcttcagtattctcagccttcagtgtacctgagaatcaactggagagctgtttgaaggatgccaatttctgggccctacttcatacactttaattctgtgggtctgaggctcaggaatctgcaagttttaacaactttggtgattcagatgcaggtgggtgatggactacactttaaaaaacacatggttacttcattgagtgtcaacctcaaaaacacaaaggtgtgttttttcaaaaagaagagatatgtctgggtgccatggctcatatctgtaatcccagcaacttgggaggctgaggcagaaggatcgtttgaggccaggaatttcagactagcctgggccacatagtgatactcagtctcttaaaaaaaaaaaaaaaaagggccaggcgtgatggctcatgcctgtaatcccagcactttgggaggcagaagtgggtgatcactcgaggttaggagtttgagaccagcttggccaacgtggtgaaactccatctctactaaatatacaaaaattagcygggcgtggtggtacacacacataatcccagctacttgggaagtggaggcatgagaatcacttgaayccgggaggcggagcttgcagtaagccaagatcacgccactgcactccagcctgggtgacaggatgagactctgtctcaaaaacaaaaaataacaaaacaaaaataattagccagacatggtggtgcacacttgtagtcccaattacttgggaggctgtggcatgaggattgctggagcccaggagcttgaggctgcggtaagccatgatcatgccattgtactccgggctggttgacataggaagggatacaattttaagacttgcaaatctttttagttattgattaaaaagaagcaaggtaaagatgctgtctgtccttaggcttttttggaaggggttgtgtggaagcagctttgacacgtgacaccagcacttaacgcccttcatcatcatcagcagaagtactctctctcgttttttagctctgatttgccttacatctttctcaggaaaggatcgtttactctccaccccyttaagtattagagaaaactcaaggggaggtttttatgttttcacgatctctgaggtctcttcactrgtcttgtttattggtcttgacttcctaaccccggcaggaagagggaacactgaccctcagcagcactggctttatttttcatgtagagcctctatggttggatgttgtccaacattcagttgttccccaggaacggaggagacaacaggtaggtaatacctgtgacaaagctgtggacctcctgagcctctaagcccctctcagaggaagtcttaaatctatgaaagaagatcctatccactgacaaagcatcttgtagtttcaaagtatgtttggtggcttctttgagctacttggttctattttcactcctctatctggggctagtcagtgatatttccgatagcaatttttctaaaactcctatcaggcaattttgccaatttttttttaaatttttaaaatttaattaattaactttttttttttttttttgagacacagtttcgctctgttgcccaggctggagtgcagtggcgtgatctcagctaactgcaaccttgccccccaggttcaagggattcttgtgcctcagcctgccgagtagctgggattacaggtgcccacccccacgcccagctaagtttttgtattttcagtagagatagggtttctccacgttggccasgctggtcttgcactcctggcctcaagtgatctgcccacctcagcctcccaaagtgctgcgattacaggtgtgagccaccgtacccggtgatttttgccaatttaaagcctttgatagttctccattgattacagaacaaattctacccttaatcaagcccctactctacctttccagccattcctcctcatgctgcctgtgttccaggctcaccaaactatcctgaggacgtttaactctctgtatactaactttattcatacgttgttattaactatactgacaacctgtatttcagactcaccagactctgttacagactaacatgcccagctcacgaactgggtgcctgctaaatattttttctaaaaagtgsatattggctgctaacatgtaaaatctcatgagttttaaatatctgggctgggcgtggcgcctcacacctgtaatcctaacactttgggaggccgaggcgggtggatcacctgaggtcaggagttcaagaccagcctggccaacatggtgaaaacccrtttccactaaaaatacaaaaattagccaggcatggtgatgcacgcctgtaattccagctacttgggaagctgaggcaggagaatcacttgaacccgggaggcagaggttgcagtgagcggagattgtaccactgcattccagcctgggtgacagagccagactctgtctcaaaaaaaaaaaaaaaaaaaaaaaatccgtacttttagtttcttctgaaataccaaaagacgtgacagtattgtgactgcrttcctaaatggtaatggtcagctcttgccctgagacaggatgtgttctatctatagccatcatggaaaaaggtaaggggaaatactgtgaaactttcccctcctatttcccacaagagggcaatctaatctctaagaaagtaaaagggactggcgttgcaaaatctgctattatagcctggctttgttacccccgcagtggtgaagatctttaggcacccacctgcatttcgtgtgctgaattgccatgccttatgccttatgccttgtgctgttatttagtctttcatcgcttctcggccttttggctaagatcaagtgtatttagtctttcacaaattccttttttttttggtgtggttcccctccaggatctatctggaaggccagtttgatgaaaaggcatgcaagaggtgcctgtgtgtagcttctggagccaccttcagcctaggtggaggttgtgaaaggttggcagaggcctgatgaggcagggttgtttctagagaaaagcgtgacctatagaaacaacctcacagcctagcattacttgatggtgctttttgttggtgcagaatcttgatttctgtcagcaccctgagagagcagccccctgagctccgcagcgcctcccttaatattaacctggctaatacagactgctgtgtaaactgaaatgccaatttatttagaatgagacagatctactgagagtgcctagaaactcatttttgctggtcagagtatactttctgtttagaaaaattaaaagtaarccaaaatataatcacaggttgcttgtctgagttctaagcaaggggactgctgccatttgcacgttctgatgtatccttctgagattagggactgggtgggttgagcccctctgccaggcctccttatccagacagtgcttgtaggtaccttgctagagttgcccatctaactctgtgcccaccgtcccccatatggttcgtgccacattgacatatctttagatataccaacaccacaaagttgattacattcacatgtagcatttttcactctaggtcctatttacagttgtctattacagattattttaataattcagacctaaggatttggggaggattaggggtgaggcgccctagcgcctctaactgtccctaaagagattgcagaggtttcagaaagtaaaactagctcttaacccccagatggtaagtggtatagatgagagaaaaaggctctaaatcttattttctctagtttttcttctctttatttgcctttggtcaaaagaaaacaaacatctatttgcctcatcttttttcctctctcattaaaaaaaatctatccttgccgggcgtggtggctcacgcctgtaatcccagcactttgggaggccaaggtgggcggatcatgaggtcaagagatcgagaccatcctggccaacatggtgaaaccccgtctctactaaaaatacaaaaattggccgggcatggtgacctgcgcctgtagtcccagctacttgggaggctgaggcaggagaattgcttgaacctgggaggcagaggttgcagtgacctgagattgtgccactgcactctagcctggcgacagaatgagactccatctcaaaaaaaaaaaaaaatctatgcttaataatggtaaaattgaaatggtttagtaagaatatggaatttgagaaagaagaggagggaggaagaaagagctgaagtggttcgtaattggcatacttagattttgtgttatttaaaaactggatttggttgttaaaactggtaattttttccatcagtttgggttgaataacatagccatattccattaggtaaaactaatactgagtcgrtgtatctaccyatctatccaaatcctagttttgaccctactttccaccaatttgccgataggatgttgacttagccttgggccctacaatttagggtttagctctgggcacacaagaaacttggatgcttatgaaaactttgggtaagttttattcatgtgctcaatttaggggacaatctgcatgtgcatcgggcgtgtctctttcagccatgttttgtttaagtcatctatggccttggggttcccagtgcaagagatgaagcagggcatgagtgtttagtgacactgtggggttgtgcccattcttgcctccctcgttagaaagtggcaatgggctcaaatgcctcagcaggtagtttgataggatttggagaaatgggacagtcagaaaatgagttatttgatactgaagttcagtcacgcatgtatttaaaagcctttttagtgctctgaacttggcttaggtttagggtgctattagggtaagtagaatacttaacttttacttttttagggaatttaaaatctatgcaactgaaacatctacataaaacaattagaaagcaatgcaggatactgtagtgtagtgaagaggttagagactctggagttagacagatgtgaacttttaaaaacctttctgggccttagttccctgatgtgtaaaatggggatattgaagagattgtaccaggtaatgtatgtcaagcacttaatgtacagcctggcatatagctaaatgttcaatatttggtggtaattatagtaattgggtctaataaaaggtttcctttatgtggtcctattgagaaaggaaaggtttcccctcctcactgcccctggtaatcacattgaaagaaaatttcctagaatactgttgtataccttcttgatttctttgataagcttacctgcctgtaattgtcttttttaacccrttttwaaaataagttgcttctattctggagagtcagctagccaaataatatatttctatataaayragtaaagagtacagaagggcctttaccaggactaacaagaaagggctttgggacaacttcastgtttcgggtggtcaggatctttctgctcctaacattcttggccaggttctaaaagactatagggtttcttttttttttttcctagaaatatggaacctggttacatgggatatttgtttagtaggaccagaggtgtgtaaagaaacagcaratagcccctggattatcttttatttcccatcagaagggagcttgatggaaagactgattcagaagcatgcaggaaatgtgggttccagccctaaaaatgtggccatgaccatgtgccagggccacccctctactgcacgtggcactggttgcctgaggagktttagaacgtcctgggaagggtaaggtgcagataagtgaaaataaaccttactaggtttcaacttttatataaggtgtttttgttgttgttgttgtttttttttagattaaaaatgtaggccaggcaaagtggctcacgcctgaaatcccagcactttgggaggccaaggctggtggatcccttgagcccagaagttcgagatcagcctgagcaacatggcgaaaccctgtctctacaaaaaatacaaaaaaattagccagatgtggtggtatgcacctgtagttcctggtacctgggaagctgaggtggaaagatagcttgagtccaggaggcggaggttgcagtgagcagagatggtgccactgcactttagcctgggtgacagagcaagaccttgtctcaaaaaaaaaaaaagaaaaccccaaaactttaatggacttcacctctttagacggtgaatattctttttgaggtgatggaaattgcatgagtaaaggaaaatctgactggctttggtaatgaaagagtgtaagcaggtcaggatttctcacagctgttttagtaggcagagtgcttccacttggggaataacaccacaagaaatctcaattttccctgatgcttrttccatttcattctgtgtactcctctctgcacagatttaaataccaaattgtttctattacttcacagtttccacctggggtctcgggagtttgcccagagcccaaaaagcatctgcagcttccccctttttgccacgtcttataacttgggggcttctttttgagctgtttatatcatcatggctatatctccgggtattcctagttgagtttttagtttcaactggagctgcaatcacagaagtggcaggactccccatgcttaaaaattaacctcagcttggaaaattttctgctgtgatggttggggtgacttagttttgaaactccctttttacctttcttagctctgctgggattaaattttttttaaatttggcagatttgaaaaacaatgtgaagatttttttttactctaaaaatacagaaaatagttttagcccaatcttgtttgcatagtttttattccatgaacacaggggaggaaaattataggcaagacagatttaattctgtctgctgttgctgtgtgggggtactgattaaaataaattatatttgtttatttgaaagcgaactagacatttttggaaataatagtttgctgcatatatgaatgaatttggactaaactgacccatcaattagccagatgatcaattgctttcaatttggtgattaatgaacttccggtgctgtgatcagctttcccctcgctgagttgctaagttgcatgcatgctgaaaagggctcccagagaacaggtatgtttgccagacacagttgctcctgkacctgcccttggaaaaagtcccctgcagtggctgggggtcccctccttctcctttctgatttgycctgtttcttatccagtgtcgtcatagtcgggctgagtggggttagtatgacagcacatgcacacactttaaggagacctcacagaagtattatagaagactttacagctggcacagttatttggggattgttttgctaaggaaaaagaggaagataaatattcgggtaggtatctagcattttctgcctcaatcactcaactcttcaaatatggcaagcctctctcctcccctgttcaccctcaatttcttaccatgggcttcaaaatagctttctgctccttccagaaattgccattttgatttgtgaaagtaaaggtcagttcaatctgagaatggccctattgcttggatctttaaaaataacaactgagtggttagctcaaagggaagttcagtggaatttgacactgcatttcgtcctttactgagttgataatttagatcagaaatcagcaatctttttctataaaggaccaggtaggctgggcatggtggctcaggcctgtaatcccagcactttgagaggccaaagtgggcagatcgcttgagcttaggagttcaagatcaccagcctgggcaacatggtgaaaccccctctctactaaaaatacaaaaattagccaggtgtgatggcatgcacctgtagtcccagctcccagctacttgggaggctgaggtgagtggatggcttaagcctgggaggtcaatgctacagtgagctgagacggtgccactgtactccagactgggtgacagagaccctgtctccaaaaaaaaaaaaaaagacctggtagtaaatgtttgaggacttgcagactgtatcccttgtgttgtgactattcaactctgtctttgtagtacaaaagtagccatagacaatacataaaagaacaggcatgctgtgttccaatgaaacttaatttattaccttgaaatggaaattacatacaattttcacgtgtcgtgaaatatccctgttaatttttcaactattttaaaatgtaaaaattattcttagctcataagctgtagaaaaacaggtagcaagctgtagaaaaacaggtagcaagctgaatttggctctaaggccatagtttgttgactcctgattttagatggtgattgtagaaatgagtcctaagaaaagaaagtaatgttttgctgttctaaacagaagttggttacctagggtaaaactctggaatggcacagagggaaggagaatctaaacttctaaaagaagggagtcagacttagttttcaggtcacagattctaaagtgtttaaagatatattgctagatccaaaaagtccgtattttaaaaagttgaacttctttgtttttttaaatgtgataaaatatgtaacttaaaatttaacattttaaccagtttattttttcatttttttttgagatggagttctgctctttgaccaggctggagtgcagtggcacgatctcagctcactgcaacctctgcctcccgggttcaagcgattttcctgcctcagcctcccgagtagctgggactacaggcgtgcaccaaaacgcccagttaatttttgtatttttagtagagatggggtttcaccatgttggccaggatggtctcgatctcttgacctcatgatccacccgcctcggcctcccaaagtgctgggattacaggcatgagccacagcacctggtctattttttttatttttatttttgagatggagtctcactgtgttacccaggctggagtgcagtggtgcaatctcatctcactgcatcctttgcctcccgggttcacgtgattgtcctgcatcagcctcccgagtaactggggttacaggtgcacatcaccacacctggctaatttttgtatttttagtagagacggggtttcaccatttggccaggctggtcttgaacgcttgacctcaagtgatactcctgcctcagcctcccagagggctaggattataggcatgagccaccacacctggcctcattttaaccagtttaaaaatgtacaattctgtgatatcaaaacattgacaatgttgtgcagctgttaccactatttgtttccagaactttttcatcatcccaaactctgtacttgtttaaacaaaaataacttcccattacccctccctsccatcctgccctggtgtcctttattgtacttactgtctgtgaatttgcctattgcaggtacctcgtaagtggagacatacaatatttgttctgttgtgaccggcktatttcacttagcaatttgtctctaaggttcactcatgttgtagcatgcatccaaattttatttctttttaagaccgaataatctgttgtatgtgtttaccaccacattttgtttatccatttatctgttgatggacatttgagttgtttctacttctggctattggaataatgcttctgcgattggtctacaggtatctgtttcagtccctgctttcarttcttttggatacatacctgaaagtcgaattggtggatcatagggtaattctatgtttaactttttgagaaaccatcatactgttttgcacagagactacgccatcttacattcccaccagcaacgcactaggattctaatttttctacagccttgccaacatttctctttcttttttaaaataataaccatccaaatggttgtgaagtggtatttgattgtgattgtgatttgcatttatcctaatgactagtgatactgaaaatcttttcatgtcctttttgccgtttgtatatctcctttggagagatgtctactcaaggtgggttgtttgtttgttktttttgtttttgccattttaaaattgattttgtttttcatgggttgtaggaattcttacatattctggatattaatcccttatcagatctgcaaattttttcccagcctgtagcttaccttttcactgtcttgatagcgttgtttacacagaagtttctaatttcgatgaagaccaatttatttttctttggttttgtgcttttgatgtcatagccaagaaatcattgccaaatccaatgtcatgatttttccctatgttttcttctcagcgtttgtatagttttagttcttatgcttaggtctttgatccattttgarttagtttttgtatgtggtgttaggtaagggtcccacttcattcttctgtgtgtggatatccaacttttcctgtgccatttgttaaaaaaggctgtccttcccacattgaatagtcttgatacctttgttgaaaactcacttaaccatatatgkgagggtttatttctgggctctattctataccactggtctatatgtctgtccttatgctagtatcatactgttttgattacatagctttgtaatcagttttgaaatcaggaagtgtgggtctttatacttggtcattttttttttctccaagattatttcagctgttttgggtcccttgagattcaatatgaacttcagaataggattttctgccaaaaaggccacagattttgatagggcttgattgaatctgtagatcactttgggtaatattgtcattttaacagtattaagacttccagtccatcaacatggggtgtctatccatttatttgtcttctttaatttctttcagcaatgtcttgtagttttttgaatgtgaaagtctttcacttccttggttaaatttattcctaagtgttccattctttttgacattattgtaaatgaaattgtttattttcagattgtcattgttagtgtgcagaaattcaactgattttagtgtgttggttttgtaccctgcacctctttcctgggttcatttattagttcaaagagtttttagaatttttttcatgttaaatttgcatttctttttattattattttactctaagttctagcgtacatgtgcacaatgtgcaggtttgctacatagatacacatgtgccatgttggtctgctgcacccatcaactcatcgtttacattaggtatttctcccagcgctatccctccccttgccccctactccacaacaggcccccagggtgtgatgttccccgccctgtgtccaagtgttctcattgttcaactcccacttgtgagtgagaagttgtggtgtttggttttccgtccttgtgatagtttgctaagaatgatggtttccagcttcatccatgtccatgaaaaagacatgaagtcatccttttttatggctgcatagtattccatggtgtatatgtgtcacattttctttatccagtctattattgatggacatttgggttggttccaagtctttgctattgtgaatagtgccgcaataaacatatatgtgcatgtgtctttatagtagcatgatttataagcctttggttatatacccagtaacaggattgcaagttctagaaccttgaggaatcaccacactgtcttccacaatggttgaactaatttacattcccaccaacagtgtaaaagcattcctatttctccacatcctctccagcaactgttgtttcctgactttttaatgaacaccattctaactgacatgagatggtatctcgttgtggttttgatttgcatttctctaatgaccagtgatgatgagcattttttcatatgtctgttggctgcataaatatcttcttttgaggagtgtctgttcatagcctttgcctgctttttgatggggttgttttttttgttgtaaatttaagttctttgtggattctggatataagtcctttgttagatggatagattgcaaaatttttctcccattctgtgggttgccaactgtgatggtagtttcttttgctttgcagaagctctttagtttaattaggtcccatttgtctattttggcttttgttgccattgcttttggtgttttagtcatgaagtctttgcccttgcctatgtcctgaatgatattgcctaggttttcttctagggtttttatggttttaggtcttacgtttaagtctttaggccatcttgagtcaatttttgtttaaggtgtaaggaaggagtccagttttagctttctacatatggctagccagttttcccagcaccatttattaaatagggaatcttttccccattgcttatttttgtcaggtttgtcaaagaccagatggttgtagatgtgtagtgttatttctgaggcctctgttctattccatttgtctatatgtctgttttggtacaagtaccatgctgttttggttattgtagccttgcagtttagtttgaagtcaggtagcatgatgcctccagctttgttctttttgcttaggatagtcttggctatgtgggctcttttttggttccatatgagctttaaagtagttttttccaattctgtgaagaaagtcaatggtagcttgatggggatagcattgaatctgtaaattactttgggcagtatggccattttcacaatattgattcttcctatccatgcgcatggaatattcttccgtttgtttgtgtcctcttttatttcgttgagcagtggtttgtagttctccttgaagaggtcctttacatcccttgtaagttggattcctaggtattttattctctttgtagtaatagtgaatgggagttcactcatgatttggctctctgtttgtctgttctttgtgtataggaatgcttgtgatttttgcacattgattttgtgtcctgagactttgctgaagttgcttatcagcttaaggagattttgggctgagatgatggggttttctaaatatatagtcatgtcatatgcaaatagagacaatttgacttcgtctttgcttaattgaataccttttatttctttctcttgcctgattgccccagcagaacttccaatactatgctgaataggagtggtgagagaaggcatccttgtcttgtgccagttttcaaaggkaatgcttccagtttttgcccagttagtatgatattggctgtgggtttgtcataaatagctcttactattttgagatacattccatcagtacctagtttattgagagtttttagcatgaaggggtgttgaattttattgaaggccttttctgcatctattgagataatcatgtggtttttgtctttggttctgttcatgtgatggattgcatttattaatttgcctatgttgaaccagccttgtatcccagggatgaagctgacttgattgtggtggataagcatttgatgtgctgctggatttggtttgccagtattttattgagratttttgcatcgatgttcatcagggatattggcctaaaattctctttttttgttgtgtctctgccaggctttggtatcaggatgatgctggcctcatagaawgagtgagagaggagtccctctktttctgttgtttgaaatagtttcagaaggaatggtaccagctcctctttgtacctctggtagaattcggctgtgaatccatctggtcctggactttttttttggttggtaggctattactgcctcaatttcagaacctgttattggtctatgcagagattcaacttcttcctggtttagtcttgggagggtatgtgtgtccaggaatttatcgatttcttccagactttatagtttatttgtttagaggtgtttatagtattctctgatggtagtttgtatttctgtgggatcagtggtgatatcccstttatcattttttattgcgtctatttgactcttctctcttttcttctttattagtctggctagtgggctatctrttttgttgatctttccaaaaaaccagctcctggattcattgatttttttgaagggttttttgtgtctctatctccttcatttctgctctgattttagttatttcttgcctttgctagcttttgaatttgtttgctcttgcttccctagttcttttaattgtgatgttagggtgccgattttagatctttcatgctttctcttatgggcatttagtgttataaatttccttctacacactgctttaaatgtgtctcagatattctggtacgttgtgtctttgttctcattggtttcaaagaacatctttttttttttttttgacggagtcttgctctgttgcccaggctagagtgcaatgcgcgatctcggctcastgcaagctccgcctcccgggttcatgccattctcctgcctcagcctcccgagtagctgggactacaggtgcccgccaccacacctggctaattttttgtgtttttagtagagacggggtttcactgtggtagccaggatggtctcaatctctggacctcatgatccacctgcttcaacctcccaaagtgctgggattacaggtgtgagccaccscacctggcttcaaagaacatctttatttctgccttcatttcgttatgtacccagtagccattcaggagcaggttgttcagtttccatgtagttgtgcagttytgagtgagtttcttaatcctgagttctaatttgattgcactgtggtctgagagacagtttgttgtgatttctgttcttttacatttgcccaggagtgctttacttccaactatgtggtcaagtttagaataagtgtgatgtaatgctgagaagaatgtatattctgttgatttgggttggagagttctgtagatgtctattaggtctgcttggtccagagctgagttcaagtcccagatatccttgttaattagacagatctcgttgatctgtctaatattgacagtggggtgttaaagtcttccattattattgtgtgggagtctaagtgtctttgtagatctctaagaacttgctttatgaatctgggtgctcctgtattgggtgcatatatatttaggatagttagctgctgttgttgaattgatccctttagcattatgtaatggccttctttgtctcttttgatctttgttggtttaaagtctgttttatcagagaccaggattgcaacccctgcttttttttgctttccatttgcttggtagatcttcctccattcctttaatttttttatttttatttttttaattaaaaagtaaactttaatatcaaaaatgcaaacttggggagggcagaaggatcacacacaaggctgtcacttcacacttggagggttgcacagtggctgggcagaggtgcttctctcttcccagatggtggggcgtrtgggcagaggtgctcctcatttcctagaggggggcagctgtgcagaggcacccctcacttcccagacagggcagtgggcgggcagaggcactcctcacatcccagacggtggggcggcctggcagaggcattcctcacttcccagactgtgggcggccaggtggaggygctcctcacttcccagtcagttgggtggccgggcagaggggctcctcacttcccagacagggtggtggctgggcagaggcrctcctcacttcccagagggtggggcggctgggcagaggcgctcctcacgtcccagtcagttgggtggccrggcagaggcgctcctcacttcccagtcatttgggcgaccgggtggaggcgctcctcacttcccagacagggtggcggccaggcagaggtgctcctcacttcccagacagtgggacagccggacagaggtgctcctcacttcccagatggtggggcggctgggtagaggcactcctcacttcccagatgttgtggcggctgggcagaggcgctcctcacttcccagacagtgggacagccgggcagaggtgctcctcacttcccagatggtggggcggctgggtagaggcactcctcacttcccagatgttgtggcggccgggcagaggcgctcctcacttcccagatggtggggcggctgggtagaggcactcctcacttcccagatgttgtggcggctgggcagaggcgctcctcacttcccagacagtgggacagccgggcagaggtgctcctcactctccagatggtgtggcrgccgggcagaggcgctcctcacttcccagacagtgggacagctgggcagaggtgctcctcactctccagatggtgtggcggccgggcagaggcgctcctcacttcccagacggtgtggcggcckggcagaggggctcytcacttcccagatggtgggacagccaggcagaggcgctcctcacttcccagatggtgtggcggccrggcagcggcgctcctcacttcccagacggtgtggcggccgggcagaggcctcctcacttcccagatggtggggcggccgggcagaggtgctcctcacttgccagatggtggggcagccgggtggaggcgctcctcacttcccagatggtggggcggctgggcggaggtgctcctcacttcaccgatggtggggcagccaggcagaggcactcgtcacttgccagccggggcagtggccaggcagaggcactcctcacatcccagacagggcggtcgctgggcagaggcactcctcagatcccagacggctccatccctttattttaagcctgtgtgtgtctttccacctaagatgggtttcctgaatacagcacacaggtaggtcttgactctttatccaatttgccagtctgtgtcttttaattggagcatttagcccatttacatttaaggttcatattgttatgtgtgaatttgatcatgtcattatgatgctagctggttattttgcacattaattgatgcagtttcttcatagcatcagtggtctttaccatttggcatgtttttgcagtggctggtactggttgttcctttctgtatttagtgcttccttcaggagctcttgtaaggcaggcctggkggtgacaaaatctctcagcatttgctttctgtaaaggattttatttctccttcacttattaaggttagtttggctggatatgaagttgcaggttgaacatgtctttaagaatgttgaataatggcccctttttctggcttgtagggtttctgcagagatatctgctgttagtctaatgggcttccctttgtgggtaacctgacctttctctctgggtgcccttaacattttttccttcatttcaaccttggtgaatctgacaattacgtgtttggggttgctcttctcatggagtatctttgtggtgttctgtgtacttcctgaatttgaatgttggcctgtcttgctaggttgggaaagttcttctggataatatcccgaagagtgttttctaacttggttccattctccccatcactttcaggtacaccaatcagacatagatttggtcttttcacatagtcccaaatttcttggaggctttgttcatttcttttcactcttttttctctaatcttgtcttctcactttatttgattaatttgatctttaattgctgatattctttcttctgcttgatcaaattggctattgaggcttgtgtatgcttcatgcagttctcttactgtggttttcagatccaccaggtcatttaagctcttctctacataggttattctagttagccattcatctaaccttttttcaaggtttttagcttccttgtgatggtttagaacatactcctttagctgggagaagtttgttattaccaaccttctgaagcctacttttgtcaacttgtcaaagtcattctccatccagttttgttccctggtgaggagttgtgttcctttggaggagaaagggcattctggtttttggaattttcagcctttctgctctggtttctctycatgttagaggttttatctacctttggtctttgatgttggtgacctacagatggggttttggtgtggatgtcctttttgttgatgttgatgctattcctttctgttggttttccttctaacagacaggcccctcagctgcatgtctgttggagtttgctggaagtccactccagaacttgtttgccttgtatcaccagcagaggcttcagaacagcaaatattgctgactgaaccttcctctggaagcttcatccttgatcggcacccacctgtatgaagtatctgtcagcccctactgggaagtgtctcccagtcaggctacatgggggtcagggacccacttaaggaagcagtctgtccgttatcagagcttgaatgccatgctgggagaaccactgctgtcttcagaactatctggcagggacatttaagcctgtagaagctctctacttccttttgttcagatatgccctgcccccagaggtggaatctagagaggcagtaggccttgttaagctgtggtgggctctgcccagtttgagctttcctgcctctttgtttacactgtgagcatggaactacctactcaagcctcagcaatggcagatgcccctcctcttaccacactccagcatcccaggttgatctcatactgctgcgctagcagtgagaaggctctgtgggcatgtgacctgtctagccaggcacaggagggaatgtcctggtctgctggttgtgaagactgtgggaaaagtgcagtacttgggcaggagtgtacggttcctccaggtatagtcactcatggcttcccttggttaggaaagggaaatcccccaaccccttgttcttcctgggtgaggcaatgccctgccctgctttggctcatcctctgtgggcggcacccactgtccaaccattcccaatgagatgaaccaggtaattcagttggaaatgcagaaatcacccatcttctgcgtcagtctcgctgggagctgtagaccagagctgttcctattcggccatcttggaagtgcctcctaaatttgcctagattttttttttgggttttacatatgagatcatgtcatttgtgaactgagataattttacctcttcctttccaattggatgccttttactatgttttttttcttgcctcatttctctggctagagctttaaatactatgttgaatagaagttatatatgtggggatccttatcttgtttctgatcttagggaaaaagttttcagtttttcatcattaagtatgatgttcactgtgagtttttcatccgtggcctttatcatgttatgacatttctatttctagtttagtgagtgttttttttgtcgagaaaggatgttgaattttaccaaatgctttttttgtagagatgcatattgaagtacagtcatgtgctgcataagaacattttggttaacaaaagactgaatatatgatgatggttccataagatttaatactgtattttcactgcacgttttgtatgcttagatacataattgcctacagtaatcagtgtagtcacatgctgtacaggcttacagcctaggagcaataggttataccatatagcctaggtttatagtaggttgcaccatcaaggtttgcataagtaaactctgagatgtttgcacaatgacgaaattgcctaatgatgcatttctcagaatgtatccctgtcattaagtggtggatggctgtatataaggatgatttctgggacttactttaaaatactgcagcgaagaagaaaaggggattgataaagcaagtgtggcaacatctggataattgtgaggaatggatgatacttatttggggattcattaaatgatttctacttttgaatatgtttggacatttatataataaaactttcttttcttttttttttttttgagatgtagtttcactcttgttgctgagattggagtgctgtggcatgatcttgggtcactgcaacctccacctcctggattcaagcgattctcctgccccagcctcccgaatagctgggattacaggcgtacaccaccacttccagctagttgttgtatttttggtaagatggggtttcaccacgttggccaggctggtctcaaactcctgacctcaagtgatcctcccaatgtggcctcccaaaatgctgggattacaggcaaaagccaccacacccagcttatataataaaacttttggaaaggaaaaaawttattaaagttctctatattgtgtttttattttctttatttttgtgtttggtatgaatgtgcagtggtttctaaacctgaattatttgtggggactttgaaaaaactgtagattctgtgaatagattcatcaggcttggggactttgtccctggaagtgactgggatgcagccaggtttaggaatcataaacaggagtaaggcttaaaaaagggaatagcagcagcatccccttgtgttctttcttgcaagctaggagaacattcttctttagtgggagaggagcagggcttggaatcacaaattctacttcagacagtaagcctaggtgaccttggttggacggataactttttaaccgctttgggctacttcagccttggaaaaattaggaggctgacctaagacctctggaaagttccctgaattaattatcccacaagtgagactggctgatgccagcttcagcctgagagagagatagatactgatcgctagaaaggagaggattaatatggaataatcctgtgtacttaagaagaggatattgacatgtctgcattaggttaggtttttagacagggaaataattacaaatccccaaaggtatttttggggggagaaaagggagggagaatcttgttttattagttaatttatttttggtgcttatttacttaaataagcataagtagtagaagtgtgacattttatagttattttgtgcatttcaaaaagaaaaactcagtctcttcctggatggtctaatggaaccacaaccttgacatatttgataaagttaaacattgcacaaggagcttttcttttgaggcctttaagaatgttcaaacatgtcttgttagctcactaacaggtccaattgggatgtagaggagatgctggcagcctgtcagatcctgaggcccccaggcactgagattagccccagattgcatcctgggggttagtgtggaactgctaatagctttcagtcttttacaatctagaattcagaggggaagggatcttagggactttgggggcagcccttccttttgtaggtgacaactaaggccgggagaggaggactgcttacccgagcagagtgctcctgctgagcccaggcggtttccatttcccggggtctctgttaggattgcagcaccttcaaaacattkaacatacttccctgccggaagccacatccttcagtggtgacacccagaaacagcccccttggtcttttgcttgttttggagagatgcagcgtgactgcttttattgttacaacactgggtggtctaccagtgagcacgtagtataaataacaactaataaataattttacagcaaaagtcctaaatctttccagatagtgcactggtgcatggctgtcaaatgccggacagatcctaagaaaacagtaactttaacccatccatcttttacgtacatggcacattgtcgtcataaaattttcctaaggtttcagtggcttaagggagaaaatgtacatgtaaaaacacacgtacacaaacacacccacataggcatagctacccttgctggtggcatgatcacttccattttttaaacatgactgcttgacacctgtctgaatttttcctgtatttttggctacagtaacctgttttattttagtgcagtaaatttgaacagacttgatattttttgataaaaggattctctaattttttcattctgggccatactttggcattgttttagtgtcagaaatgataagttgatttggtttaactcattttgtaggttcgcctttcttttcaacctcttgaaagccaggtacctgagttatgtgctaccaagaccttwggtatttcagctgagttgggggttaggattctggacttatccccctccctggaatttcccaagttttagctgcttctcttgtaaattggggatgatattgatggcatagggtgactttaaggattgaatatggtaatatggtagcttacatgagaaccccccagcctagggtctccatatgaaggtcttgatgactgttggttcgccttgccttctacattcttaccttataccccctttctgttgaaatcctacccacagcagagcctgttctctcttgaagccatctggaatggaaataaaagctgtgctcctctgtgttttcagtgcactgtaacttgtacctctcctgtacagtctttgatgcgacgtctttcactctggtgattacatgggacatgtctgcaccttctcaccctccaaactggctgagccataagaaggaaagctgactgaaggcagaggctgaggctgagtcctgtagcttctgcaggattagcgcagtgctggccacatagcaagcatgatcatggatgagmcctcaacagatgtgagaggtaattgtttaatatgttcttaatgagaacacatggacacagggagggtaacaacacacatcggggcctatctgggggtggggggcaaggggagggagagcattaggacaaatacctaatgcatgcggggcttaaaacctagatgacgtgttgataggtgcaacaaaccaccatgacacgtgtatacctatgtaacatacctgtacactctgcacatatatcccagaacttaaagtaaaaaaaaaaaaaattgttctggctgggcatgatggcccacaccagtaatctcagcactttggaaggcctaggtgggcagatcacctgagactgggagttcaagaccagcctgaccaacatggagaaacccygtctctactaaaaatayaaaattacctgggtgtggtggtgcatgcttgtaatcctagctattctggaggctgaggcaggagaatcacttgaacccaggaggyagaggcaggagaattgcttgaatctgggaggtggaggttgcggtgagctgagatcatgccattgcactccagcctgggcaacaagagctaaactttgtctaaaaaaaaaaaatagctcttaagtcattagaatatacacactcatgagatcgtagtcatctccctcattctttcttcttccaatgtgccaacgtctgtctccaaactctctcacttggagttcctctgcccttcactttggcctccctgaggaggtgccaggtttggagagtagtggttaactgcttgcaacctgaccacttcctagctgtgtgttayggattgaattgtgccacctcaaaagattttgaagtcctaatgctccagcctccaaatatgatcttatttggtaaagagtctttacagaggtagttgaggtaccatgagctcattagcgtgggccctaatccagcatgagtagcatccttattaaaagagaaaatttggacactaagacagacatggacagagggaagacaatgtgaagacacagggagaatcccagctacaagccaaggaacacctgagcctctcagaagctcagagcaacacatggagcagaatttcacccacagcactcacaggaactgacaccttgatttttgacttctagcccctagaactgtaagccaataaacttctggttcaaccactcagtttctgagactttgttatggcagccccaggaaagtgatatgtagtggggaataggcaactttataaatcttttcagcctgatttcccttatctatagaatgggatgttgtgacaaatcacacctatctcattggggggttctgaggattaaatcgtgcctggcattttgggatagaccttaaaaaatagcattcattcaatgttatcattcatagactctgacttgctcattcctggaacacttttaaacttagcagtctcttgagtttttacagacgcctcttcaagcagggtttggtagccaaaggtctcaaaatcttagtgtaaagcagcagtcctccaactttctggcaccagggaatggttttgtggaagccaatttttctgtggactggcaggtgggggtaggagatggtttggggatgattcaagtacattacatttattgtgcacttttttattttaatttttttaaattgtactttaagttctagggtacatgtgcacaatgtgcaggtttggtacataggtatacatgtgccatgttggtttgcttcacccattaactcatcatttacattaggtatttctcctaatgctatccctccccctttcccccactccgcgacaagccccagggtgtgatgttccctgtcctgtgtctaggtgttctcattgttcaattcccacctatgaatgagaatgtacggtgtttggttttctgtccttgtgatagtttgctcagaatgatggtttccagcttcatccatgtccctgcaaaggacatgaactcatccttttttatggctgcatagtattccatggtgtatatgtgatgcattttcttaatccagtctgtcattgatggacatttgggttggttcccagtttttgcttttgtgaatagtgctgcagtaaacataagtgtgcatgtgtgagtctcgctctgtcacccaggctggaggagtgtagtggtgcaatcttggctcactatgacctctgcctcccaggttcaagtgattctcatggctcagcctctcgagcagctgggattacaggcatgcaccaccttgcatgtctagtttttgtgtttttggtagagacagggtttcactatgttggccaggctggtcttgaactcctgacctcaggtgatccacctgccttggcctcccaaagtgctgagattacagatgtgagtcaccatgccccgccttgtgcactttagttctatcattattatattgtaatatataataattatacaactcactgtaatgtagaatcaatgggagccctgagcttgttttcttgcaacaaggtggtcccattctagggatgatggagacagtgacacatcatcaggcattaggttctcataaggagcacacaacctagatcgcttgcatgcgcagttcactgatagggtttgcactcctatgatgctgctgatctgacaagaggcagagctcaggtggtaatgtgagcaatggggagtggctgtaaatacagatgaagcttcacttgctcgcctgccactcaccttctgctgtgcagcctggttcctaacaggctacggatcggtactggtccatggcccaggggttggggacctctgttgtaaagcaaatcatatttgtcacccaggcttgagtgtagtggtgcaaacatggctcactgcagcctcaacctctgaggttcaagcaattctcctaccttggcctcccaaagttctgggattataggcmtragccacggtgtcctgctaggaatttagttctaattaggggtttaattttctgacagagttctcagcaacaagcaagtcaaatctgtaaaattgtcccattgtcatgagttaatgtgtgttgactggctctctctgaggttgccattttaactgggagcgtttgttataccctttgaatatcttgattttcttgcttttaaatgccggtcattataggctataggaagtagggtgtggattatttggtagttgttaggaaaaaaaaaaaraaagtccatgactcctgcttggtgtgcgyagggtaggcagcaccgaaatcaaatgtagcttcagtctgccactgagcgtacctatgtggcattgggccagttgcttaatcctttggaacatctgttctctctcctttgcaaartaaaggtggcaatacctgccaagaggcagttttatggttcaagtaagatagcataggtaaagaaactccttttgtatgtggtgcatattcaaaaaaaattaattccttttctctcatctcccttggtcctcaawggttacaatctgtaagagcaatggctgaaatgttggccacttcactcatgatgttgaagttcctcttggacaggtaaacagcttatcatgtccctcaagttgtacaccatgaaaagctgcctgctacctacatgctgagaacccacttggagtgacacagttcagattaaagactttatttcaacatggtctgaagygaatttgatgttccacttcttagctcttttagtgattrtataacttatgagttgtttatttttttttaaaagcctgaaagtactaaacatttgaagaatgaagtatcacgagatgggtgtgtgtgtgtgtgtgtgtgtgtgcataatggctaaaaaagtaaatttcctttagctcatgctctgtatgaattggtcatctgtatacattaaatgtatatttttgaagttctctatgataaatctgcattagtaactatggctatttgagcacttaggcttcagataacatcaatatacctaaaaaatttcaaagctttttataaacatcaatgcagacagtattaatatctatataaaacaggacttcagtttgagcttaattgaattagtcacttggtatccgatgtaggagcctgctcttcagtttcacttaaaagcaatagggaaggaaaagaaagaggcatcgaatgttctgttttggcatcattgtatttgttttactaatttgctagtctcagagccattctcagatgatgccattaaaaggaggtgggatatttgccattttccaagtaatgatagatgataggagtgatcagtcataccctattttgaccaatataactcattctatagctgttttttttggtccctttaaagtaaaatgatcttacttcttattaaaataaaaaggcatacatcctataggggaaagttcacaacacagaggtagttcccaaaggtttttatactcccctctgattaataattattttcacaaactatgctcaggtacaccatgatttgggttgctgtatgatctggaagccaatgtaaagtgaatcattataaagcgaatcatattttcccataggagtctagttttaattaggggttttattcctgacaaagtgctcagcatcacataaatcatacatgtggttactaatatattataaaagtaaagatacagcaatttacatcactgtaataatttaaaataatagcattatactcgttgttacatacaatgggcatgcatatagtgcatacattgattatccaaagggcccaagtgctttataaaatatacattcaacgtataaaatgcacagctttgccatgatttaatgtatatgaaagaacttaataaactgtagaatgccatacagatgtaagctgaaattttattagccttgtgcatatagcttaacataatacatacacataaagacattcctaaatgtctaattgggaacacttttgctcaccttaggatttggaaggacatttaggggtttgggtgactcatagccctggatacctagggaaatttgaatggatgcttttttgttgttaatgtttatgcttatatgttctgtttcaaaatgttttcacttgtttcataatgtaatcctttttgaagagtaggacactgatgctcacagaagatgctgtgctctttatcactgataaatgcttttttattgctgatactcactttcagagccactttgtggctaggaagttgcaaaactcaaactaaaatctgtgactgctcattctgtgctttttcaaataagctgtaagggcctgctgttttctctgtagttaagcagatgctagtaaaattatttcagggatcttagagtagtgtttaaagaagttgggattacccttgaagggaaccattacagtgcctgaaaacgtggagtgctcatagaagacttcagtcancagttatgaagatgtagagaggaagagctggttttcttttttctttttttctttttttttttttgagacagggtctcactctgttgcccaggttatagtggggtggtgccatctctgctcactgcagccttaacctcctaggcccaagcaatcctttcacctcagccttccaagtagctgggactacaggcatgtgccaccacacctagctaattatttttttttgtagagatgaggtctccctctgttgcccaggctggccttgagctcctgagcttaagcaatcctcctgcatcagcctcccagagtgctgggattacaggcatgggctaccataccaggcccaaggaagagaatcgagtttttgctcttgcttacccacacccttgccctcataacattactgaatacaggaggtcacaggaggctgagcgggtggactacctgaggaaatcacatcgaaaggaaaagctggatcatatttccttgccttagcatattagttaagtaatactagtctgtgctgcagtcacaaataaactctgaaatctcagttataatgaagatttcttaatcatgaaaaatcgaaggctccctttgtgccatggctaagtgatcagggctgttgccatcctgcagttctgtcatcttggagtttgttcttggagtatgaggaagagggagagaaaacatgcggctctccctgggtgaaggggtgagatctgaagtttcccagttcttctctgtgctgagataattggcttctatagcaatgaaatcatgacactgtctccagtaacatccttgttaatcacctgagaggactgtgcctgacaatcactttgctgtttttttgtttatttaataaacattcatggagtgcttgtgtgcaaagcattgggttgaaaagttgattcaatgcagcaatttgttccaaggaatcatctgaattgtgttgtatctattaaccatcatttctttatctgggacacagctagcccacatgaagtctttatgcaaattagaaacgggcaccccttcctcaatacattttacttccatttgtcagaaaattgtcatgctgattttattaaaacaatgccctttgctgttgtccccaaaacattgtcaaaatgaatatacaacctaacaatgtctttgaagtgaacagtgccctcttagatgtgtcactcttgtgcagtatgcaacctgcacaactgtatgtgacagtctttgcmcccttgcttcctactattgaatctttctggaattttgtagatattttcaggtaaacttttctttcagtctttgtagacacgatgatgaggaaccgcccccccttttttttttctcctttggagaagactccttgagttctkttatgctacaggaaaaatgtcacttcttttcataaggtcaaattcccattttatttgctgtggcaaatactatcattcatcttaaatctggtttgttttaaaattgtgtttaccttcctcgattggtctctctgttctttgaccatttactacattttgaaaatacagttatcctgttaaaatagtttgattttactaaaaaaacttttactcaaataggacctcaatggaatattctaagggtgataaattcctgcccaggggctaaaacattttgacattattaggaaaaaagattttctgtttgtctgtgtatgaaaaagaccaacccaacaggccatgccattatttgttaaatgaataaatgaatggatacattgtgaaggatatgtagtagtagctgtaaatgaattgctttttttaaaatctgtgttatgattgcatattatcacagaaggacccaaagctagaaaagcccattagtatttctttgagttaaggatctctgctaagaatgaaagtgcaatcatgtgtgaagaaaggatagtatatttaaaaaaattccaggcctggtctaattgtgctttgattactgtctctagggagtaattcttacttcttggtaggaaaccatgagcaagtctgaccatttggttttgtgaaaataaactttgtttaatttattgacacgttagacatacctgccaaattttctcatgctttttccctgacatgtgtcttgcctgatggagtcactgtaatgcagtctatgtgtttttaaagaaattatgttttgctaaggaatgtatcaaaattgttaaaccatgttgcaccttgttctcattagcctttggaatgcagctgccggaacagaaagggcaggggagtcggagtggtggctctgcgtgctctcacctcctttccttgcagaggcccttgggctccatcgtgaggtgctgggtctctgcccatccttgggcagctttgccaggagagtacactcgaggagccctgtaactccagtcaattgctgctctgtttagaaaaagccaacaaaaaaatgaattttacctctatgtacaacctagccagctctgattgctacactgtgtgcataggcataccttgttctactgtgctttgctttatcgcactttgcagatagtgtgtttttttaatgtaggtttgtgrtaaccctgtgttgaagaattctgtctgctgtttttccaataccatgcgctcacttcatgtctctgtcacatattgctaattctcacactrtttcaagctttttaattattatgtctgttatggcgatctgtgattaacctttgatgttactatttaaattcttttagggtgccatgagccacgcccgtataagacagcaaacaactgataaatatgtgtgtgttctgactactccaccaatcggccattctcgcatctctctccttctccttgggcctccctattcattgagacacagtattgaaatagggcaaatatttgaaattagggcaaatatttgaaaatatctgaaaatagggcaaatatttgaaattagtacaaataattgaaattagggcaattaaagcacttagtggtttctaagtgcttatgtgaaaggaagagtcgcacctctatcactttaaatcaacagctcaaaacaattaagcttagttaagggcatattgaaaggcaagacaggctgaaagctaggcctcttatgccaaacagccaagctgtgaatgcaaaggaaaagttcttgaaagaaattcaaagtgctactccagtgaacgcatgaatgatgagaaagcaaatagccttattgctgatatggggaaagttttagtgatatggagaaagttttagcagccacaacattcccttaagccaaagcctaacacccagagcaaggccctaactcttttcagttctgtgaaggctgaaagaggtgaggaagctgcagaggaaatatttgaggctagcagaagttggttcacaaggtttaaggaaagaagccttctttacaacataaaagtgcaagttgaagcaggaagtgctgatgtagaagctacagcaagttatccggaaaatctagctaagatcactggtgaaggcagctattttaaacacaacaaattttcagtgyagatgaaacagttatctattggaagaagatgccatctaggacttttatagctggagaggaaaagtcaatgcctggcttcaaagtttcagacaggctgacactcttgttaggggcgaatgtagctggtgacttgatgttgaagcggatgcccatttaccattctgaaaatcctaggacccttaagaagtatgcaaaatctactctgcctatgccctataaatggaacagtaaagcctggatgatggcacatctttttacaacatggttttctgaagattttaagccttctattgagacctactgctcagaaaaaagataactttaaaatattactgttcattgacaatacacttagtcacccaagagctctgatggagatgtataaggagatgaatattgtctatccctgctaacatarcatccattcttcagccctgggtcaaaaagtaatttcaattttcaagtcttatttttaagaaatatattttgtaaaactgtagctgccatagaatgtggttaactcctaacaagagtcagcatgtcctttgaagattggaagccaggcattgactggtattggccttctggaaaggattcatcattctagacgccattaagaaagttagtgattcgtgggagtggggtgaaaatatcaacattaacaggagtttggaagcagttgatttcaacccttttggatgactttgagggctttgagacctcagtagaggaagtcactgcagttgtgctggtgatagcaagagaactagaattagaagtggaccctgaagacataaattactgcactctcatgataaaacttaaatgcatgaggagttacttcttatggatgagcaaagagtggtttcttgagatggaatctacttctggtgaaaatgcagtgaacattgttgaaataatagcaaaggatttagaatattataaaaacttttggtatggtttggctctgtgtccccacctaaatctcatcttgaattataatgcctacatgttgagggagggatctggcaggaggtaattggatcatggggtggtttcccccatgctgttctcatggtagtgacttctcacaagatctgatgctttaaaagtgtttggcagttaccccctcgctctgtctcctgctgccatgtaagacatgccttgcttccccttcaccttctgccatgattttaagtttcctgaggcctccccagccattgcagaactgtgtgtcaattaaacctctctagtttataaattactcagtctcaggtagttstttatagtggtatgaaaatggactaatacactttgtatttttgctcctttttttttcctttccttttttcttccttgaataacctctctgytaatggtccgtctggctaactctacttagcccaagcgtcacctcatgtttgaagcccttcctgatttcctctgctgatttaggtgcccagcatccttagtgttcacactaagctttatgaaatacatctatcaaaacaattaccttgtagcataaatacttgtttctcctgattggactctgaagtctaagactgtagcttttagtttgtatctccataaatgatcacaggcttggtatatagaaattcagtgaatgaattaaggtaagatttccaagatatgttactcagcaagtcttcaaaagcagttatgttcaaaagcagacatctctacatccagtgaattaatgtaggtgaatgtaatgctttggtaaaaaagttatctgagtgaaaaactaattgaattgtttggtcagcctcagcttattgctctccctcccaactgacgttatatayaaagtcaccagaaggaaaggtttgctcagagtaaccccttctgccatggtgactctgttggaagtcatccagtgacasaagaccctggaggcagcagctcttgtcccgggtcctttygttttgtgtgtttcattgtactttgcagagcttttcctaggagactggttgcctgccctgacgtgtcagagctcctggcagggccccagatttggtctccctcggacaccttccctggggagggaattttattacccaataaaaattgcctcggaattccaagaaatgtgacattgaaattcatcaggctgttttatagtgagatgttttcttgtcttggtgcctgggactaatggccaatgggtttgcattatctctagatttgggggcaactgtatcttcattggttggacatcttagtattgaggattgtggcaggttttggctgagctgggtggaggggctctgagttcctatcctgcaggtcaccctggtgaatgaagatctaaggttctcagaatggagggagaacacagagtgaagcatgtgaggggctgtcaagggtactggtcgctctggcgtggtctgggaggcctagagagcaaggagcctgtgctgggatggtgttttcttcattctcttgtgtcagggtccggctcatccaggctgcaaagccaaatgcctttaaacttgagtgtggcaagatgtagaggaaaagrgttttggagttggggagagctgaattgaaatcttggttctggcacttacggtgggcccttgggcaagttgctgagcccctctgtttagtttttcttttgttttgttttttattttttattcacttgtgaggtggggccccaatccctgtgagcctgctgtgaggatgcaaagtgagagcattttggcagagctcctggcacattccaggccctcaggagttatcacccccatttgtgaatgcctgttctaaagatatattagaaaaacacagaggcacagaaaaggagagtggatttttgtttttgcatgctggcttagtgaagtggccagaatcactagtatgacattgatgctgtgagggctctgggctctgtgtgaggggctttagcctggcctcttacccagaggatctgctcagggagcccctctggaaaagggggtaagggtcaggaggaagcctgagttctagtgtttgctttgccaccaaccacacgtatgaccttagataaatcacttgcctcagtttccagacttgtttggaaattggtgtggaccagttctgaaatttaatagacatgaaagtattgttatgagactattagaaagtattttataactaagagtgggggtgggtaggggctttctcttcctttctttcccttctttccattaacaaggtatttaattatcgcaatcacaaagaaataacctagaagcactgtggagaagcactactgttaaagtgatttcttgcagaggtcttcaggtttatttccagagtttccttggaaagactttgaagttggtttaacactttacacctgctttgctgtcaggtattgattgggctagtggctggtcagatttgaatttcacaaatccgtgcgtcaatttattccttagcacttaggtaacgctctaccaggataagcacattttaaaggtgaaaatctcccgacaatgtaaaaaatggaggtgggaaagaatggaaggtaacataccaagatgttaactgatggatgagcggtgagggttctcgatgagtttttattttccttatacccttctgtgctttccaggctttttttttttttttttttttcagttttttaaaaatatgttcctcctcccacaaagcaaatgtggtgctattatttaatattataagacatataggatttaaaaattttgtgacttgccaggaaactaaagagggctagtatatctggaaaatcccagaaggcaggcagggcccagccagtctgaaacatttctttagccccagcctggtgcacaccctcctcctcctcctcctcctcttcttcctcctcttccctccctccctccctccctccccccgccactaccttgctgctcagatctgggacaaaacattctccttttggcaaggccttccttaggaaggaagtcacatgccagttttggtgagtctggaggattaatgagctgctaaaactcaacttcttcatctcctgaagcttcctttcaaactacagattccaaatatgacctaccacagccatataccacctcccactatacttctgatttgtatgcttaaacacacactcccaagcagtgcctaaactcctactgtggagtctgggagtttgtcaaaaggtgccagaaacagagctttatgaatgagctcagcagtctcacagcatgaaaatgactctagaataacccagttttcaggcctctgcctaaattaagctttttaattattctaatttgttaatcatgaagaataaacacttgagcaagtccagcatgttcaaaaatctgaagtcctttcctttctcaagtagactcccttttctaaacaccccgtttcagaaagttataccaccaggctctgtttcccttcctttcacttgcccagtacagtctgtcactaagtcccggtgaaatgtctcttaactctttattttctctttttcacactttagtgtaggtcttcatcatctcatagccagacaactgccattggtttctccacttctagactctttttaaaaaaagaaaaatgaggtctttctcttttgcccagkctgtagtgcagtggtacaatcatagctcactgcagccttaaacatctaggctcaagtgatcctcctgcctctgtctccctagtagatgggattataggcgtgggccactatgctgcctccaattctaggctgttatcctctcagcccatacactcttgytggaataatctccttggaaaatagagctgatgagatcactcccaatccagagtctgaagtcaacagctgagtcagcccttcctggtgtgactttcagcctcatgcatatccccaggccaaaggctctggactgtcccaccacgtgccccctgccttctccctgagcctttgctcaaatccttctctttgcacagatacccccattcaccaytgtccagtcatgactgaggtgtaaaatctgacccattctcagctctggtgaaatttcctcacaaaggctgagtttattacacatttttctaccctcacatgaaaacaagtatgtctttatttccttcttctcaggtccatttagcatgctatggaattcttcctcttgttttagtagtatattcaacaatttatataataatctgctcagttaattgggaaatctatttgtgaggggaggctgcaagtctatctcaatcttgggttttttcatattgtctagcctagtgctttggacctatagttgctgtgtataattgaatagtagacattcaaacatggctttcaatgaggtactagaatagattcaacatatataatctaagtttcyttacctttatttgtgaagagtaaaagcaaaaatttgatgctatcccattttagtagaggcttgtgaaatattcctttgcagctgcaaagatgctgaggccttggagtctttcttatttttcaactggagtaaactttctttgaaaagagagtaacttcaggtccatgagaaagtgggagcccatgaagagttggggattgatacggttttggtgtctgctcaacatggggttggatcttggctcttgggcaaattatttagcttctctgacaggactcaggttctccatctgcaaactgttgataatatcttcctaagttattttgcaaattggggatgatggatgtatgcatctagaacagtgcctggtgcacagtgggcatgccaaaaatgcaataacgggcaattattttcacagccattatkcagggttcagttagaaagtggggcatctgcgagtgcagctgcagactgaaaaccaactttatttcaaaagctcaccttgcacaatggctcttattaaaatgtgagattgtttataaagcagaagattacttgacagctgaccctgaaaatggagtttgagctcaggcaggaagggccagatgtgctgtgctattccaagctgggcatctcctccccagcaggtgagctcttcaggccagaacaaacagatgtttggttttctggggtgagaaggcaggacagggtcctgtttgctgtttcacaatgtgagtggctgtgaaaggttgagctttgggaagcgtgctaggagctctcacacatgcatggcttcaaaatgcggccttgaaaaaaattcatcactctcattgcatttccattgtggggttgggggtggatccaagaaaggacctgagaagagaatttggtcaattggagagctggtagttgagtacataccatgaccaggcactgcttttgagtgctaggggcaatgaggggaatggtgacacagaatttaatgataagatctagttccacccgactctggaacaatcgttttggacttttwtwttttttttttttttttttttttttggcagggtctcattctcttacccaggctgaagtgcagtggcatgatctaggcccactgcaacctccgcctcccgggttcaagtgattctcccacctcagccctcccgagtagctggcattacaggcacgctccatcatgccaagtaaatttttgtattttttggtagagacggggttttgccatgttgcccagagtggtgtggagctcccaacttcaagtgatccactgccttggcmtctcaaagtgctgggatttacagccgtgagccaccacgcctggcagttgtgractttctttgaggaaaatgtgtatatacacatgccattttcatacaattccaagtggctcatgggtcccctgaagttcaaggaacccaagttaagaatcatttatttagtaattacaatctagtggaaaacaaacatgaactttagattcagaaacacttagtttaaatttgtattccaccccttatcagctatatatctcaccgaacgaaagatcttggatgatttaacctctgtaagccttagacacctcctatgtagatgagaataatagcggcagcatctgatgaggttgtaatgaagatgaaataagttaataagcacaaaagctattagcagtatgcccagcatgtggtaaatgatctacacatggtaataaaattattactagtgagcctgctataagggagacactgaagtatggcagattaattcctattggcatctgagaagaaactatgaaccacagttttcagttgaggttttgtatgtaaaagaattgtgaaaaacagcatggtgggagtttctgttacaggcaacaaatttattataactgtctcatgccagtttataagagwaggcaaccacagcgggattccatagggatgtttcagtggttatatagtccacgaagatgacctcattggatggaataaatctctttcagtgacagctaaatactgagctataatccattagcaataatgaagaaaaaggataagatgatgatgataacagccgtgagccaggcattgtgctaagtgcttcacatttgttttggtttgtggttttgtggggtcgttcctgatgaaacttgaggactttcacttggtgtagctggaggacggcaggctgtgtgcacacgtgtgcatgtatgcactagctaaaccagtttcttatcagctttcactcatttgactgtttttggagccatgacttttaacattttggaatgtcctcgttggaaaatgaaagtttatcacgcaacgtgtaagattacaaccacaagactcaggaaagcgtccctgagcttgggggagagttacaattaacctcgtaaagagtgcggatgaaagtctttcccatagttacaatcaaagacactttaggccactctttccccagaggaatagttgctttttatggcatgttttaaagttttatttcaaaaacagtcagcatcttaaagcagaatgctgtgtgcaccccaggacttcacttaaaatgtgtttttagttttctcaatcatattaccaagtttctggccacaacatgagctgctaccctcacagacccacacgcagaaggatttagcctgatttgtttgtgcttgtagcaagagctctctccctgatctttctgctattttcttctgagagggaagttaggagtcagcattattatgttagaaaagacaacctttttcagccctcaagtttttcagccctagagaagagatgaaccccagtcccatgcagttctttctactctactcagtactcagctgcccctcaaacccaagaaaataattttttgcccatatcctggcttagagtgcttcctaattatgtcatatgtgtgcacacatgggtgcatctatgtgttttaacttaaatattggaatatcatgttttttcctaagacataggcactgtgactgattacctttcgatgataatttttcagtgaacacctaagtattgcagggaatgataagtagtctagtagtgccgaggtgctaaagtactgctgtagttactttgtaattctgtttgcgtggagttcaagggtgagtgaaacttacatctctctggtctgtctgctccacttcagctgtagttctttcttttgggtctcacttttcgctcagcacaactttcagcttctgctgggccttgggttttcttggtcgaagaatgttttacgtgctcactccaccataatatgtgctctgacaatggctagagaaaagcatggggtttgaaccaaatctgactttgtatggtctcatttacatagtgtatgaatttgtacgctctcatttatacaatgcataggactgctgtagaggccttctcactagtcactatgcctggagtttatcctttgatcaattgacactgatatcagggtctagctttgttacacaagtgcaaatcataactgccacctgttaaaaatcctctaaaccttctcattgcctagagtagggagggcaaatgattccatttcaggtgccaattggcagggctgtctgaaatgkgtgtgctctgaagtgcataaagtgctgtgattagacatgtctgacatatgtgcagagcggtagtagcagcaggtgtgccacatcrtccctaagagggcaaggtctgaacttctaagcatggtccataagactcttcttgatctggtttctgtctgcctgtccagaaccatttatccttccccagcctgcactctccctgcttccccagcctggcttccagcctgahcttgcttccccagcactcatgctgtcactccagcatggctttgcatctgcccaacttcccctggaaatctcttgcctcttatttctccatagctgcctcatccttcaacacctgattcaagtattaccgcctttgaagcctccccaccttcttgccccttagccataccctacacagtcatgatgaygctaaccttgatcatatggtcaaggttgagagtctgccagatttctccactgtaaagtcaccatgttccctttgtatttgattatgatggagattctgatattataccaatatcctgtttgttatcaaaactttgcctatcagccttagcatccatccatggttgaatgaatccacctgaatctaccactgtcaccaccatggttgccaaatggtgatggcttaktttcatcatttcctctacatttattatttggcattctataagaaagagctttctcttctcccccatttatacatgtatatatatatstcagtatgtactcattgatctgttttgttcagtgggttataacctattactatcatcatttattttaatactcaaattattccctgtttgagctccttccagttggctcccatgtccttttgacatatgtccattatccattcagcatttcctgactttctgacacaagatgttccaggcttaycttgtatttctctacctcaaccctcaaactttttctctaacagctctccctccttttacttgaggttaatatttagaaaccaaggtctgattgttcactgtgtttgttgcttctatatagatacacacacaatgtacatatcaatgtgcacatatacataatacacacaaacacatggaaaataactgtttccgtatctctgcatgtatattaaaaacccatcagttcataccaatacttccaattccgttccaacactccagaggtctttctagctttcttctttccatgtttagaagtagattttgaggataagaacctggctccttctattttgaatgtatttactggtttgtaaaacataaccagtcttcttaactattttggatgcctctcctgccccattgtacctacaaccccttactgtctgcttccttggccgtaagggcacactgccaccaacataagacataagggccccaagtttttggatactgagcaccaatgtcaagaagggaagatgggacatgatagatcagttcctttaaggcaaggaagtatgtacattatttttctttctaattattacccaacayagtacatgacatataacaagagctttgagagtgtcatatggatgaatgaataagtgggcaataaatgaaaagacaaaattgtacattgtttaacttgtgaatattacagtgggataatcaggkgatcaggatataataggtaagactaarcaccttctgtatctgagaagatttttgtctcttttcacccaagtgagtagctttggaaatctgcagaggaaagggatcagataccagggataccagcttaagtagccaggtgagycaaaagaaactctggtctggaatcagttgacagatgagacacccagcttgtcttatccagtgcrgcaccaggcacatgwgggccatttaaccaggatgtgtaatgataacaagggcaagacacgtctgggttttggctgcattttgtttgagattcctgtgtgtgtgcactagagataatacaaggcaacgctctagagaaaatcattcctatctacctatgtgtttctgaaatttcacttggcatgcagtgtcctgtgatacctgtctacaacwctactgagatgtgcagctgtatggcagctgtattgaatgccactttaaaggtgctggtactttagatgattcttctatagtagtttgcagttgtacataaatatgcacaaagctcattttatgcataattaaaaccagttattccattagagttttcaccarcctttacctggtaactacctgtacaacactgacaataaataaaaacacgttatttttgttgactcattttgagaacagattctgttgggtggtcacttgaactactttcccaacctgatttctcttgcctattttccagtgttctgactccacatctttgattttgcagctccccgtgcagccaggggtggctttatgccctgattttagtcagtgagagggcttgtggggagtgtttttttcacttttcctttgtctggtggcagagggtgggatcctgagtaccggaggctgttgccactactttctgtgaatggactttgcctccccatgtgtactctgggttggaaatggccatggccttaggcccggaaggactcgaggcttagtgcagtgtgggcaccaagaagagaaaaagatgtaggggctggacaaaggaagagcaaagaggagagtataaggaaagagatggaattttgtagaagctggaggaggcccttctgttggtacgctgggcttcttagagcctaagagttggagactccaggtccatttcctcttgaacgcccttctgtggctgatctggttctatgagggtcctttgtagccctagactgttcatgtagcatgactcacaacctcaggtttygagtttttttgtagaccttctgttctaataagattgtaaagattgagataatacagataaacaggtaagaacagtgcctggcacacagtcaatgcaaatgtcaaatattcatattgtcatcattgaaggtgtacaaatgtattggtgcacaaattctacacatttatgaacaaaaggcaaaggtctcatggagcgcagtcttcagccagtctaatagaaaggtatggtgtttgtttcttcagtaatttgagatgagaaaaagaagagggctactttgcaaagattagagaaagctgagaattttatttttgtgaatcttattttttgtaaagaagggctatcttctaccagaaataaaaaatggaatgaatgcccattgtatgtgtatatctgcctgttttctcctaacacctcttcattcccttgaactttgccagcatctgggaggtccagtaagaaatgctctttaaatcctctgcattcttccagaagcccaaggggtttaacaagttctgactttcatgaaaacatataaaccaaaagtacaatttttccagcgtggttctttatactagaaatcttcttgtttygtcaagtaacaaaagcaaaacctggctcttttgttattgattattagtgaatccatataaagcaggatatttgggggtgagagtgggttacctttaacattttacagtgctatattttattggagtgggttttacactatctgtaaattttaatttccagtgagaatatattgaaaaagtacaattggaaagggatgacttaaaaagtttccctttgggctaaacatctaggaaaaatagagaaaaaaaccattagtgaaatcagagacaactttgacatattgaattatgaacacacagtatagggaagtaatttcattccagctgctcagctgtggtaataattaaactcgaagtccagcctcctacttgttttggaaagtagggggtgtcttataacagtgagttaggtccctaagaatcacatgcttgttgaaaaatatttttggtactcagaggaataaatgtagtgaaatgagggcatttttttctaaaatcattccattcattgtttaaattaactttcttttgctttagtgacattayaggggatttggctcctattttgaaaagctccgtagagacagaaaatatagattagccctgatacattttgatggaagatacaacagttgagattttggttatctgttggaattctgaaagtttggagaattgaggcaagcagcagtggggcatggggaatattcagttttggcagcttacgagcagtggagaaaatcctcgctgctcaattgaatttggcattggctaccaagtcaggatcttcctgtctgcacatcttgctccgccacttgctgctgcagaaaggccccactcggggcaaaatcactccctttggtagctgttcaggtaggaaaaggtatgggttgggtaggagggctggtgcaggtcggactggggttgggggtttgaggggacagggaaacccagggaacccatttatcctccccattacctgcagcatgagacagggccacgtttagagaaggaaagactcctgaaaccttaacacagggagaccttggcactgaaaacctgacacggaggctaagagacctcgggctaagttttggggctcaaggcaatgggacaactataaacactgaaatgcctaggaagctgcttagcaacagtaattcagaaggcacttgaggactccaggacttccaataattccatccatgtcataaaaagcatacttgtaccccagagagggatgctgggacactgggacattctcttgaaggagatgaaatgcaactgttccaggaatctagtcctttgggccttttggccccactcaagttgtcaccagttcacctgctgagactcaaagcacaactctagggctgtatctcatatgcgtgtagatagatttgggtagggagcagtggcagcgaccacagcctagggccagtgtttatttatagactcatccagaacttccagttctttgcctgaacttgaagctaggagaggacaggaggagtcttttatgaactgcttggggttaatctgacctcaaaggtaacagttgagggtgatcctagccaatacctgagcatccccaagaaaggggcagtgaaagcacagcaattgattgttatttatgcaggatgaggaaagggacttgtggagggagaaattatgaagcagattaatacatgttgagtggttgatgtcagctggctggtagaaattaacatggtatatagcataactgttatcatttttatcttaattaattttatgagacatttaacatgttcacacatcargccaaacatctggggctatatggatggtggcatttatccaactgtttacacaccctgctttccaagtatcagccatgctcactgggtcccatccacttgcaagcttagtaaggcagaggccatacaacccccatctccaagctctgtgcttatgggtagaggagtgtccttatagtctgagacatcaacttgaattttcctcagaraggaatcagatgtaatgaaaagagcatccttttagaagtcagcaaaagaggcattagccctggttttaaaatggactgttctatgatattgagcaggttcttaaccccattggccttgcttcctcatctgggatattggtggtggcggcagccatagcaaaagtaataatttctgccctgcttagctctcagggctgcagaaagaataagataagactgtgtagcaaagctctagaaactgagtgtgtttcacaaattgttcatccaaaaatattaagtgtgtagatgttccaggcattgtgcttagctgtttatataatagtgaacaagataccccctttctcaccaaggaatctagtttgggtgataaaaaagcattttttaatatygtggacttaatgctgtgataaaagtaatctacagtgtgctgtgcaagcaacccagtcttggataggggtgagatagtgggtcatgaacagttactgttttaaaatagggattagaggggctttggktgttttttgcagtgcctggaagagagccttggaaakatttgtttagcacagctgttgggtttcatccgaaattcacagggtcctagattgcttgygaagagagtgaaactccagtcaagwgagcttgctgttttttggctggaggacactaaaaggccatgtgggaacaagcctagtgcagctgacacaaacttcagagtgtgagaagggaagcttcctttggttgttggctctgcatttatcatcagcttaaatcaagagcctgttttacccaggtggttggactaaagcctattagcctcaaggaagctcttacttaagcagatacgcgcttgtttcatgtaggccccactgcttagggatttgtatacatatttccttaatttagacaaaaaaaaaaactgcaaaaagagaacagagtgggcccccatttccagcatcaacaatgatcagggttttgccacactgggttcatccatcaatcccagccatccatcaatgccagccagccatgktttttacccctacctaccttattatgcttctctaaaagtagggatatttttggttgggtgcaggggctcatgtctgtaatcctagcactttgggaggctgaggtgggtggattacctgaggtcaggagttcgacaccagcctggccaacatggggaagccccatctctactaaaaatacaaaaattagccaggtgtagtggcgtgtgcctgtaatcccagctactccagaggctgaggcaggagaatcacttgaacctgagaggcggaggttgcagtgagctgcgatcataccactgcattccagcctaggcaacaagagtgaaactgcgtctcaaaaaaaaaaaacaaaaagggggacattttcttaaccatgatgccactatctatcgcatcaaaaaatccaaggagttttagaaactttttttcactttctatttctccccaaaatgttattttgaaaaacttcaagtgtataacaaacttaagagaatttaaaagtgaatggctacgtatctgtcacttagattctatcattaacattgacacatctctccatctattcatcccattatccatgcatctcttaaaaatgtatttctggctgggtgctgtggctcacatctgtaatcccagtgctttgggaggccaaggcagrtggattgcttgagcccaagagttcgagaccagcctggccaacatgaggaaacctcatctctacaaataacaaaaaagggaagactggcaagatggctgaataaaagcagctccagtctgcagctcccagtgagaccaatgcagaaggtgggtgatttctgcatttccaactgaggtactcacttagtctcattgggactggttagacagtggctraggsccacagaaggtgagcagaagcagggtggggcgtcgcctcacccaggaagcgtaaggggttggggaactccctcacttagccatcggaggctgtgagggactgtgtcgtgaaggacagtgctatctggcccagatactacacttttccaacggtcttcccaacctgcagaccaggagattcccttgtgtgcctataccaccagggctctgggtttcaagaacaaaactgggcagttgtttgggcagacaccgagctagctgcaggagttttttttttcataccccaatggtgcccggaacgctggtgagacagaatcattcactcccgtggaaagggggctgaagccagggagccgaatggtcttgctcagcggatcctcccccaatggagcccaamaagctaagatccgctggcttgaaattcttgctgccagcacagcagtctgaagttgacctgggacactcgagcttggttgggggaggggcatccactattactgaggcttgagtacgtagttttccccttacagtgtaaacaaagccaggaagtttgaactgggttagaacccccaacagtgtggcaaagccactgtagccagacagcctctctagattcctcctctctgggcagggcatctctgaaagaaaggcaacagccccagtcaggggtctatagataaaactcccatctccctgggacagagcacctgggggaaggggtggctgtggaygcagcttcagcagacttaaatgttcctgcctgccaactctgaagagagcagcagawctcccaggacagctgtcgagctctgctaggggacagactgcctcctcaagtgggtccctgacccccaggcctcctggctgggagacacctcccagcaggggtagacagacacctcatacaggagagctccagctggcatctggcaggtgcccctctgggatgaagcttcccgaggaaggagcaggcagcaatctttgctgttctgcagcctcctctgttgatacccaggcaaacagggtctggaatgcacctccatcaaactctagcagacctgcagaagaggggcttgactrttagaaggaaaactaacaaacagaaagcaatagcatcaatatcaacaaaaagcatgcccacataaaaactccatccaaaggtcaccaacatcaaagattaaaggtagataaatccacgaaggtaaggaggaaacagtgcaaaaaggctgaaaattccaaaaaccagaatgcctcttctcccccaaaggatcacaactcctcaccagtaarggaacaaaactagacagagaatgagtttgacgaattgacagaagtaggcttcagaaggtgartaataacaaactcytccaagacaaaggagcatgttcctacccaattgcaaggaagctaagaaccttgataaaaggttacaggaactgctaactagaataaccagtttagagaagaatataaatgrcttgatggaggtgtaraacacagcacaagagcttggtgaagcatacaccagtatcaatagccaaattgatcaagtggaagaaaggatatcagagtttgaagatcaacttaatgaaataaagcatgaggacaagattagagaaaaaagaatgaaaaggaaaaaacaaacccttcaagaaatatgggactgtatgaaaagaccaaacccacttttgattggtatacctgaaagtgacgggcagaatggaaccaarttggaaaacacttttcaggatataatccaggggaacttcyccaacctggaaggacaggccaacattcaaattcaggaaatacagagaacaccagaaagatactccacaagaagagcaaccccaagacacataatcatcagattgaccaaggttgaaatgaaaaaaatgttaagggcatccagagagaaaggttgggttgcccacaaagggaagcccatcagactaacagcagatctctgcagaaaccctacaaaccagaagagagtggaggccagtatttaacattcttaaagaaaagaattttcaacccagtatttcatagccagccaaactaagcttcataagtgagggagaaataaaatcctttacagacaagccaatgctgagggattgtgtcactaccagccctrccttacaacagctcctgaaggaagcactaaatatggaaaggaaaagacggtaccagccacgcaaaaacataacgaaatgtaaagaccaatgacactatgaagaaactgcatcaactaatgtgcaaaataaccagctagcatcataatgacaggatcaaattcacacataacaatattaaccttaaatgtaaatgggctaaatgctccaattaaaagacacagactggcaaattggatagagtcaagacccatcagtgtgctgtattcaggagacccatctcacatgcaaagacacacataggctcaaaataaagggacggaggaagatataccaagcaaatggaaagaaaaaaaaagcaggggttgcaatcctagtctttgataaaacagactttaaatcaacaaagatcaaataagacaatggcattacataatggtaaagggatcaatgcaacaagaagagctaactatcctaaatatatatgcacccaatacaggagcacccagattcataaagcaagttctaggagacctacaaagagacttagacttgcacacaataatagtggaagactttaacaccccactgtcaatattaggtcaacaagacaaaattaacaaggatattcaggacttgaactcagccctggaccaagtggacctaatagacacctccagaactctccactccaaatcaacagaatatacattcttctcagcaccacatcacacttattctaaaattgaccacataattggaagtaaaacacttctcagcaaatgcaaaagaatggaaatcataacaaacagtctctcaggccacagtgcaatcaaattagaactcgggattaagaaactcactcaaaactgcacgactacatggaaactgaacaacctgctcctgaatgtctactgggtaaataacgaagttaaggcagaaataaataaattctttgaaaccaatgagaacaaagagacaatgcaccagaatctctgggatacagctaaagcagtgtgtagagggaaatttatagcaccaaatgcacacaggagaaagcaggaaagatctaaaatcaatgccctaacatcacaattaaaagaactagagaagcaagagcaaacaaattcaaaagctagcagaagataagaaatatctaagatcagaacagaattgagggagttagagacatgagaaacccttcaaaaaatcaatgaatccaggaactagtttttagaaaagattaacaaagtagaccactagccagactaataaagaagaaaagagagaagaatcaaatagacacagtcaaaaatgataaagggaatatcaccactgatcccacagaaatataaactgccataaatacctctttgcaaataaactagaaaatctagaagaaatggataaattcctggaaacatacattctcctaagactaaaccaggaagaatttgagtccctgaatagaccaayaacaagttctgaaattgaggcagtaattaatagtccaccaaccaaaaaaatgcccaggtcaagatagattcacagctgaattctaccagaggtacaaaaaggagttggtaccattccttctgaaactattccaaacaatagaaaaagagggactcctccctaattccgtttatgaggccagcatcatcccgataccaaaatctggcagagacacaacaaaaaaagaaaatttcaggccaatatccctgatgaacgttaatacaaaaatcstcactaaaatactggcaaaccgaatcgagcagcacatcaaaaagcttatccaccacaatcaagtcagcttcattcctaggatgcgaggttggttaaacatttgcaaatcaataaacataatccatcacatacacagaaccaatgacaaaaaccacatgattatctcaatagatacagaaaaggcctttgacaaaattaaaaaactctcagtaaagtaggtattgatggaacatatctcaataagaactatttatgacaaacccacagccagtatcatactgaatgggcaaaaactggaagcattccctttgaaaaccagcacaagacaaggatgccctctctcaccactcctattcaacacagtattggaaattctggccagggcaatcaggcaagagaaagaaataaagggtattcaattaggagagaggaagtcaaattgtctctgtttgcagttgacatgattgtatatttagaaaactccattgtctcagccccaaaactctttaagcttataagcaacttcagcaaagtctcaggataagaaatcaatgtgcaaaacccacaagcatttctatacactaatattagagagctaaatcatgagtgaacttccattcacaattgctacgaagagaataaaaaacctaggaatacaacttacaaaggatatgaaggacctcttcaaggagaactacaagccactgctcaaggaaatagaggacacaacaagtggaaaaacattgcatgctcatggataggaagaatcagtatcatacaaatggccatactgcccaaagtaatttatagaatcaatgctattcccatcaagctaccattaactttcttcacagaattagaaaaaacgactttaaatttcttatggaaccaaaaaaagcctgtatagccaagayaatcctaaaactaagcaaaaagaacaaagctggaggcatcatgctgcctgacttcaaactatactacaaggctacgataaccaaaacagcatggtactcgtaccaaaacagatatgtagacaaatggaaaagaacagaggcctcagaaataacaccacatatctacaaccatctgatctttgataaatctgacaaaaacaatcaatggaggaaggattccctatttaataaatggtgttgggaaaactggctagccatatgcagaaaactgaaactggaccccttccttacactttatacaaaaattaactcaagatggattaaagacctaagcgtaagacstaaaaccataaaaaccctagaaaaaaagctagctaataccattcaggacgtaggcatgggcaaagacttcgtgactaaaacaccaaaagcaatggcgacaaaagccaaaattgacaaatgggatctaattaaagagcttctgcacagcaaaagaaactatcattagagtgaacaggcaacctactgaaagggagaaaatttttgcaatctgtccatctgacaaagggctaatacccagaatctacaaggaacttaaatttacaagaaaaatacaaccccatcaaaaagtgggtgaacgatatgaacagacgcttctgcacacaaaagaaactatcatcagagtgaacaggcaacctactgaatgggagaacatttttgcaatctgtccatctgacaaagggctaatacccagaacctacaaggaacttaaacaaattcacccrtcaaaaagtgggtgaatgatgtgaacagacacttctcaaaagaagacaygtatgcggccaaacaaacatatgaaaaaaagctcatcactggtcattagagaaatgsaaatccccaatgagagccgggtgcggtggctcatgcctgtaatcccagcactttgggaggccaaggcgggcagatcatctgagttcgggagttcaagactagcctgatcaacatggagaaaccccgwctctactaaaaatacaaaaattagccgggtgtggtggcacatgcctataattccagctacttaggaggctgaggcaggagaatcacttgaacctaggaggtggaggttgaggcgagcagtgattacgccattacactcctgcttgggcaacaagagcaaaactccatcttaagaaagaaaaagaaaaactaaaaaaaccgtacacacacaatgagataccatctcacaccagtcagaatggtgatcactaaaaagtcaggaaacaacagatgcagagaaataggaatgcttttacactgttggtggaattgtaaattagttaaaccattgtggaagacagtgtggcaattcctcaaggatctagaaccagaaataccatttgacccagcaatcccattactgggtatataaccaaaggataggtacatcattctactataaagacacatgcacacgtatgtttattgaagcactattcacaatagcaaagacttggaacccacccaaatgcccatcaatgatagactggattaagaaaatgtggcacatatacaccatggaatactgtgcagccataaaaaagtacgagttcatgtcttttgcagggacatggatgaagctggaaaccatcattctcagcaaactaacacaggaacagaaaagcaaacaccacatgttcccactcataagtgggagttgaacaatgagaacacatggacacagggaggggaacatcacacactggggtctgttgaggggtgggggcaaggggagggatagcattaggagtaatacctaacgtagatgatgggttgataggtacagcaaaccaccatggcacatgtatacctatgtaacaaacctgcacgttctgcacatgtatcccagaacttaaagtataataaaacaaaaaacaattagccaggcgtggtggcacatgcctgtggtsccagctactggaaatgttgaagcaggaggatggcctgagcccgggaggttgaggctgtacttagctggccgtsattgcaccactgcactctagcctggctgacagagcgagaacccccacctccaaaaaaaaaaaagaaagaatttcaaagtaaataagagatcaagcaaaattttcctctaaatactttagcatttgtttccttaagtacagttcaataattgttcttttttcttttgcaagaaacttagcatttaatgaacaaatcttgaggtgcacttgctgagttttgacaaaatcatgtgcctatttaacccaagtccctatgaagatgaagaacactgccagcactccagaacatttctgcatgccccttcaccctcactctcttctctcactctcaatgggaaccccttatctgacttttttcccactaaagattagtttttctgttctagaaattcatataaattaaatcataaagtatgtattctttcgattaattcagcaatttttttttcttttgagacagggtcttgctctgttgtcctggctggagtgcagggggccgaacacagctcactgcagtctcaaccctctggactcatgtgtcttttgccttagcttcccaagtagctgggactacaggcacatgccaccacacctggataacttttgtatgttgttgtttgtagattcggggtttcaccatgttacccaggctggtctcaaactcctaggcttaagggatctgcacacctcagtcttccaaagtgctgggattacaggcatgtgtggggaagagtaacatgaatatggacctgacagggggtccaggaagacctggtaggagggatttctgaaatttcagggaagtaacagggaaggctaggaataggcttccaggcagagtgttccccgggcctcataaaaaggagtagtgaagagatagaacattccagagtggtatcttccttcccccagaggattggctctccaagaattgaaagagttgtggacatgtttctttctgtgtctccctctgaggtgatgaggccattgrcaaaatcctaccccacgcgtcccagggatggcttcaccaattgtaccttcttgaagaggtttctctaattaatctaaatatttttcacagaagaaactctttttccttttcattgccaagrggggaggggccggaagagcccatgaggtgctctccagtagccgctgaacatatcgtttgctgctctctcccatccctcagctctggctcttgctggcatccctcgtgcccactcagcctgatgcctgcctgcccattccaacagggcttctctcatcagcatctgctatcacctgtccttagccttgcattgctgctgatgaaagtcccagcactgggccagctgtgtccagcagggcctctccttggcattactactcctggaatcaagcctgcagctctttaacatccccttcagcacactccctagagtacgctgtacacacctggaatctttttttttttttttcttagacagagtttcactcttgttgcccaggctggagtgcaatgtcgcagtcttggctcattgcaacctccgcctccctggtgcaagtgattctcctgcctcagcctcgcaagtagctggaattaaagacatctgccaccacacctggccaatttttgtatttttggtagagatggggtttcaccatattggccaggctggtcttgaactcctgacctcaggtgatccatcggccctgtcctcctatagtrctgggattacaggcatgaactacaccttgaatctcttcctagcttctagtcctgcctcgtgcactctctgtctgtagatgccctgggtcgaggccagcagacctggctctgattcttctctcccctctcaagttgtctttttaatgtcatccatctgccctctttaatcatgccttcttgccagtccaggctctttttccaccgattatttttgttcatcagagtattcctatctgcgaatctgtttctctgtatttgcaagatgatctgattttagttcttccacccactgccccatgatgaccaccccagagttaacatttcttaagtacctcctgggtaatttcttgctgctttcaccaccagatttttcagaatgtctgttgaaccacttcttcagcactgagtccttgtccccaccccagcggctctactaaagctgttttctagccaccaaataagatgtctttttcccagccctcatgacttttgatttttctgtggcatcaaactgttaaacatataaaagtcgtttctttstttgatccctgtgacagagttttcttactctttttgtcagtttttcccccagaaacttattttccttcttcgcaaatacggtttctccaaggttttgtttttattccttcctcttctcttcgagcaacttcattcatatttttatggcttcgttgttgttccagatgtcttccaaacgtatgattctgcaagtcgtcatgttcaacagcctggagacatttccttcagaattctcttctcttcctttcccttcctgcacagatattcaccccacccccatcctaacccagcgttttggctggcgtggcttaattgatctaggtagtctttttcactaaacttggtggtagcctcttaatccttccagcgtggcactcaggcagcgactgctagttggtatatcatttgcatctctttgttataygcgtaccaaataaccattaaagttgcttttctctgacttatacttcaggggttggccctgctttctgttatccaatttctggttgcctgaggggttagtccttgtcagaagttctggtttacttatttattttctcagacggagtctccctctgttgcccaggcaggagygcagtgttgctatctcgactcagggcaacctctgcctctcaggttcaaatgattgtcctgcctcagcctcccgagtagctggaattacaggtgcccaccatcacacctggctaatttttgtatttttagtagagacaaggtttcaccatgttggccaagctagtctcgaacccctgacctcaaatgattcacccacctcagcctcccaatgtgctggggttacaggaatgagccaccgcacctggctaggatctggtttatgatccctgatcatttcacyggcaccatgagtggagtataagctggagttattcagatttctctcactgttctgattctttaaagatctctacagaygaggtgtaggtagggagtatgagatatcttgcctcaagattgctgtaaagtatatctatgtccaaaagttgttatattttgcagtttacttgtcctttggcctctgggtatatcataaattaaatagaaaaacttttagtaaatamatattttaaaagtttataaaccactgcaggtaaacacaaatgcactttaggaaaagtgtgggctttactctttccctgaggccagttgggttgtgggggttgttaagacaaaacaccattccagagacatagatccttctttgagaaggccttgcctgtagtatccagagttttcgctattccaggcaccctagaatcattctaagctattggcatggaatgatgagttttatgacttggtgtttggcgatcctgggcagcttcccctctcctagatggggaatgcattatctgcactgctttcctcccttgaacagcagctgtgacaggtcacaagctctcaactactgggaaaaaggaaaaatgggctgcaaatcctttaagagtctgaactttgggtttgaaattggattgtaagtggaggtcaggtatgtgggaggtgaytgggccctggcgtgaaggctgctgctgaccagctgtgttaccttgggaagtaactcagcatccacatctgtatactgaagtggtagggctggccgatctstagggttcttctacatctagcgttccattttatttccctgattattaccgttattgctttatctaatgacactctcgtttaagcagcaaagaaagttctgtgggaaagatcagaattttaaagaggagtggagttaaatctatttgttggtctgtattgggatatttttaggtcagtgggaaagaggaggatgtcttggaagactctgagtgtagctgagggaacttggaagggcagacatactatttattgctgcccttaggtttatcggagcagccagaaaagagaattacttggtacaggctggcattccatcaagccatgttgtgtayggctgtgatttaaaagcataggctttgaaatcaggcagacctgggcgtccagttgtgcctttgtcaccttctggttatgtgaccttgaggaggataacatcttcatagcactggttttcctatttgtaaaatggtgatgatagtgcctcgctcatcgcattgctgtgagattagatgcaataatatataaaacacttagcccgtgttgtgcgtagtaattgctccacaaattagccttttaattacagcctgcttgctttggacagggctaggcatttgaattccagtacctgatttaattcacataatcatactaagtagtagaaattgttatctgcagattaaagaggagaagattgaagttcggaggagttaagtggttttctcaatgttacacaagtagtcagtggcagagctaggattggaaccagatcttcctgcctctgagcccctttccactatgmaccctgcctcctcgagtgaaggagaaccctcttcactgcccacatgaggctaggctcagcaggggatccagaagactggtggaggcaagacaagtcataagtatcctacaagatgctgtcctttttatagattagattctaaaaaactattgaaagttcataagtttgaaaagcccaaagtcacgttataccagctactattcaagctgccagttgattgcaggggraatggtcatggatttgttttgatgaacagctttgtttgcagccatgaaaattcttaacatgaaagttgatgctggtcatggtgcttatacctgtaatcccagcacttcgggaggctgaggcaggaggatagcttgagcccaggagtttgagaccagcctgggcaacatggcaaaactccatttctacaaaaaaaaaaaaaaaaaaaarttagccaggttgtgcagtggtgcatgcctgtagtcccagctacttaggaggctgaggtgggaggattgcttgagcccaggaattttgaggctgcagtgagctatgattgtgccactgtactccagtctaggtgacaaagtcggtccctgtctctaaaagacaaaaaaaaaagtttaaaagtagaggctcatgcaaggctgtgcagtagaagaagaggtggggacataatctcatgcacactctgagcrgaagagtcatagccagtaactgtgtagtgggatcttcagcagctttgtggggaggcasgggtgggagtggtggcattgaagatgggccttgaagacagagaaaagtgagagtggcaggaaagtgagcagctgcagctagtgttmcaagtgcataaaaccgaaacttggtgctatagattgagatgaattatggaagtaagaaagactgctttatttkttatttgttttagtgcctctgattatgccatatgaagacaggtcagagaaagcctaagaaagagacggatattgtattaatcaacaaaaagtattttttastgtttttatctttcctacacttttagagtaaacttccagtacccaagtgcttgcagttcttttgtctgtaccttcgaattttagatctgcactttccaatagggaagccactaccatatgtggctgttgagcatttggaatgtgtctggtctgaactgaaggaaatgtacaagacacactggattttgaagtgtagtaagaaagagtaagaaagtaaaatatctcattaataatttttaaatggatgttgaaatgataatattttaggtatattgggtcacatgaaacattaataaattaatttcacttgtttctttttaccttttaaaaaactttttagttttttttagagatactacatcacccaggctggagtgcagtggctattcccagacaagatcatagcacactacagccttgaactcctggactcaagcatcccctctcctcagcctgctgagtagctgggacgataggcaggtgccactatgcctggcttttttttacccttctaatgtggctactataatagaaaattaaaaatgacgtgtatgacatggcttgcattctatttccattggatgatgttattctagaggaacctattatattcttgttttttttttttttaacttttttttcttacctgtgtaccagtgtaccagtgcagttgttatattcttaaagttctgttatccattctaggattgcctgagagtcatagatgacttgagctagttgtatgtcaggaaatgtacctagtcctttggaagtgatagacrcctatcctatgtctatgactggttcatgtacatcattcggaacttcagatttttcatctacataacataatggagatactagaacagatatttcccatgccccctttcaatttaaaaattctgtgattctaggctaggtgtggtggctcatgcctgtgatctcagcactttgcgtggctgaggtaggtggattgcttgagctcaggagttcgataccagcttgggaagcatggtgaaaccctatctctacagaaaatacaaaaattacccatgcatggttttgcgtgtctgtggtcccagctacttgggaggctgaggtgggaggattgcttgatcccaggaggtcgaggctgcagtgagctgtgatggcaccactgccctccagcctggatgacagagtgaaaccttgtcttaaaaaaaaaaaaattctgtgattctagcttggagccaatgctccaagttttgttaattatttattaacaattaacagaatcaagtattgttaattatttctgrgatccatcataaggtctctactactctcttttccaagtatcagaaagtcagtgttatgtccttttacccctgggaattgtgaattctggagtggaaagactagagagttcyggtaggctaaagaaacctcctctctcccttttccttcccggcctatggrtccatctgggtatgtctgtggatgtacctgagcaaggtggcgagggcagctcttggaacgacccaagtatcacagagcttgaagaagtttcagttctttggatcatggctgccaagcttacttttaaatgccctaggcagggcaattctacaaactttctttagatactaattagttcttaaacrttgagaaatctgtctttccctttttggctctactaatgttagaacaaattattttctgttccttgataacttctagatatctttcttttagcagatcatcctcttrcayactgtttatccatctattaaatacgtatataatattggctagcttccaaaacaaaaagatgtcagacttgatctttgtccttgagggattcctggttaatgagggttgggttgatcaccaatgagaagacatggtcctgggtatcttgggaggggtattcagggcattcayggtgcaggtagggaaaggagatgactccatgagcacactcaggcagtgaaacatttatttttgcataagggtttttgatatttcaaagtgagacaaggtttcagttaaccagcaataagtcaaagtctgctctataaatatgttgatataattccatttaatggaacatcagtgtctggatagaagcttgttgctgtactgacatctcctttcatgatgccgatcatattgcagtatattgccattaaatttatttttcttttggaataaatccttagagtgtgttacattttttaaaagtaacaatatggaaagggggttatatgaaagtagttttaccagtttaaaaaacaggggcactgaaaagggaaagtaatcactctgcctgtggagcccattttattataagtgcctgaaactaagttatcctgaataaaatcttgacttttcttttagaatgtgggtgaataaaatatacatgcagaggtatttttggtagccagtgcttcttggctttcgatctgaggtttgtcggaatcctaaaatgatagggtactagttggcttaaattgaaatctcagatagtcggaccgattgtgagcacagaaatggcaataatatttaacatgcatccrctgtgggcgatgggtcattggtttactatgcaaacataayaatttgtctcttgaatgtgcagaagatactttaaagywctcaatttatttgccaacaattaggagatattttattaaaggggtataaaatagaaatacatagctttgtacactaagtgccaagaatgtgcatgctgaaaaagaaaaagcacacttttcttgattgtatttaacactgtgaaatttagatattyatactataaggacagcatatttgtggaagattttccttgtacatgatgaggaatatctaaaatatttaccatgaatcaatactgcttttataatacaaagtaaatcaggcaatttcatgccttcttaaggcatttctgataacaaatctataggtgagaagaaaataagtagggatatctctaatggtacttgttaatatgcaattctagccatatgaacagtacaggtgttgatgattttctctggrgagtagatggacgagatgtacatagtaacaacagtggtggcagtaatatttatataaaaggttgaacttactagcaggagcagcatgccagctgttgcctggaaaatagctttacattagagcagtgaggaattcttggtttctttctctcattttatctcccttcccccatgtacttccccaaagtattgcattttartttctgtgatgaaaaatcagtccagtgtgaaaatgggaaaacaatgctatgccattcatgaaggtagctragttggaaaacaccagcatggagtttttgctgatgtgctggtgcctgatgatgagagggaccccagctggattgtgaagattgtgggcacacacaaaattgataaaatgccttcacttagtttttgacagctttaatagctgactcagtccagctgtaagtagtaagtaaataagtaagtttcatttactaccatgcaagtaaaatggaaaagctcactataaattttaactgctaaatactatttatcatttgttcaattcattcatcactaggtataaagtttatttaattattcacgtatacactcagtctttcattcaataaatatttaccgaatgtgccagtatgcagtaaacatttactgaatgaaaaatttaggatatgatatatagagatgtacatcatgtacgatgaacagtggacaaggttgaaaaatgtacagtgtacacgtacagtgtagcagtgaacaaggttgataaaggccctgagcttgacagatgagacagacaataaacaaacttgccaacagacatgccagtcacaggtagctataagtgatgggacaggcatacacagggtgatgggagaaaatatgtgcacacacagggaagagtagtggggagaggggatacgacggcgrggtggatcctgggtataagatgattggcggaagtctttctaaggctgtaataactgaggtgagacctgaaagaataaatgagggagactttcaatgtgaaagtggtttcacatagtcagtggtgtctggtggactcagaactaaggtgattttgctttgaatgatgtcatttgtgtacagtgatgatattccgagttgacccaggagctaaccagttacaaaagacactggctggccctattggagagccttggagcaccctgttaggtcagtagtaagccctgaattcctgggctgttgtgagacctcaggggaggacctggggcagctgggtggcactcggagagcttggggacacagccatttctctattatggtatggaaatatttccctgcttacacaagcaatgtggcatgtgtgacagcttgtgtgtaattctctgatccaaggaatttttattaaccaattgtagttacagaccacctttatattctggccacttcacgtagtttagtggaaaaaagtaaccgttgaattctggttttcaatgttggcagtcacatgattttacagtctgagtcacatttggcggaagtactcttaggaaattgggtttwtttctcccaagaaggtaatcaacctaactctgtgtcttttataggcggcatcactgtccacatctccctaccaagatttatgatraaacagagaaaccatgtcttctctcygaatataccgagaactaccctttctatcactcctacctgcccagagagtccttcaagccaaggcgggagtaccagaaagggyctataccaatggaaggsctgactacatcaaggtgagggcaaacagtattaatgtatgcaggtacatacaacactaatggagtaacatgcagtgctaatgtataatattaatgtaatgtgcagtgctaatgcattaatgtgcagtatcaacatatgatattaatgccttaatgtactatatctctgaaggaatatcctgcatttatgagccttctcagttttttccaaattctctgttaaagagaaaggattcttgcttgctgaagtaaagggtggggaaaggctggattaatctatataatataggattggaggttaagaaaaatatttaagggatggaaagagtgggggatgttgctgaaaagcaagttttgggctttgttacatgaaaagctccaggccagcttgggtaggtgggggatggtggtggtggtggtgaaagggaacttggcaatagagaaaaaatgagcttttttttctccccttaaaattatgctgctgtaaattttgaattggggttctcctgaatgttcttcaagaaagatgaacaaataatgttttgcttttaaattattcttgactcccaaactaagattgtttagctctaggtctgtgcagaggctgagccacatggttcagtatattagcgttgcagaggtgtttctactgagggggtgcagaaaagttatcagttcagggttggtctataagcaaggctcttgcagaatctgccatggacaactcagttagtgacctgtgactggtgatctagtagagtggaaacatctttgagtgcagttgggcagtctcagattgtatagttttgtccttagctgagccctgaaagattgatgtgttctctgccttcccggttcctcatccctaaagggcagggttgctgtgaggtggagatgatggtgaatgttgactgttccagcacaatgcttgcacatcggtgcctcagacctggtgacttttcttcctattgctcccttttgcttcatgattttgtgctagtaaaggtcccagatggtctaggtgaagcagaaccattctaattcattctgccttcaggttttctccagaataggactggaaacatckgagactgtgagttggaggtgctcttctctacacaatgctgccatcttctagatccacgggaagtccagtctgggtaatggggcaggagcacccacaatgggagaaatgaggccaaaggattcctgagcttagtggaaaccactggacaggggcttgagaatgagagggagttgagggccttgtctgatgcttgacttgaatcaggccacttaaaaaaaayttttyttttaaaacaaggtttccttctgtagccatggctggagtgcaatggtgtgatcatcgctcagtgcagcctcgaattctgggctcaagtgatccttgcccctcagtctcctagtagctgggactacaggcatggaccaccatgcccaactaatttttaaactttttgtagagacaaggttttgctatattgctaaggccagatgattatgtttattctaagcatgtatcttaaatgatttggtttaagtgcagtgtttgtgtgtcctgatgtattaaaacattgtagtttatgctgctgttttttcaacctatgacttattaaacaatatgaacactaaagtttgggcttcattttgctgggaaaacagtattctttgtctctgagagtctaaagaccataataagaagtgtgaaccatttctgagcattgcttttgttttaggaaaccctggtcaacaccaagtaagagtcctaggcacatgtataagggacatgtaatcggtaggaaagggtgagagtagtactgaggggtggcttgcaaatatcttgttcggtctccaggtgtgggtctttttatctctttatatccaatttgcaggaaatgaagaagactttgtgagatgtctagttggcttcagacactgatatatttcctatcctgaaagtatagacagggatgctttgaaggttggttgttgcaggttgctttgttagctgcccaaagcttaggagaatggggacaaacccttggtctggggcggaagacctgccccaacacctagctctgaggcccccagatgcaactccaggtaccctccctcctcctgatggtgcttcgctaaacaaaaacttaccctctgacctgtcctaaattatccttgccttgtgtcacttaaaacaataaacatatcacccagaaggcccctctgcccctgccggagtcagagtaacaataaataccatgtacatcaaatgtggctaaagtagaggaaagcagattctgcaagaatttccaaaataagctgttaatgaacataagggccttaaaaagaaaaagtggcaggatcaaggttgtccacagggaggaaaaggagcagatatgaatctctttttatttcctaccctaaaaagagaagtaaaggggaaatgagtagaagacatctgtgttctcttttctaccacaatttcattatttctcaaccctgtgcctgccatgataggcactactgttcatagaccgagaacaaaattatgccactgtcaggaaatgtagggaagctaccatctgggtgttcccctagaggcttacaggggaagggatgcgtcagcccagtgtctgcacagcccagtgtctgcacacccttgtgtctgygcagattgtcgtcacccctctgctcttagcactcttattactggaacatcccacccacttctttatctaaacagtgaccctgcttagtttctgaggttggacatgaggctcccacctgctgaatgaaaaagtcacgtggtccagggctttgctgggtttggtgattaagcccagacacaaaaaaacacctggtttctggaaaggttatcatcccagcgtgaggcatgattataactgcacacaactcttactgaccataaatcttggggatttacagcaggtgccatgaggggaatgcttgtgatttccagccattcttagtgtgaaactctttcttgcagcccttggtaattctctggtgtagaatctgcctttacttcagatagacctgagatcaatttatgaataagaggtttgcacttccagcctcatttccccataggcatgtcaccatgtaaaacacttggatcccaatttgagacattctgttagctaaaccagctcgctaaagatgggcaaaatgagcagcatcagaagaaagaggtgagtcttcaatggtgttagacgtttatcctaaagggagtgggaccatgggtagagtggaatggaggcacagagtgaggagatagaattgagttcagacttgatgggtgtggctgaaaggcagacggcagggaattggtagcatcgactctatcacttatttgcaagactccttggtaaaccaaggagagtaagggagggaagagctaagagagaaagggcatttagtatcctccccaaaggtcaggaaagaaacaagagagttagtagcaggcttgagtcttgcactrcccattgaattttatatatatattttttgttcaaagagacacctgactctcttactcagagctgtaccactgggcatatacttagcctccatagcctgggcctgagaattagtgtgaacacaatgtaggtagagttctcggcactggacttgcttgggcaatctcagagcctttgaattgtctatactgtatttctgagtaaatttgtagacattttggccattatttcttcaagtaatttttctttcacggatgctctgttcacttcttttccccaatcttttctccccgtcctctgttcttcagattggatagtttctattaacctagtttcaacttcaagtttttctcccttatctccattttgtgattaaggccatccagtgaatgttctacttcacatattttgcagtttcagaatttgcatttgattctttttttatatagtttctatttattttacctaatttcctatcctttaattcattatggccttactttgctttccttaatgagcatggtttaaaaagctactttaaaatccttatctgctaattccaatgtctggtctgcttggagttggtctccataattatcttttttttttcttttttgagcatgggtcagattttgggttgatttttgtacagtgagaatgttgctacattgtggacaccttagatgtttgtttgcattcctctaaaaagtgtttttatctttggcaggcaggtaacctgatttgatttacaatgcaaactctgtgtcttgggtggccgctcaaatctcacttcagttctttagcttggaatctaccccatatatgtgaggttatgcagagatttgggcccagtttatgtacagaatttagggcttcctgtctttgactctctcatttccaggtttctttcctcattttgcagcatccgtggttgcttcaaacttggtcctcttttttttttttttttttttttttttggggagatgaagttttgctcttgttgcccaggctggagagcagtggcacgatctcggctcaccgcaacttcctcctcccgagttcaagcgattctcctgcctcagcctcccgagtagttaggattacaggtgtgtcccaccacatccagctaattttgtatttttagtagagatggggtttctccatgttggtcaggctggtctcatactcctgacatctggtgatccgcctgccttggcctcccaaagtgctgggattacaagcatgggccaccgtgcccggccagccttctggtttttgtagtcaagaaaaggtgattacctaaaagatctgccttttagctgccctcccttgcacagactggagctgaccttcaggctggaagctttgaatcttaaatagttaatgraaaattaagcaatgaagcctcacacagtgccattttctgcttccacctgttggctctccccagaatctacctttttagagctttaaagtcatttgaaatagtttgcctagggtttatatgaagtggtgacagatatttgcctcagccttagtgggagttgagggactcagagggcagaggagaagacaggtgctatgtaacttggattctggagtgcatgggcttggaatcccatctgttatagtgaaggtaaggaggactctgtgtcccataaggaccaggggcatgaatcaaaccctgtgattcagccaaggatcttttgcagcacaatgggatggactccccaagctgcctaggatgggagaatagtttctctagaagggtgccttttgacattgggaagtttgagaatagcatatagaagtgacaaagtcaatcaaatcaactgacaaagagcagaaccccatagaagacatggagaaaagatcatgaggagtggtatcacggaagtcaagggagagagtattgaaaaattgagtgagaggatggatgctatgaacaaccacagtgggataaggttgagaagcagcggttgggtctggaaaacaaggtgatgcttggagtatccaggagtgaggggaatcagatctgatgggtgggacatgaggagaggaaggcaagtctgtacttgtagacaacactttctggaagacagaagggaaaactggaggagaatggagctcagtgaggatagtgtcttgttttactctttacctttaaagatgggaggtaacactcaatggagaaaggaggcagtagggaggaagagagaaaagcatggcctaggagatggtctgcagatgagattcccgagaaagagggcaggggtgagagaggttggctttggccaagaggaggaactccttttaagatggattccattttaatataattgattacttggacacactaatatatcttcaagtttgcataaataaacattaaaaacaggtttaaaaaaagtgttgcatggccctttgtcatggtgaaaatcttcatttcccactgccaggctcaggaccctagctcactgttacgttatttcctctttccttttgtcagagagttgtcaaacacctttcttcagctttgctaaatgatttgaagtcaagttgttatgacttccccagcaggaccactccaactttttacttaactctgagtttaactcttggccttccctactctataacttttatagctacttacctaaaagaaacttacttctctgaccagtttctttttcttggttcatgtcacatgtgcacagagactgggaaatgtaccacagaaagagaggggagatccagtgttcytaaaaagaaaagctagttaattggagcaattctggggagactaaaatatagacttttcttttacgtgaatttaaaggctgtaagattatgtgtgattggggayatgcagttatgttgcggttaatgacaggtttcagtgaatgttctcaacataaaaacataatgaggaaacacataaattctgattaaattcactcctaagccacagtaactatgtttgggtaggttataaaaaagtcamactttaaaatttttcttctcttcagaagtagataccgcttccccccaccccccataatcatttgccttagttatggctgatcaataaattaaaccatagaggaacacttacaaaggaacttaaattttrtactggaaaaggcgattggcttttgtctttgggaaaccaatttcagaatagtctgtgaactggtgaatttggttttgggcttttgtctgctcttttccggtagaagccgtgggagatgcgcaataagcgtgctttagttttcaagagcctggcagcctttgaagggaggtttctgcggcatccctgagaggaagctggtcctcttggtcagagtaactgcagaagaggctgctatggactctgtgtgcagggtccctgagagtggcagcctcacaactggaaagcatccctagatgctctgaggttgggtgggctcagcacggcagctcaggcgcccagctttgttcctcactgcatgcccttggtacctcctgatactccttggaaatgaatagggtgtaggcttaggtagccatcactgagcacaggcttttataagggtttaggaatgtgtggtctcaggctgccttgaaacctgtccatcccttctgagagtgaggagagctcaacttcccttgggagcactccctttagaatgtacactttctgaccaagagtccctttccactcagctggttttcagatggagttttctgggcattttcatttgtctttgtagcctaaggacttaccctcttagttccctgctacaattggtttagtgctgaatagacaccagggtgtagtacttgctcactgagaacagcagaagtaggagctgacccttggctgcttgttcagtccattccctccataagccccgatatgtacagtcagcttccagacacttcaggctaacagcagggcccctaggaagggagcccaggctgaatgtcctataactgccgctaagatatatttttaaatctacccagagggtgttaggggagttcaactgaagcatctcccatttcctccttagagccctagagagactaattctcctgcttcctaacttccttctcccatcccactaagcattttcaggacccggttcgggtttactgacaatcatgtgtataattcacgcaagacaggttacagtggagcgtgttacctttgctagtcaagcatggctgagtaatgctgctccagattttggccaggaagtgggttttattggtgtttgggcctaacgttttcctgtccggaaaccttccccttcccttgacagggatgttctggcaagcaccatcaggaaaaatctaccttccctttgtccagttgaataaatgggttccaggcaaaaacagtttgttgtgtaaaacagacacccttcagagggaaatgttagcattgagaggtgggaagttgcgagtgccctggagggcaacacaagtccgagctaagccctggctccttagggyggttcctggtgggcattgcagtgagcatctgggcctttttatctgggatgctttggggagggactgcttcctgtttagtgaagaccattatactttttcgatcctattgttttggtactccctgaaacaatgggggcgcagacaccagatagcagagaaatgaaggagtcagggtttccagttatttcactgttttcctcttctgggttttctgtaggctaagtagaggaaagagataaacattagcaggagaagcttttgggaacacagagaaggtggcagcggcacctgaaaggaagatacctccgcagtgaaggggttgggtggaaggaaggtggagagcgcagcagtagaaacggtggcattgtggttggagtgcagggttytcaggtggggtggggatcgtgagagacaagggtgagtmaggcaggagccaggtccagaaaggcttataaattatgccaggaagttgaattttacctggaagagttttaaactggggaaagccatctgatttccatttagagagtttattctggccacattatggtgattgaatagaagtggtaggaatgaaggaggaagctcaggtggcaggctgttagtgagaaattgtcaggatctggaccaaggggaaagaaaaaccaatgaggtggaggggcactggtggtgatagactctggggccgtgaggaaaggaggtcaaagatgwatacaggtgtctgagttgggtgagaaggaattgatggtacccttctcaaaagtgggaaatagaggagaaacagttcgggggaggagggaaggcaggtagagtagaacaggacttctcagcaaatgtttgtagagttgggttgagcagaaaacataagccttatcgcaagccaaggaccccaacagcatgcacttgcttccttacaggagagattttgggcctcacaaagtggcaccagtgaaggtccaccagtatgaccagttcgtcccgagtgaagagaatatggatttgctcacraygtataagaaagattacaatccctaccctgtctgtcgagtggrccccatcaaacctcgggacagtaaatatccatgtagygacaagatggagtgtttgcctmcttataaaggtgggagagcacagaggggcagattgggggaaagacaggctgagcctgtgtgcgggccaggaaatgtgttttatgtgcatactcagttagtgcaagagttggcagactacttcctacgggccagatctggccagcagcctgtttttgtatagctggagagctaagaagagttaagcatttttttttaataattgaaaaacaaatcaaaaggatataatttgaggactgtgaaaatgatataaaattgaaaattcagtgttcatgttttattggaacgcagccatattcattcatttacgcagtatcgatggctacttttttttttagcatagtagcaaagttgagtagttgttgacagagacactacagtctgtgaggcataagacacttaatacctggctcttatacaaaatatctgccaacccctgccttagcttgcagtttgaatcctatattgggggaagcatttcaagttcaggctaagttagtttctaccactgattaagtgattgattcattcacatgtttaaaaaatatatcaaaatgtaacatacatatggaaaagtatacaaattataattatagagatcaataaatttgcactgaacaaatccatataaacagtacccagatcaagagataaaacattactactccatttctgttaccctccccaatgagaatataaccattattttaacctttaatactttaaattagtttcgccagttttgaactttatataaataggattgcttctttctttattgagtatctattgatattacctatgaggtgtggtcctagaaactgaaggaagcataatggcctgcccttgactttctagcctagtggagagacaagatacgtggtcatatgtgttttgctagcagacagccactctatggagctcagctgcaaagactgagaccatgagactggagaccaggtttgtaatcaataactcatgcttatgataccaacctttgccttgccctaggaggacaagctgaacagttcacggacctctaaatgctgtgaatagagagggccacttttatttagtcaagccaagcatttagggtgaagagggtggtggaggtagggaggttggagggatgtgagctcctagaagggcctctaattctgtcatcctggaggaccctgtgcttagttgagtttctctgattcttccaggaactgaagactggattggcgtgggcctcttcagcaacctgggctctgcccttttattttctttagcttcttcctctaacactcccccatagatagctacctttggtcaagccaccttttatcagcagtacaagaactgactaatattctgaatgttatcataccctgaaatggccccacctctgaagtctttgtgcacatcggcatcctgtcctctgggcttgtcctcttatctcctcccaccacgacagtccttggcctttttgggacctccagtccattgacgtcttaatcctccctcttaccaccagccgctcctgtgtctgtccctccccatggagtctctacttcatggcctatctttggagcccagctcctactgatagccgagagtccctctctcttcagcccttttgctgtttcctcctagcaaagccctaatcctgttttccccatgtctacacctgggcacacacctgagcatatctcyagtcttgtcagcttttactcattttccacagaaagggagcagagcagtcttctatacatggcaatctgatctgaccactcctttgtataaaactcctcagataatcatttgataaaatcattattttgtctaatcatatcattttatcaaacgataaaatcattattttatcaaatcatattattttatcaaatcatatgatcctattacgataaaaacccaaaccttttctgcctcctctgatgccttggaagtcctggtgtcttctaagcccctctgctccagcctcagggccttctttcaggtcccttcctacatttcttttctgcttcagggcatttgtttagcacatgtgatgccttctatatagaatccttctgcttccttaatctagcacttatcctttcagctagcagctgaaagatcacattctgagcccttccgccatgtcaggctggatgctatatgggtgccttgcactcccctgtcttatcatgcattgtgtacttttaatgcttcctttaatggccaggctgtaacctccaaggggcagggatctgtttgtctttttctttcccaattaccctctcacagcaggcaccacacaggagtccatacaaccaggtgtatgaccatgggtagggtgttggggggcacttttgcctctactgaatgcattcttctcctttttaatccagtgtttacaagaagaccagaaataaggcagcacagacattgagctagtgggatagaggaatgaaactgcagtaagcgctttccacgatgggtggagggaataagggactgtgatatggcatatccgatggcggactcgcctctcctctacactgtctttgtgggccctgttggtttatgaatcttagtatagggagagactcttcagagctcctgcctgtcagttcagttccctctcttccaccttgccctaggtgcagggagaggtctgcgagtgaaaaatgctccttgcttgtcttgggggttggcaaggatggaggaggtctatatgtagcatttaaagagaagtcctccctacttctccccagcagactacttaccgctcaacacacacacacatacacacacacacwcacacacacacacacacacgcacgcacgcatgcaccccaccacaccccagcagtacyctttgtttaatctctttcactgccattttcccctgtctctccctttgtccatacagctacatctcaggctgtcctcttcaaactacagaagagtgagtattccacagcttaaactgaatcatggctgacagggtttgggtctctgcccccatgaaatctcatgttgaattgtaatcctcagtgttggaggtggggcctggtgagaggtgattgtataatgggggcggtttttgatggtttagcacccccctgcccccttagtactgtaaaatgagtgagttcccctgagatctgcttgtttagaagcgtttggcacctccccacctcccgactcgcgctctctgtcctgctcctgccgtgtaggatgccttattgcactttgccttccaccatgagtaaaactccctgaggcctccccagaaacagatgctaccatgcttcctgtacatcctgcagaaccatgagccaattcaactgcttttctttataaattacccaatctcaggcatttctttatagcagtgcaagaactgactaatataatggctgacttccctactgacaaagttaaaattgagaaaatcctattttcttcctcagtttccttaaacttctggtacctcttaactgcttgcctacttaaacagagttaataaatgaacaccagtcaagtctgaactggactgctcagaaccaggcatgcatagatggacagggtttttgttcttggaacatgtgcatttgaggttggagttcatagttttcctctgcaattccgattttaaaacaaatcagtatgtagctaaaggaaacacttatagttagattaacctatgggtaccagtttgcaacatgtgtgtcttatgaggtttttttttgaatactactttcttagttcatttgtgctgctgtaacaaaaatasttgagagtgagtaatttataaataagacatttatttctcgcagttctgaaggctgggaagttcaagatcaaggcgctgataggtttggtgtccagtgagggtctgctctctgcttccaagatggtgccttgttgctgtgtcctcatgtggtgaaagccagaaggaaaaaagggccttggctagctccctccagtcattgtatagcagtgctaatccattcatgaaggtggagccygcatgatgcaatcatttcccaaaaggcctcacctcccaataccaccgtattggggattaagtttcagcacatgaattttggggcacattcagactatagcaaatacttttattctattaattgaagtggtttgtttgttctgtcactcacctgtgatagaagggcttcccaaactgtgccttgaatgcccaacatctgtattcccagcatcgaacacagggaatgacacaacaaagtgtgtcaagtgagggactcaatggatgaatggttctgaaccattgtttacaagggctccaggtgacagagtttggcatatctacacaaatccccacccaggctattaccctgtgggtcctggccaggagcagaagtgaggattgagaaggcccatgccacttaccatttggttgggtcagtccttaataaccccatgcatttatgaggggtcacgcccttatctcttggtgtatcaccccttgggtgacatgtttgtgtcttgtgaaaatttgctgctttcttaagtcttttccataacaaccttcatgttttatgaccatacgttgattctcttcctcctctaccacccaaagagaaaccaaagaccaaggttattaaatacatgtttcagtgggtgccatctagattttgtctatatgctctgcttacatttgttccacagaaaaaatatgaaatctttttttccccttttcactctatggccagcacctttactggggtccagaaaaccaccaataaaatatgctttagcggcatttggttgtaatttgtgacattttcaaaacactgtgcaattggaaagattgagagtgtaattacttgatgctcagctttaggtttagctgtttttttaaaggcacattattgaatggaatcccttttaaagaagttcttgccaattacccacatgacactctggccctgaagggctttactggcatatgaatagtttgtcatgtgaaattctgaggtttttcagggtcctgtagaggtttttggtaataaatgctgggtggaggaagtcgggaggcttggataataatgtggtttcaactatattgttgggtatcagaaatcacatgaggcaactttgagcttagaaacctgttttgttaacacttcatccatcacagaagagagccagaaaagccctgtcctccccacccccaagtaccttgagggagtgcgtaggcatctacaggtagatgcctccgtttcagcaaggccaggagtctgggggccggggtgggcaggaaacatgtggtttatattcagcaagatggttccctccaaggccccctaatgctttcaagatgctgatagagccgttaatggctcttggagaaagattagattttcaattaaaatgaagccaattttagataaatagttggtagtattatcagcctaaaataaacttaagagcstgctggtggatgagggggtggtatcaggacttctggagatgaggagtaaggagcttggcaaatcctcttcccaaaaagcaatgacaaaactggacaaaacagtgaaaatcaaccatttctagactctggaaatcagccactggtatgcaaaaaaattgagaagcatttattaaagaaactgtggcaccttggttattaacactaggagtctgtgatgttttattctggggctgcttccatcaccccatccccacccctgctgtttcatttatgtagtggctctgccggagcaggctaggctgtggaaacaagcagctgtgctgtcagtggggcctgacttgattgggaatagagtgcatmcccaggagtttcaataaaaacaatagtgakcttaatggcaagaaatcagggaagacaacttctgagttagtctgaggctgcagtgctagttgtggcaagcaacagaccagcaaaccagctaggaatgtaagaagggagmttcagagaatgagacagacacagtgggtcttgataagctcatatgtattcctggtggtcgggaaggctgtgcatatgggcaagactgtgtgcagactaaagggcaatcagaaagaaacccatctatcaactcatcatccctggttgagtagtctggaaggctgtgcacatgggcaaggctacatgcaggctcaagggcaatcagagaggagcccatctatcaacttatcatccctaatcatccctagttaggcctagtgcttgtgtaggggaggcatgagaaagcccaataggaagtaaaagccaaatgagacttataaactgcctgatctttgtatgtgtttttcctaacccacacacagctccattggcaaagtgtgaatgccttactggcttaaagttcttaagtttaacttctgaccaatcattggctgaccactaaactatgctgacagagtgacccttaagaagtcaggcaaggtggctcacgtctataatcctagcactttgcgaggcccaggtgcgcagatcatggggtcaggaggttttgtatttttttgtaaaaatacaaaaaaagaaaacaataaattatctgggtgtggtggtggacgcctgtaatcccagccactcaggaggctgaggcaggagaatcgcttgaacccgggaaggcggaggttgcagtgagctgagatcgtgccactgcactccagtctgggcaacaagagcaagacaccatctcaaaacaaacaagcaaattaaaaacaaaaacaaattaaaaagaaaaaaatgaacamaaatatcggtagccatacactgcagggaagataagactctatggaattagtgcaggtaagctaaacacaagtaaaaccaactcccaatggggatcagaatccagagttgctgcagcatattatctaaagtgttgtgttttacacaaaaaaattgtaagatgtgaaaaagggaagtatgacccatgcatggtgggggaaaaagcagtcaacagaaagtatctctgcaggagcccagatgttggacatcgcagacaaatatttcaaagtagctattataaatatggtcaaagaataacaggaaagcatatttaaagaaataaaagtatgacaacaattgctcatcaaatagagagtatcagtaacaggaaataataaagaggcaaatgaaaactctggagttggaagggcaataactaaaataaaaaattcgttagaggggctcaacagcagatttgagctggcataagaatcagcaaaaatgtggatagttcaatagagattcccaatctgaagaacagaaaaaaattaagagaaaggtccaaaccagactcgtggaataccataaagtgtactaacatactcataatcatggccccaaaaggagaagaagggggcagaaaaatgatagattaatggctgaaagttgccaaattttatgaaaaatgtttattaatacattcaagaggcacaatccaaatagaataagtacaaagagatccacatctattcataacatagtcaaattgttgaaagccaaaaacaaagatttggaaggaggcaaaagagaaatgactcatcacatatagaaaaatgacattattattattattattattatttttgagacggagtctcgctctgtcactcaggctggagtgcagtggctgcaatctcggctcactgcaagctccgcctcccgggttcacaccattctcctgcctcagcctccctagtagctgggactacatgcgcctgccacgacgcctggctaatttgttgtatttttagtagagacrgggtttcaccatgttagccaggatggtcttgatctcctgacctcgtgatcagcccaccttggcctcccaaagtgctgggattacaggcgtgagccaccgtgcccggcccaaaaatgacattattaatggctaagttctcttcagaaacaatggaggactgaaggcagttggttgcatattcacagttttgaaagaaaaaagtctatccttcaagaatttcatatctagtgatattatgattcaataatgaaggcaaaatacattcccagataaggatggagagaagttacaggtacctagcttgcaagaagtactaaaggaaatccttcaggctaaaagggaatgataccagatggcagcacaaatctacacaaaaagtagtaaagcatactggtaaatgtaaytaggtaaatatatacttttctttgttttcttcttaaatcattaaaaakatatttttttcttttaattcatttaaaagacaattacagaatcaatatttataaaactatgagatttattctgggaattcaaagttggtgtaacatcagaaaatcaattaatatgccacattaataaagtaacagaaaaaagccrcttggttgatagaaagcatttgacaaagttcaacactcataaaagctctcaacaagcttaggactagaaggaaacttcctcagcctgataaagggcattcacaaaaaaaatctgtacttctaaaacatcatacttaatgtgaaagactaaatggcttccccctaagattgagaacaaggctaggatgtcagctttcaccacttccactcaatattgtattggaggttctagctagtgcaataatgcaagaaaagcaagcagacaagtaaatgtatctaggctcaaaaggaaaatgcgaagctgtctttattctcagacaacatgatcctgtatgcagataacaccaaggaatccacaaaaattaccagaactaatacatgagttcagcgagatgtcagtactgaacaatatataaaaatcagttgtttctgtattctagcatggacaatcaaaatggagtcaagaaaacygttctctttttaatagcctcaaaattaataaaatcttggaataaaattttaaaaaagcaagtgtaagtcttgcatgctgaaagctaccaacgattgctgggagaaattaaaatctgaacaaaaatgatggacattctgtgttcatggattggaaggttcaatactattaaggtaaagttgtcccaaattgatctgtagattcaatgcaattcctatcaaagtctcagaaggctccttttcctttttagaacttggcaaagtaattttaggttttatatatgaaatccaaataaaccagaatagctgaaagtatttttgaaaaataagaactaagttgtaaaacttacacttcctgattacaaaactttattataaagctacagcaattgagacagttatactgacacaaagacaagtataatgaccaatgcaactaagttgagagtacagaaataagcctttatgtctattgtcgttracttctcacaaagatgcctaggcacttcagtgtgggagaggatagtctttttgatgaatggtgctgggacagttggatatccacatgcaaaaagacgaagttaccgcatccaaactcaaaagagtcagaaacctaaatgtaatagctaaaactataaatgtttcaaaataaaacatgggagaaaaatctatgatatcttgggacaggcaaagaatttagacatggcatcaaaagcatgatttattaaagatataaataggactttatcgcaattcaaaacctttgggcacttagaaagacaccattaagaaatgaaaagagtcaggtgtcaggtgggtgttttgttaaaataataagaaaatgaaaagagaagtgatagacttggaaaaaaatttgtaaatcacatacctggtgtaagatttgtatttagaacatgcaaagaattctataactcaataagaagacaatctaattttaaaatgggcaaaacatctcaatattttaccaatgaaagcacatgaagagcggataagtgcatgcagagatactcaacatcattagtcattagagaaatgtaaatgacactgcaagatactactaaatacccattggaatgtctataataatttaaaaacacagatgataacaaatattgacgaggatgtggagaaatgagaatgtttatacgttgctggtgggatgtaaaatggcacatctacttctccactttgagaacatttggcagtatcttttttaaaaagctaaagatagatttttctgtacaacctagcaatttcactttattatctacccaagagaaatgaaaatatatgttcacacacagacttcttcacaaaggctcatagcagaatttctttataatagccaaggagtagaaacaactcaaaatgtccatcaattggtgaatgataaacaaaatttggtatcatataatattattcaacaataaaaaggtgaactactgatacaggctacattatggatgaacctcaattacattacactaagtgaaagaagccagatgcaaaacgctacatattgggtgattctatttatatgaaatgtccaraaaatgcgcagttatagagaccaagagcaaattaatggttgcctggggctggagatgggagtaaagactgactacaaatgaagataattggtatttttggcatgatgcaaatactctataacttgattttggtgatggatatacaactccataaaagtcactaaattgtgtacttmagatggtaccttttattatgcaaattagatttcaataaaactgttacaaattgtgcctgcggactccactagtgttggtgtgtatacccaaggctyctgggaagcagcttttttttctaaccttttgtacagcagtaagcaagagaattccctatagattcagagggctcactagggctactttaaatctggtaatttatgggcccgatggggcaacctaggtcttggatgttagtcaagtattttgaaagaatgccagcagtaggccgggcgtggtggctcacgcytgtgatcccagcactttgggaggccgaggtgggcggattacctgaggtcgggagttcgagaccagcctgaccaacacggagaaacaccgtctctactaaaaatacaaaattagccgggtgcggtggcacatgcctgtaatcccagctactagggaggctgaggcaggagaatcgcttgaacctgggaggtggaggttgcggtgagctgagattgtgccattgcactccagcctgggcaacaagagtgaaactccatctcaaaaaaaaaaaaaaaagtgccagcagtgccaaggcagttgaatcacatggtttgtcatcccatttttctcacctagactttcagtcttggtgtgctggccctgatggtctgtgtggcaaagccagtttcaaaggcttacagtgctgcctgaagacagtatctggtcctcaagatgcatggaggccatctctactgcagatttccttggggtccaggcctcccattatgttggccattccagccccacagcagaggttcctctggagatggacatctagattggccagttcttytcattcttcaaacattctgaagttcttttcctcctgaaaatcttccctctgattatttttttctttaacctttactccatstggaaataaaatgcccctaagtgtgatatgaggtatcagaagaacatggctttggagacaacaatacggtttaaattccaactcaactcactagccatgtgacttttgggcaagtttcttagctcctctgagccttgtatttagaaatctgtagaatggagagaatcatacccatcacaaagggttattgtgaagatgaaacaagatcatgtatggaaagacttgagcacaattgaccgacatgtagttggtattccctaactgttagaaccagagagtagagtgggtcagatcgtgggctctgggtctgaatttgcatttgtgcttttccacttctagccaagtgagctgggacaaattccctcattttctgtatatctgtttctgcatctataaaactggcattaatagtacccaccttattaggacagtctgaagattaagtgagttaatatatacagcacttagaatactgcctgttatgtaataagttttatataagtggcagccactgttctctcaccacccaatacaatgccctattcccttggagcagcatatttgatttatgtggattacatgtgaggattacagggacacagtgggctgtcactccacagacgaccaggtaggcctggttcatctggctggtggcccaccagtggtgggttgtgaattttctatctcactacatcacatgcatcttctcactccttccatgctgattcagagaaagtaccttctccacagaagaaaggaagtgttgtcagagtaagctagtggttgaacttttctgcaggaatggattccctggatcctctcacgaccatggaccctctaagatccctgcatgcagtattgtggggtgtgatgagagctcctgtagatttgtctcttctgcctgcaagtaccataaagttgacacatcaggtgtttgaatgaagtggtagcagggatgtgctctgttctttctttgtctcaaagaacacttcatcggagactgccttaagaccttggggctctgtagaatatatgcaagttggttgacttgatttattattaattacctcttctgctttaatttcagctgattatttgccttggaaccaaccaaggcgagagccacttcgtctggaacacaaataccagccggcatcagtcaggtttgataacagaaccacacaccaggacgattaccccataaaaggccttgtgaagaccataagctgtaaacctctggccatgccaaagctctgtaacatccccttggaggatgtgactaactacaagatgagctatgtggcccaccccgtggagaagcgctttgtgcatgaagcagagaagttcaggccctgtgaaatmccctttgaaagccttaccactcaaaaacaatcctaccggggcctgatgggggagcctgccaagagcttgaaacctctagccaggcctcctgggctagacatgcctttctgtaacaccactgagtttcgagataagtaccaagcttggccaatgccccggatgttctccaaagctcccatcacctacgtccctcccgaagacaggatggatcttctgacaacagtgcaggcccattacacatgscctaagggtgccccagctcagtcctgccgacctgcacttcagattaagaagtgcggtcgctttgaaggctcttccaccaccaaggatgactacargcagtggtccagcatgcgcacagagccagtcaagcccgttccccagctggacttgcccaccgagcccctggactgcctgaccaccactcgggcccactatgtgccccacctgcctatcartaccaaaagctgtaagcctcattggtctggccctcgaggaaatgtccctgtggaaagccagaccacctacaccatcagctttactcccaaggaaatgggcaggtgcctagyttcatatcctgagcctcctggctacacctttgaggaagtggatgctttgggtcacaggatatacaaaccagtttcccaggcaggctctcagcagagcagccatctttctgtagatgattcagaaaamcccaaccagagggagttggaagtgttagcctgattttgaaaaayagtaatttagaaattacacagtacttttaaaagcagacaactgagaattatttgttggacaaaaaagaattccctaaaatgacaaaaaacaaaaaacaaaaaaccttcaccacttccagagcacttgaataaaatgagaatcacttgactcagggaaaatgacatttaatcaccggctaattaactccccttaccttctcctttactgcatccccacmccgtttcaggtcctttactttgtgcttatggaatcaaagttggtctgtgaggttttctctgatccagatgtattttattaatttaatcattgtatgaactgacataatgattaacccttgccaagtatgaagcgccaaagaataaattttattttggggggaatgaatctgtaggctggctatgcagagagtagtccgtattgcttgggacctttgggagattttatactagcacccccattgtgtatcagtattggtggaggtgccttgggcctggtctggagtcttgttttgggttctctctgtgcagggctgcttcacaaagcatccttctacctcttcactgcatgacataccagcaagaatagtgctgttcgatggggtgtggatctctttagtcacaggtgatggagggaaagaaagagggaggcagtgatgcatgaacctaccagacctctccccaaccccaagctggtacaggctatgattccagggagaggagggagaaaaagcacccttggcaaccaggcagtcgacgcctggtccttgagctgtgagcaaaagctgtgggctcttctaaatgctcagagcctggaagaaatttccccaggctggcctggtttctggagagcctggatgtgcttgtcctaaaatgacagctgtgaccagacctgtgacaaagtttaacatagtggtgagccacattccgccctggagtttctctcctgagcctaaggtttttaccacgtttgtttctaaggccaagtaatttaaagttatcttatttatatttttttaactgagcaaaattgaggagggactttgttaaagagggtccgatacagccaattaacttgcagatttttttttttaactgggcagaattgaggaaagactttgtgccagttaggtgagctcatgggtctgggtgagcctcacagagggacgtagacttaagtctgggacacttgcctctctcgagttcacagaatcctgaaatgtactccatggtctcagggaacttgggagtagcatggagaaggtggggggagttcagctcatgtctaaagccttgggcttgggctcagggcctggtggagggaccaggggcctgttcctttctatctagggctctgtctttccatggctctcacccacctgacccaggcttcgcaggtccccacaccttgcatcctcaccatgagctttgttttcattgttgggttgggatctatgttatttaatcctctcattggtttgtatggggtctgagtgcctgcccttaggggtagaaaggctcagagtggttaagcacctttcccaaggccatacagcacggagcagcagagccaaggtcagaatccaggttttctgacccatggctcttccacaacaccaggcgcctcccatcttctgtgtctcagatctcctggctccacaaaccacatcaaaccaccttctgtctgagcctactggagttcattaagctaaaggattacactaagaagggtaggttttattattactacttttttttttttaacaaatcaaaaaaatattggcacttcatttgaaaagccaaatagtgctaaaatgcttgtaaaaatacagcaatctcttatgtcccagctgcttagccttcccccattgatatttccccagagagaacagttttaaattatctattttgctaatacttctattcacattcctaaataatatgcatatactgctatgtgctgattcatcaactttagacatgctttgttttggcagatttctctcctctcagtataattatatgacagtgtttggtaacatcaaggctaataagctttcctaattttatcaattgacaggaagggaagaagctgaaggatgggattgacctggctgactgaggagcacagaccctgttggagtgaagaattttgtctgagctttgcctttgtaatgaggccatcttcatggtgaccccaggctggagaggccaccctagggcatccctgccttgcctgttcttcttggtcttaagaaaccaactctctttgggaggccgaggtaggcggatcatgaggtcaggagattgagaccatcctggctaacacggtgaaaccctatctctactaaaaatacaaaaaattagccaggcgtggtggcgggcgcctgtagtcccagctacttgggaggctgaggcaggagaatggcatgatcccgggaggcggagcttgcagtgagccgagatcacgccactgcactccggcctgggaggcagagcgagactctgtctcaaaaaaaaaaacacaaaaacaaaacaaaacaaaaacaaaaaaaacccaactctccccctactacctatttctttttttttggcttccaaattaaaattttcttaatattatgaaagtgattaatacaaataaaacacttagaaaatacagaaaaaatacaaagtgcctatctggggcctcttcatgttagtgaagagcatgcaaggtttttggagtccagacctggctttgcaccttggcccttgacaccacaagctatgagagcttggtcaaattcttcaacatgtgaaaatgtggataatagcaatcctggcctcatggttttgctgtttggattgaatgatagtgtatatgtcagtcacttagtcctgactcacagttaactctcattaaatgtagatgaggatgaggaagacaattgctgaattgggactggctgaatctacttatgatttcatcagtcagtgtttacaagtgtgcaggtaaggataactgctcattttttatttaacatattttacaaaataaaatatatgtgtattttcctcatacaggtgaattactctttagttgttttgtgtcagggttgctaactatgtttcctggaaatctggtttgagaaagcaactgggccacgaggaggaaagcggagctgagcagatggggcactggtttccttctcagttctaattcatgcacctctttagcaggtctgtgtgttgggcttccatattgagtttgctggtaaaaggctctgtgatgaaaggacaggcacacacatgtgcacacactgccctgtacctggtatgatctgattcaacaaatctgacaacgggaaaccttcaaacatgttgtcttctctcaaaaatgtgtgcacatgcttatactgcatatcttccacttacgagaatgaattgggagcttaatcacctaccctagcccagggttcccaaaactttaggtgtgccattaaataaaaatgactagaggtcaaagatattaatataatagaacagaagggaaaaaagtgttatggctatgcaggaaggctgtttcaatgcaggattgagtaggttcttggggatgaggttctggggcagaaaatgagagtcgaacttttacagctgaaagatggtgaattctagtctatcagaggaaaggacattctctagtgaggttgattggctggtaagagtgggctttgtgtggagccctgggctggctggaagtggtctgctggtttagggtacggtgcccaggggcgtctgctgggcatgcagtcctcttaagatggtggtatctgacaacctcaggctatgggcaggtctgccatcctgtcagcaggctaggtgaccagggtaggccttgtcctttggttcacgttacactggggycacctgtgtgggtggagattctggtactttgccttcattttggggggatcaggaattcactttccaatcccctccccattaaggtctgaatatagcaccaaatcagcttaaaggactcttcattctactgctggctgcattttctcaggaatcaatgtctttaaagatgagcctcattttttggcctggcttcaagctcttgtgccggacagtggttggaggatggggaaggataggtcccttgttagtgatgcccctgattatagcaccacttgctcccctgccctctgtggtacctgtcatttcaaatcctgagccccaccagcttctgtccatagaccccattctctgcagctccagctccctggccgtgtcttcattccaggctgtggcttcctcttatacatttgtcagtcatcactccagcattcacctgccttcttcaggtttcttgaaatcccttgtcctttgaggacattcctcccattttcttcatgatggcattttatatttcattattcctctgctgtggtttagtatcatgtgagtgaggagtgggaaggagtaagcacaggcaggcagcccgttgctagacctggcctagagccagttggagggggtgaagcgctcatgggcttttaccagagtcttctcaactgcaaagcatacctggagggtgactttggctctgactgggcagaagggcaaacctggagcagaataagcaccaggctaactggtgtgtgcaggtgaagagaaccctgggaggggttgctaacccctgaaccccaggccattccctgaggctatgctctcccacctccatcctctgctccagctgtctgcctccacaccctctcagatagcatcagcagaccaggggcagctgagcagacaccacagcccaattctgacatcaggggcaacagtcctggctggggtctgagctgagggagccagcactgcctgtcccatcttagggtttggcttttgtgtgtgacttctaactgccttttcattatagtctcattgccctaaaattgaaatgaagtaacgtagatattgagaataagaccctcctttttctgccttttttttttttttagcggagtcttgctctgtcacccaggctggagcgcagtggcgcgatctcggctcactgaaagctccacctcctgggttcatgccattctcctgcctcagcctcccgagtagctgggactacagatgcccgccaccacgcctggctaattttttgtatttttttttagtagagacaggctttcaccatgttcgccaggatggtctcgatctcctgacctcatgatctgcctgccttggcctctgagtggagctaactggcccagggcaatgagatctgcacaaaaacactttccaaaatgactcgtccagaagatgaactgagggatccatttcctctgaaagtgctttttagctgtgcagttgtcaagaggaagtaggtggagcaggcaggggtgtgcacagtcctaattgaggattaatgacctcctggctcctcagacctgccctgccttcacccaggtccacatctggtcagcagccctcaaagtgggaagacagaggcctttctgagcataaatgctggggttggggcagacaggggtgttttctttggcagagcaggtttagaattgcacatggctgtctgagcaggtacttggctcctccccactttgagggtgcaacagtagccccggagcccgtgacccttccagaacatgtgctccggaatctggaaaacgcatcagggcaatgcgaggttaggcccttctttcagccacactactgggctgcaggtgccctggttcttgaagcctctggatccttagatacttacatgagaaatcttgatgcattttccttgtcaaccctctaagtgtggctgcaaacccagcctgatgcaaataaaaagacttgagagtttccactgctgtgattgaatctaacactgattttcatgttacccagaccagccagcctgcctgcctatgcctctgcctaccttcttaaggccaaggctatacttacaacgacaacaagggagtttagttacctccctgttgcttcaaatccccatctattttattataagatcataaaacaggggagtccgcaaataccctttaaacaggcagtgacttgagagttataggcagaaaaaaatgcctgaaaaatgactgaaatttgacttctgtgccaatggatg

SEQ ID NO: 6860 - DNA, 38146 bp, Homo sapiens
tcttcttagtggtaacagtgataacaatgtctcttggtggccaagaacttaactcgtagatgcatcatggtctcctggtatcatcacagcacttgtcaatgggttatctattaatccccattttacggttgagggaactaaggctcatagagtttgtgacttgccttcggccccccaaccagtgtgtaacagggtcaggttatcaatataggccacctggctccaaccccggaatccttaaccactgtgctgtgcaactcctgcaggatgctgcttcctgtgtcactgtaggcttgtagactccagcttccaagatgaatctaacctcgtcaacactcagctccccacaatctggctcctgtctacttccctagcctcatctccctttgttgccccagcaaacactaactgggccgccactctttatcctggtccaactcctttctgctcttgcctgtctgtacttactcatccttcaggacttatctgaaacgtcacctcctctaggaagccttcctgatccaccacccataagccaggttaagtgaccctcctccttgcttctatagcaccctttgtagcacctgtcacactgcactgagttgctggctttcttctctcttaagagactgtgggctcctcaagggcagggacaaggacagcttcctctatttcctgggcctagtgtggaacctggtatggagtaaatgcttcacaaatgtctgctgacctgaacttacttagcgaatgtcagagcttcctggaaggggacttccagtaactataattgttcacatttgcaatatgctttgaggtatgcaatattgctttgccatatactttgaagctttgatttgtcccctgccttcataaagaatttgatgtggtacctagtagaataacaaacagaaaattcagagagcccgtgccacaatgacggctaatgtttattgattgactactgtgtgccaggcatatttctgagtcctgtcacatggatcatttgcgtaattttcacaaccataggagttgaactcggttatcctcacttaacagatgaggaaactgaggctgatgagtgactgaagaacttttccaggattacccaagtaataaagggaagtgacaaggttgacattaaggccatctggccccggagttttgtgcttctcaaatccctttcacactgattatcttattgactcctctgagattgatattgttcccagatattgatattaagaaaaatgtgtttcagataagtgacttttccaagttcagcgtgccaggaagtggctgggctgggttggtggtctatcttacgcccaggctcgctccgtcacttccacatcgctgattcacacgcgcattttgcaaacaaggacactgaggccaggagaggtaaattgccggcctagggtcatacagtttgtaccccattctgtgctctttcctcaaacaggaaatacctaggaagctgatggggtgagggtaggtcctaggcttggaaggggggtgctgccgtgtctcttcccattgtccctttctcatttgtcacaatctgaatgtttaaatttcgtatttagtatttactctgaaatggctttcatctgatttcccccttgctcaccaatttagctgtcaaagtaaataaatgtgaagctgggtctccagcctcccccagctcacattaccttcctagaattactcccyggcagggtcgaaccattgctgggggcctcccacagaattatccagttactaatgaagcctctttcaaactgaacccttgggcctagactcaaatgggggaagatggcaaaattcaccccagaggaccagatgaccacatcctgtttagtgaccgggagaagaactgcaaagtgagaagatgccattattcatgtagggtgcttaatacagcttcagggttgtataaatgaataaatctacaacactttaaaaaatattagttctttttttttttttttttttttttttttgagatcgagtgtcactctgttgccaggctggagtgcagtggtgcaatctcggctcactgcagcctctgcctcccaggttcaagcaattctcctgcctcagccctcagcctcccgactagctgggactatagccacctgccaccacacccggctaatttttgtatttttaggagagactgagtttcactatgttggccaggatgggcttgatctcctgaccttgtgatccacccaccttggcctcccaaagtgctgggattacaggcataagccactgcacccagccaaaatattagtttttaatgtatagttagttgtcacttcaattctgagaggtcagtatcattattccccgttttgcaggtgaggaactgaggctcagagaagctaagtgactcaaagtgacccacagtttgtcataggaagaaatcaagtatcctaatggaaggtactatgtttgctaatcctaattttgccaaggtcactcctatctggactctttttcctgatggaaaaagatggagtcaggagtcattggaagagagatttcttttccaaagtaatttcrcttctgtcctctttgaagttaggcaagttctgggctcgaataatggttctgcatcttccttaggtaagttattcaggagaagatttgattttttttggttgattcatcccctgccttcataaagaatttgatgtagtacctagtagaatcacaaccacaagattcagccggtccattgccataatgatggctgtttatcatttgcttactgtgtgcctggcatatttctgagccctattacatggatcatttgcgtaattttcacaaccataggagttgaactcggttatccccactttacagatgaggaaactgaggctgatgagtggctgaagaacttgtccagggttacccaagtaataaagtaataaagggaatagaaaacagatgccaaggttggcatcaaggccatctggccctagagtctttgtgcttcactactgactttactgcctcttactccagtttttattatctgagcacttaatcagaattcaggagcagaattgcatagtaggtaagagtttgggttctaaaatctgagtgccagagcttcagatgggactcctgtaagcttgtttcctcaactataaaagaaagataataatataacctttttgtagggtagttgcaaggattaaagaggataatgcgtgtaaacaacaaagggcttagcacataaatgctcaataaatagttattattgttatcactctaggagcacatgcttcacattccccctcattagagtgcagcagcttgtttgtccagcctctgaacctttgtggtcctctctctacctgaaatactttcttcttctccctgaacccatccaaatttcacctgccctttagttttagctcaagcctcttccatggctcatgtctaagaagttttgcaaagccagtacgatcttcatggtcttctttcctggggcccttctgcactcacaaatctggcatatgtgcagcattctataacgtttattaacctttcaattcccccagccacccaaaggggaggaagagaaggaggtaaagcaggtcctattgttattcccattttgccgatgagaaaacaggctgagcctataagtggtgaggctgggagtcacatccaggtcttttaacagataatgtggagtgtgtgtgtatgtgtgtgtgtgtgtgtgtgtgtgcacatgtgtgtgtgcagaaagtaaacatggtcatgtctgcagcctagaaatcaagagtatgagctctaatgtgagatgaatgtggttttaagtccttggttctggcaattagccatgtgcaccattttggatatatcacatgaactctctgaacctcagtctcttgatcagtaaaacaagcacgctgagagatgctacctcacgggattattgtgaaaagaaaatgagatcacgattgtaaaatgcctcgtatcatgcctggcacagattagtagctgtaataactgggaataatcccagtagtagctgaaattattatgtgcaaaggagatatttgagagggaggggttgttcttctgtattcatgtttgagaatgcatgtgtatgtgtgtacacatgtgtacctatgcatacacctcacccgctttcacattgcaacttgttctcttcgtataaaagattagggttcaaagagaaactctttccactctgaatttctgtgtctgagagcaatgaatgactgggatgcagagggcgggaaatgccattagctgaggctggggctatttttgtgtaccttgatgccagtaaaggaacagatatttgtatctttggggaatatgggtgtggatctttagtatcgtgttggtgtgcaggcatcctctactacctgcgcctgtcagaacctgcctgtgtgtgtgcaaactgagactataactattgggaatctatggctgcagaagtgtgtgtgatgtgtctgcctataaatgcctatcaatagttgtctcaccatctgtaaggatgtaagtacatatttgagggtgcctgagtagaggacataaggttatacatgggtttggagctctgtgaaaatctgtgccctcttgagtatggctgtgtgtacaaatggaagaacaattgtgtgtgggggggtgtttacatctgtaaatgagggcaattatggaggtgatgacatgtgtgatgtggtgagggtaggctgtcatggtgtctgtagggctggatctatgtctgagtgtgcttatttgtttttagatgatgtatgtttacatgtgtctctttaggctcagtttgtgtgtggagaagggggctgagactctaagtgtccacttgtgtatgctgcagggcgttagtgtgtgtaaggctccatctttgggtttgaaggttctgtgtctgtgtgtctgggggcagtgtcttctgtctaaatgcctgggccttcctgccttccctaccattctcattgtcagtagaaccctagagaagaagggatgggcattggactgtgtggttaagcaaatcctgaagggaaggggaatgtgccaagcaatcccttccaagagaattcagggaaactaccctcccgtttcacctcagtccctgggagctggtgcactgtctggttcttatagagcagaggtatctgtgcaggtgtgtgagagtaagtgtggtgcctcgtgcccgtgtaaatgatgtgaacaggtaatcacttacattagtgtgtacacaaatgtaccaggcatgggattgcatcaacacagtgtaataacgtgtgacctcctacggaatctatctccgcagatggtatggccatgggtccctcctgtacctgtgagtggggcagtgtctgaggaagatgggtgccccttgagggaggagcggtagtgagagctgggtggatgtgtgcccgccggtgcctttgtgtactggcgtgtctccgagtctctctgtcggcagctctgagtttctgtgtgtctctgtgtctgtgtgtgtgtctctctctctgggtctctgcctcgtcgtgtgtgtcttgctctcccttggcggggaggggattggtcacgcatgactcatcttgaaccgagcggggctccagcggcagggcggccgccgttgcagctggagggggaggaggacaaggaggagggagaggaggaggaggactaccaagagggggaggaggagaagaaggagggggcgggggcctctccaagtttgtcgggaccttcttccgaggcagcggcggcagcagccagggaggccggggctgcgcgcgggccgggggcgggggctgaggccgggcccggggcggcggggccggcgcctcggctctcctcctgctcctgcagcagcctctgctcccactgcggctgtggtccccctcggcgcagctctccgcgctgcgcgcccgctgagcccgaggttccccggcccatgtactggaagcatgagaacgccgccccggcgttgcccgagggctgccggctgccggccgagggcggccccgccaccgaccaggtgagccggcgaacgactgggtgagcggcccgggccggggtcgggcagggtccgggacccagccgggccgagcagggtggcgggcggttgcaggaaggaggggtacgagggtgcgcctgtgagtgtgtgcttgtgagtgtgggagcgcgcgcgcgagcggggggggggggtcgcggaaagcgggaacacattatgcaaatgttggaggaatttctcaaaaagcgatttagtaaagacacaggcgaatcaagaggaggcgaggccggtattgtccgtctgaataggcgctgatagcgccgatgcgccgggggttgtgccggcgcagcgctgagaatcccgacgcggggccggtacccggcgcgccgaggggctggagggtgctttttcctccccttgagcgcctctcttttctctttttggtcccgtttcgccccgatctcgctctctttttgctccgggtttccctccgactggccctcgaaaggcgcctgaatccgtgtcaatatagctgcttcaatttcgccgcgcgtgtcaggcgggcgggcgggcgggtgctcaccgcgctcggggttttcttttcttcaaccaccctccgcccctcacccatctcttttttattttctttctttctctcttttctcctttttgcattttgtgccgagaggagaagggagcgaggaaggggagtggggtgggggggcgggtggagagagaaaaaattcgatttttaattactaccattaaaaaatcaaatttgcaattctttgggcggcctgatggatctcactgattgacagttggaattgacactctggctacctcttatcttgggcattcacgacaatttctaattgcaggtagtttgtgtgtgtgtgcgcgtgtttttcttcccccctcagaggcttggattgcaagggaactaagcgattacttcaagagccacgggttaagtgcagggagagggggagagagagggaaaaaatccaatccaaattcaaattgcttcattagagagacaccgcttttgtggggaagggctttaaatgcccactacaaagttaggactcattgttcggcgccggtttatataacaggcgcggggaggcgctgggctcaggctgtgcggagccagttcagcagccgccgccgcctgcgttccctccccccctcccccaggtgatggcccagccagggtccggctgcaaagcgaccacccgctgtcttgaagggaccgcgccgcccgccatggtgagtccgtttggccctgcctgcggtgcccagtcctccagcggcccggccctggggacctggccaggttttccggccacgaactgctgctcacgctctgggggactcccggcgggcgccgcccctctctgagcctcggttttccggcagggaatgttggctttaaccgctcccagcacccagaatgcgcgtgttaaaagttggggccgtcccttcctctccaataggcccttccatccctgtccttcagtctacggcgcattgtcctggggagatttcgttgtcaattggtgctcgggggccccagatttgtctccaaggcagccccaactctgggtgcccggatcagcgctcctctccttctctcccccgccgcaggctcagtctgacgccgaggccctggcaggagctctggacaaggacgagggtcaggcctccccatgtacgcccagcacgccatctgtctgctcaccgccctctgccgcctcctccgtgccgtctgcaggcaagaacatctgctccagctgcggcctcgagatcctggaccgatatctgctcaaggtgagacaggggtaggtgttgcgtgcgtgttgtcggggcgtgggacgcagcgcaggagactgcagggaagcaccgcaggtcctcttacttccaaatcctggctccactgctgcccgactgcgaagctttgggcaagacttagggtctgcctgagcccccgggttccgtctgaaaaataagaagagtttatttccatttccctgagtctcagtattacgggagaaaaataggggaatcgcatgcaccttctgagcttcagcgcctctgactgtaaatgagaccgggaaggctggggcccggagtgaaagaggcccgcgctgagccgacctccgtccccgccccgtccccaggtcaacaacctcatctggcacgtgcggtgcctcgagtgctccgtgtgtcgcacgtcgctgaggcagcagaacagctgctacatcaagaacaaggagatcttctgcaagatggactacttcaggtaggctgcggccgccgagccagcagtgtcgccgagggcaggccccgggcgcattcggaggccacttttgcggmgtgtggtctctcctccagaaccccggcgtcccgagtgcacttccggcgcgcagcgctggtccaacctgccggcgctcagcggcgcgaacccagagctccaggcagcgcgccagtgcctgcacaggtttgcgccccggatctgccttcggtcctcgcggtccattgggtttcggtatcgtctctggctctgtctcgggtcctgcctaagtctcaggcttcagttctgacctcgagcgcctcggtggagctctgaggtccccatttctggcccggacccactcggatcccagccgtcgtccggctgcatttccagtgcgttcgggcttcgagttccaaccctactcggacgtcattcatggtggggtctctcgcgggctggacgctgagctgggcttcggactcttgccctggctctgaccctcgctccgctctgggttcgagtctggtccagcccaaagcaccagcgccgcaaccgtctcagatccgatcccatacccaagcgcctcgtcctgaaccccaacctctgtctccggctccatctcaactcattccccggcgtcactggagtgtcgcattctgagcctggggtcatgcgcaggcccccagcgcctgttccagtcccagcttcgctgttgttttggcccgactttggcctctccagggtctaggccttgcctttaggccgccaggatgggaagtgggagaactgggcacccggagccctgagtgggattaccccgggctgcgctctccctactgcaggccgcgtccagcagccgagagcagccaggcgcatcctcctgtcctgccgcgtcttggccactcgcctgggcctcgcttctagccatgaagcccggacctgacctgattatggggtcgaggtcactgcagggtcatggccttgtctgctgatcccagtgggaggcatcaactggcctgaggcttggaccaccaggcctataggatcagaggagaatggtggagaatyacttcctgagagggatgcttgttcccaagtgctttctcaaaaagtggagaaagctgcttccctataactaccctccaacccacagacatctttcctatccttgcacaggaagacgtcatggcttcagtcttcctggccagacccctgccctagaaagagcctctgggagtcagggaatatggtggaaggcgatctcctcctgtgcactggcattgagcctccagcgatctggaaagagaagatcttgagtctagggggaggttggcagcatttggggcaagggtactctgaaaaccatgagaagcatggttaaagagacggactcttcctttatgggatggatgtagaagagtgtgcagctggggtggggtgggggcagctcaaccaagtggcctaggactcagtgtgcaaggagtgcctgtgtgtctgtattgtctgggatctgtgcagtagtgctggggaaagcatcactgggcagggttgggggtatgtagatagcatgtgtgttcctttatggaccaacgtttgtcttttagttcatgtgtgggtgtcaagagtgggtgtctgtatgtgaatgttgagactgtgtgtgtgcatgtgtgtgtgcgtgcacgtgcacgcaaagtggtgaggacaggattacatctggactaggatctggaggtgagagggtgaggtgaggggattctgaaatcccatcattccactcccaccctctcctctgagggggcattcctgcttaagggcctccacccaggcactgagggatgaagggggtgataagaacgtatttgtgaatctggacggctgtgtgtgtgtgtgtgtgtagtcagacaggggttaatggtgtgtaaccagagtgtgatgtctcctctcactgtcccatctgagtattggtttggccaggacaggaaatggaggttacagtcactgtctagccacctccctgctctaggcctgactccagttggtataaaacatgccagatgggccgggtgtggtggctcacacctataatcgcagcactttgggaggccaaggctggtagatcacaaggtcaggagatcgagaccatcctggccaacatggtgaaacccatctctactaaaaatacaaaacttagccaggtgtggtggcacgtgcctgtagtcccagctactcaggaggctgaggcaagagaatcacttgaacctgggaggcggacattgtggtgagccaagatcacgtcactacactccagcctgggtaacagagagagactctgtctcaaaaaacaaacaaacaaacatacaaaaaaacatgccagatgatgcttgggggctccttggattcatcagctactaaatttaaggtgccagcttgggaacccagcagaatggtgtctgggtctctcccatagactaaggcaccactaggacacctctcctggctctcctaacaatagatttggcagtcttattcactacttgcccaaatttcttttctacttctccagccctagcccatgcccatgctggactgagcctccttggatactgtgctttactagaccttgaaactagtcaaaacacggatcctgactccactgttcagagcctccccttattctggagttctcttcctactgcaatggggtagagagtagggtgtgcagccactgtgggaagaggcaggagactgggcccagtctggccagtagtgaccttcgcaagttgctgcttctctcggccyttagttcgccctttccaaggctgtctcccagagctgccaaagaggccactgttggggggaagtctctataaaggctycctaaatggtggttggtatgaatgcctcgattatcactgttgtcatcattggcagggtggatgctgggcacaagcccatgatggcatttccccacgcagcttgaggagcagagcctgcctggagggatgggactgggccatttctgggctgcaggttctgagcactaatctttttccaatgacaagagccctgaaagcaaaactaaaccagatttctggttaagaaaatggaggcagtaaaagctcacattccctgggttgagggtagaattgtggctcttctgatcatttctccccctgcaggcataacccatccctggcagccccacctgtaacaaaaataataaaacccacaaaaagggaaagaaaaagccgatcgagtgccaggcaaggactattgtctgcactgcactgcagcccaagctctgggtggctgctatgaggaagttcttcctggagagagtgtgaatggtggcgtgggaggcagaattttcctctaaggagctggggcccagggaggggtcacatgctgaggttctctaggcttctgtttcctgaagcccggggtcaagggtctggtaggatgtggactggagcactctgcccaaagagaggccaagagctcccaacggggcaagggggaggaagggagtggccaaggccccatggagggggagcatggagatcccatggtcctctaacctctggcattttccccagggaagagggtcacctaggttctatcccccaccttgtccctccttgacatcatcttatagaccctccttcagtctccattggcagagctagcactggtggctcagggaattaaaggttaggaaggaactccaagttcaccagggagagggtctgcaaagcttagagaagacatggaggtccagtgctgctcctggctcatttgcattgttgggagaggttggttctcattggctgcgtgtccttggccaggccactggactctgcctcagtttctccaattcacactctaaacagggtccttaccaacccttgtgcgtttatccagatctctacctccccttactccctgagattcccagcaggaaaaaaaaataccaccagaaaaatgtgacaggactcttaatttcttcaccttttggtgaagaccatttttctttctgttttcttccaaaaatggaagaaaattctggaggaaraatagtgctcctttccgggacattcacatttcccctgctaccgacaaccatagccccagacatacctgcagctgctgccctacaatagggcatggcccgatctgcagtgcccacctggctcccccagcctgctggaacatcatgcctgctgtatagttggggagactaatgtcctgggaaagtgccattgcttacagtgacacaggacaccagtcatcataacgtatggagttcttgtctaagccaggaattgggctaaccctttacctgctttatctcatttaattctcaggtccaccttgtgtgtatgatactctcataatcccacagtatggtggcgtgggggtgggatcgaggaactgaggccctgagagatgaggtcacagggctaagtggtagagactagataagccctatagctgcctggctccgccatccctgcccctaaacacccccatactctyctataggtgagatatatcagccacccgtctgtgcatcgtggggcccctctctgctgatccaaagagtccctgcccagtttggttggcacgcccgctgtgttttctgatgtgtggctccctgggtgatcttgcaacacttaggcaggagtgacctcagaggcctgtgaatggagcacctttgtcaatatcaggtcactgcggtccctggccctcctgccttctgacaatgggagtggggagtaaagggttaactgcttcccctcgtgtttatgggggtgggggttcagtgagtgccctggaggctaaagttcctcttcccagctaggcccaaacgacttcakgcaagcccctagccttctctggccctccgccttgagcccaagctctgtcgcgggctccagcgggagaagcctaccccctcccgcaaagcgagggtcccaggggaagcgcagagcgggaagcggccccccaccgcggcagagagcggcccagcggcggccagctgttgggggacagatgttgggggagccgagaggggagctgggggaggagcctcggggccgggacctccgagaagcggtcgttttaacctcttaattgctggttctgggttttttttccccctctggcttcttcccctacgggtttacctagaagggaaggagcagagagaataggtagggccccacctccaacccaccttgttcgcctcacaggatctaaagccttcaagaaggtcttgaacctaaaataagtgaacctccgtttgagtttcggcctctcggctcaatagcttggtaactaacattggcgtttccactctgaggtttggtttccttgtacagaaaaggggtagcttaatagtgggagaaggggtcgaggtgaaactcagatgggctctttcgttgaggctcattcatccaacaaataattaccaagcgcttactaggtatccagcatagtaggctgggaaagtgagtctgacttggtcaagggcgcagggctcccttcatataaccacgagtacccagatatctctgctctcctttcagggggtagagggcactgcggtgcgcgacgcccaccttactctttttagcagttgccaggatgagcagtaacacctctccccaaagcgccgcgcatcctttgcacctaggtccttcacacgccgggatccagggacgcaaggcccggacctcacagcaaggctggggtggcagtggacacaccccctaatccctttggtgctctggtggcagttcctgcacatctgtttcttgaagtttcgttgtctccgccgccgatttcgctgtgtctggaatccagtggctccggcctcgcagcccgcctgggaaggagtctgtcgttctgtcggagcctggatcgataagcctcctcgcgcccttcgtgctgctgactcctgtcctgggtgagggacacgctgcagggcagtctgcaatgcaaccaaacctacataatcccccctaaccccacctcaaggatctggcgcgaggacgatttcgtaaactgagctgagccacgaggagcacaggaggatcctagagctgggacagcttccagcatttcgggagacacgcggagcatgagaaagttgctgagarttcactagcggcgcctacctcggaccaagggtatgaggacactgtgactgacctacctgtgtaggcgcagaacggactcgggcgtcggggactcgcgggacaggaagatcgcggtgcgcggagagtctttgacgtgtccctggccaagggggaaagaatcccacgagccaagcgcacagaaggctcagccgctcttgcccggcttctgatggccatgacctttcctgctccggctctgtccgctccctgaggacgcactcaccgccttctccaggagcgtgggcccttggccccgcgctggagattccagaatcagcggcccggagagaggacgcggcgctgccagaccagccccgcttcctgttcatccatgcgggattccagctttcctcgtcgccagtccagttgctccgcaggttctaggtactttttgcaccttggagggggtctcaaccccagcctcataccctgtggagtttccggcaaatcactcgccggctctgaaccttcgattcctcctatgaaaaccggatgccagagtccccacctcaccgggttgcgacgaagccgaggtggcgcaacgttgagscccaggaccccggcccgtagtaaggtctctacgcgcggctgggctccccctcctcccgcagcacaaataatcggaagccagcctcccctcagaggccagaaagtgctcccaatccggataccaccagccgggtggcggaacccggggtcggctcttcgagggggagtaggctgggttgggcaaagctgtttcctctcccctttactgcgggacggggaacagagaccgtggtctgggctggrcactccgctggggaagccgcgtttccgaggtccggaaccgcctgtgcttaggggagcggtggattcaacgaaggtgctctgcgcctcctgagggaaccgcgccgcctgcggaagggtcctgtcgcgctcctcgttggagacagtagggttggggttgaatctgcgagcggagactggcagaagcctctgggctcctgcactcagtccaacccaacgctgtttttttcaactgacagttgcttgaatttgccaaggcaggcaggctgtaaccagagcctttttgccggactgtttcctccgtgcacacacaagcgattccgaatgctcccccgggtggaggggtgcccgccctggggacgcagaggcaaatcttcttggtcccccacacccaaccccgggaccccaactctgggaaggtggaaggggtggaagagaagagccagaaacgaaacatttacaaaccagtgtggtcagcgctgagagagcggtgcagggtgccgtgggactctgggggagggtaggtcagtgcaaaggcctgggggtgggaaagtgcttcagaggaggccataaagacctgggagtgaccttccattgtggctgactgggacacatgcctggatggtggggcggcatatcttgaaggttagggaggagatgggcctgaagaggatgtggtcgcttgggttttgcaaaccccaagggttttggaccagatcctgagggtagagtggagccaccataggattgtaagcaaggcagaaacaggatttcatgtgcatgctggaaactttgctttgactgctctgtggaggatgggttggcaggggcgagactggaaacagggagaccggggaggaggttgacagtgagggttgcatgatgggagcctggcctaggagggcaacagtggagatggtgagaaggagatggatcccagagatacttgggaaacagaaccaacagcatcgatgattggctggatgaggggttgaggagagagaggagtgcatgattatgattttcaagcttcaggggctgggtaagtggtggcaccattctctgaaatagagggtgtaccagaggaaacaggctgctagggttgggacagagtcacaggtgastcatccactttaaaraacacactttccctggtgcccgggatcaggccctgggctgacttctgggatggagtaaaccagactccgctgcctcctggaggggcttccagtctggtgttggaggcagctgcacccaaattgccagactacaaaaccagaagggagaaggagaagtcgtagaatcaaggaaggcttgaggggcaagaagacattcgatctgggctttttatttttatttttgtctttttaacatttggtattattaatagaatgtcacaggctccagagggacttgctgggtacttagccaactgcaaagcactaaacaaacagtagtagtcattgctgttgtcatctagttcagtgcaggacaaggaaaacgagaactcagagttaaacagtttgcctagtgtcacaaagycagtaagtgcttatctgtctgttcatctaagaaactgcacttctgtacagctggcgctatagcttatattcatctctggagcaggatcgctagggttcctatcattgcaagcggtgtgacctcctgcaagttactttacctctctagtccccattttcctcacctgcaaaatgaggattaattgggataatcaatgtaaaacaattagaatcttgctgggcaagtggtaagtgctcaacaacttgcttattattactattattgtgttttttctaacttgtgatgtatttttaacaaacaaattaatatgcaaatataagtgaccatcgtagaaaatttggaaaattcagaaaaacaccaagaagaaaataaaaatcacccaccagttcatctcctaggtgggactaggtgtagagtgttgttgcgtccaagctaaggctaatgcctgagttgaagacttagaggccaggagcctgggggctggcgggccattgggtggtggaaggaggaaggttggcctgtctgagtctcgacaccccgtgcctgtcctctcgacctgcagccgattcgggaccaagtgtgcccggtgcggccgacagatctacgccagcgactgggtgcggagagctcgcggcaacgcctaccacctggcctgcttcgcctgcttctcgtgcaagcgccagctgtccactggtgaggagttcggcctggtcgaggagaaggtgctctgccgcatccactacgacaccatgattgagaacctcaagagggccgccgagaacggtacccaacctgctccgcctggcacctctgcccccagccctttcccaccccaccccaccccagcaccccaggaaccacccacactcctctaccgattgggccctcccggtatagtcccgcaggcagcgtaggggtggggcggcgaacagatcttgcacttccgggtcgatcttttgcttaggagtcagaagtcactgccctcctttgtaactatgtttccttatcagtaaaatggcgttaacaacagaacaccttcccaaagatagatgagctagctgatgtgttgtaaagccaggaggcactcagtgaaccctagagatggttctcataatcgggcagcctactccacctttggacagctctcattggcctgggggctcatcccctccggttgcctgggaccaggcttgggccagtcctggagagatgacttggctcccattctcccatttcctatcctagcagctccaagccagaggtttgaggaagggttttcatcctggaccagggtctctaactataaggggaaaggaccaggtttctgagtctggagaccaggctctcccatactgtgttgacatatgaggtttccttttctctcygggcctcagtccctacatctgtgcaagacagatactggactagaatgatccctaaatctcttctggctctgacattgtgattccccagattgcccaggaacaagatccaggtcttccacggatcctggggacagggtcacagatgggatggagctgggaaagggcagtgcttggctgtgggcagaggcagggactctttctctaatttccctgttagggtctgtgaaagctgctaacttctctgtaacagggattattttatgtaatccttacaacagccctaggaagtaggtggcacggccccattttacagaagaagaaacaggatttgccaaaaattacatactagtagatttgcctagctccaaagcccagcctcttaactaccataccataccatatcataccatacsacaccaccttggccctaagctctagggcaccttaatcagatctcataaagccaaggaggcttctgggatgtagctgcctctgttttagtttcccatctaaaaaaccaacacaccaatccttgccctgcctgctttcctaggggacattaataccacagagtgtctgcccaacccccagtttttctggggaggagtatgaaccaccctgcctcaacttctaggtcccagcctggagactagtcagggaccgcaagagtgttcctggccatgggcataccagggccatcattttctcctgccaggatcaggactaagtgggtctaagggggcatctagtgaacttgggtttcacttgctgcctgcttatctgcagtgatgggcaatgaaattatctgcagtggtcagcaagtcagcagtagagctgggatggaaacccaggagtcagagctttcccacactgtggtccatcagcgaccacaggctccttccacacatggtccaaccaggaccacctgtagttacaaccttgccaattacatcctagctctcacagccacacctgtccacagacttaacatgctgaggaacttgaaagctggggcctccgatctctcttactgatcagccctcagtattggctactgtttcactttttaaacataacacacacacagatacacacacgttcattgtagaaaaattagaaaagacggtaagcaaaaagaagaaaataacgattgctccaaatgctgccttcttcatattttaatgtgtatcttctcagatttttttccatgtatgttacaatgtttgcttttttccttcaacataattttttcctaattaaaaagttacaataaattgtgaacaatggttatttctgagtgctggaattactggtgatttttattttcttctttgtgcttatggaaattttctgagattttgaggatattcagaacaatgaagtattaaaaataaaatgggaatatggttagtgttttagtatgactgtaaaagtaatatgagtggaaagagaatatctaacatatacgccrgttaacaaaattaaaccttacagaagtaaggcaacatatgattgtttttaaatacctcaaaagttacaggaatactgaaagtaaaaagtttccataatcacattcctgggaagtaaaccactgccaacaccttgttgtatattcttacaaccttttttccttccgcttatttttataaaattaggagcatagttccgttacttgcttgcttcctatctcctctagcctttggtgtcccccagtttcgccagcagggagcccagtttgggacattagggtcagctagctttcggattctagttgaaagggccagggcaggggctttccttctctctgagcctcagtttcctcccatgtataatgaggtaacgccacctctccttagggctgtaagacgtggtccagtcgtgtaagaagtgtccagtactaagcggacgctcagaaaccccttccccaaagactgagctcagggactaggaccctgggatccctgctcccagccaactcccgctcctgacccttccagggacaagctccccccacccccgtcctttccaggctgccactagaagagatggggacgcgtggtcagctgcttctatcgcccccagggaacggcctcacgttggagggggcagtgccctcggaacaggacagtcaacccaagccggccaagcgcgcgcggacgtccttcaccgcggaacagctgcaggtaccgctgcaagcagtgggcggcgggggcgggggccgggccgaaagtgggcggggccgacaatgtctcctggctccgcccctcgggccggacccgggtggcggggcggggccgcagctgcctggggcgtggcctgtggactggcgccgctgattgggccggggtctcggagtctctgcgtgcgagcgcctcaccgccctccccgccccgcaggttatgcaggcgcagttcgcgcaggacaacaaccccgacgctcagacgctgcagaagctggcggacatgacgggcctcagccggagagtcatccaggtgggacgggggtgggcggggcctggggaccgcgggcacgccccggagctcgtagctgggctcggcgcggagggtggtgcgtgcacgtggccatccttctscaggaggcgacgaggcagtcccgcctggggtctcccggcggcgcgtccgactcttttcctcgaggctgaggctgccgaggctgtcgttccaggtgtggtttcaaaactgccgggcgcgtcataaaaagcacacgccgcaacacccagtgccgccctcsggggcgcccccgtcccgccttccctccgccctgtccgacgacatccactacaccccgttcagcagccccgagcgggcgcgcatggtcaccctgcacggctacattgagagtaagtaaccgcagcgccgggagccgctgggcctgcggggagggggcgcggaggagcgcacgtgggcggctgaggccgaggcgtggggtggagggccttggggagcctcgtgggtgaagaagcgggacccgaagtcatttggatctaggagttgggggaagaagggtcaaatcttcggctctgcctcagtggagcgggatccttcatagaggcaagcgattcagcagccattcaaaaaatgccttcaaagcacccacaatgtgccagtgcccggagactggggagagaacaggctggacaaggtacctactctgtggagcctgcgttctggtgggcatggaaaaataggcagatgagtgtgtcgttttaagtgggatgattcctgtaggaaaggtgctgggtaggagtgactggagatgctgcggggtggaagggaaggggctgggctgcctttcagcaagcagagactgaaaggatggataggatttagtgaggtacctggagtgggggaacggaatgcacgcaggccctggcccagaaagcatcgtggcatgggtgtgttctggggagcagaaggccagtgtgatgggagtgtccagggctgtgaggccttaggcaagtcacctaacctccttgagccctggtttcctcatctgtaacctgggatgtcaataatgccagcctcacagggttgtgagacaccattcatgcattcagtagctatatcttgagtgccttctgtgttctttgcactgggatacgacagtgaacacagtagaccaaagcttctgtgctcctggggtttgcactccagcatgggagatggtggagatgataaagtaacagggagggagcaggcatgtccgtggcagggagtactgtggcggagatgcaggggcaagcgggtcatggtgaagtgacttgtgagcgggaacctggaggagtgagggaggagccccggggatttctggaggatgagtgttcagtgaatctgctgctgagcaggtgcctatcacagattgtctttccctttgaagttgttcccatcaattgtttcctctaagctgggcatgaccaaaaaaatgtaaatgactgcgatgcacacagacacaattcctcccttctctggctccatgtaagagggaaaaagaagggaaatcagacagagaactgctgcttactgaccatatgccatatattctactgactgtgtctctaaacatcagaggccaccatctccttgaatagatgaggaaaccaagggcccactgtaagttagtgggagccggtatgccttaatgatcgagtgtgggctttggtttcagattgccaggcttcacatcccagccctgccatttactagctgtgtgacagtgggtgagtttcttagctttcttgcatactcattccctcatctgtaaaaatgaggacaacagtatctcaaagcagtgttctgagcatcaaaygaggtaactgaaaatcctcaacattcagcaagtgccgcataagtattggctgctcttgtgatggtgggagtggttttggttggcagaactaggagtgcagagccctgtcttcgcaccaggctgccagttggaaaccatgtctctttatatagttccatttctgaactatctgctcaataggagcgacattttccccctttcttttctaaacaataactatattcaggctgcacagagcctgttaaaggtgccaaggatcaggggcgctataagtaccaggggtctgagctacctgctaatacttggtgtagagtcaataagaaatctasatgatccctttggacttggggccatgacctccagagtccctgccaggactctgtccatacactctgttgaccaaacttagatctgtctttgctgcttagagaagaggctgaggtgccctctcctcttacccttgtggtggaactcagcttggggaagaagaggttgggggtgtgtgcacctgcacctcctgctgcatgactgactgagagtcaccacagcagtttgctctatggtaaactacagtcatggagttgtgaattttctgaagccttaagctgggaagctaatgaaagtgttagaaccagaccccagaaaaatgagtttttctgtagagtttgctctgcggttaactaaagtcacagaatactgagtttcctggaggcttcgagcttggaatctgataaaagctttggaaccagaccccagaaaaatgcagatgtacatacattttccaagtaatctgaagttgtatatggactccttgaacaccccaggtgaagaactcccaatttaatataactcctttattctacaaatgggagaactgtggctcagaagggcacagtgaattgtcccggtttatatatcagttgtaagtgtctctacaatgccctttccctgtgaccaaagagaatgaagcctaaagaagagaccagcaatggacttctccgctgtagtgataaacaggctgaagcatgagaaatttggatccgacccaaaggtggactttccccaacagttttagatgttggaatatggtatagaaattcattcagcacatacttaagagtacctactaaatgccatgcctcactctaggtgctggaaatccacaaagatctagaatctagaaaacatacaaaaaattcctgccctcgtggagctttgcattctagttggcaaagacagataatatcaaataaataataaaaatatgcagtaagtcaggctgggcgtggtggctcacacctgtaatcccagcactttgggaggccgaggcgggcagatcacttgaggtcaggagttcaggaccagcctggccaatatggtgaaaccccctctataccaaaaaatacaaaaattagctgggcatgatggtacatgccagtagtcccagctactcaggaggctaaggtgggagaatcacttgaacccaggaggcagaggttgtactgagcagagatgatgccgctgccctctagcctgggtgacagagtgagaccctgtctcaaacaaaaatgcagttaagtcagatgataagtgctaaggaaataaagccgggaggaagacagggagggtaggagataggtgttggtgttggttgcagtcgtaaagagagaggtgacatacgagtacagagtcctctaagaggcatgggtaaagtcatggtgatacctaagagatatgaacttactgagggagggtctgaatagatggggcacagccttgcttgcagggcctgaataggcagggtacagacttgcttgcatgcgcatgaatatgaaaacacatatttatttaggagtgtttatcagtgagctagatggttatacctcactctcacgtagctctttatagactataaagagcatcacaattggccgggcacggtggctcatgcctgtaatcccagcactttgggaggccgaggcaggcagatcatgaggtcaggagatcaagaccgtcctggctaacacggtgaaaccccatgaggtcagatcaagaccatcctggctaacacggcgaaaccccgtctctgctaaaatacaaaaaattagctgggcgtggtggtgggcacctgtastcccagctacttgggaggctgaggcaggagaatggcctgaacctgggaggcagagcttgcagtgagccaagatcgtgccactgcactccagcctgggcgacaaggtgagactccgtctcaaaaaaaaaaaaagatcatcacaaccaaccctactgaaaccttgcccagggctacccaggaggtaagtggcagagatgaaactggtttcagggctccagtctgtagagagcacggggcaggtgggatcctrtgtgcagcctgggggatgagctccaaggcatcctctcgtccacaggtcaggtacagtgcgggcaggtgcactgccggctgccttacaccgcaccccccgtccacctcaaagccgatatggatgggccgctctccaaccggggtgagaaggtaaatggagccaggttgggtctggtgggtcagagccaccctgctggggatgggtttctggcagcatcctctgttaaccatttggtaccatgctgcgctgtggcagaccctgtctgcccggcctgctgagacccccaccgcacccccacagcagtcactggagcggtggttgctagtgtgttctgtgtgcatggccactccgaaggcctccttgcagctccccactggcagtttgccctgctctgtcttagatttgtgaatttcctttactcaagctttaagttccagggagggcttatatcactcatcaccccacttcccatcatctcactggtttctccttttcattcttgtctgttgggagtgaatatcctgagctgatggggttcagggatagctggccagccagtgaccttggtcaactggcagggcctcctctgtggagccaggatttctggttgtctcaggctttaggactgcacttctaaaagggtgcttagctgtccccattccagggcttcaaggtattatttctgaagcaatgcaaccctttgtttaaacttgtccatagtgcagatgaaggtggatggagctgctctgaaaccatggagagaggaggagacttacctccctcccagctccaagacacctcacagttagcctcgaaagccagtgctgtcagacaacccttcattttagaaatgggaacgttgaggcccagatagctcaaagtcagagattggatgagaaccttgctttttttttttttttttttttttagacagagtttcactcttatcgcccaggctggagtgcaatggmgcaatctcggctcactgcaacctccacctcctgggttcaggtgattctcctgcctcagcctcccgaagtagctgggattacaggcgcctaccaccatgcccagctaatttttttgtatttttagtagagatggggtttcgccacgtaggccaggctggtcttgaactgctgacctcaggtgatccacccgcctcagcctcccaaagtgctgggattacaggcgtgagccaccgtgcccggccgaaccttacattttttaattcactgacttgtttatttggagacatttcctatgtcttgtctgtgcccagcatccatgaatctgttgctaggagtggaaacaagtaaagtgtggtccctacccttgaggaggccagagtctggagggggaggcagatcccaacagttacaatacagtgtgacaggggaagccatgggagctggggagggggaagggggcaaaggagagaggcagggaagacttcccagaagaggcaacctctaaggccaggcctgaaagctgaggcatcagggaaggcatgagacaccagagctctcagggaaccctgagccattcagcattgttggcaggcatgtctgggaggatgagaggaggaaagcgagagccttgaggctgccaggtggaagagtctgtattttatgctgcggcagtgtggggtcctggagggcctgctgcagaaacatcactgtagcagtcttcagagactgctgggttggaggacacccagtaggaagcagggatccctggaggtcagtgggtgtggcagtccctcggagggagagggtcagagcattagggctggagtcaggagccctccagttcagcagatcccggtcttggtgtgctcggaatcacctgggcagcttgtaaatatacagagattcctaagcctcgctctcagagagtctgttggggtgggatatagggatctgcgagtgtaatactcagcctgtgtgattctaacgggcagccggggtggggacagctcctttaggatggtacctctggctcagcctcctgattgagctcagtacacctagtatgtactgagctctctgtgccgggcaccacaggagaatgtgtatggtgtggaggtacagacagccctggacagatacatttgtaaataaatggtagtgcctaacgtaaaatcctgcagaatctgtagtgagtgagcatgccccaggaacaccatcgccgctgagactgtcacatccataggaagagctgccgtttgctgagctccttctgttcaaggcagctacttctcacatggcatctggttcacacctcccagccactttgtggacatagagatggccttctcattgtaaagagataaacagattccgagaggtgacatgacttgtccagggatgcagcgagtctgtcggactctgaagtctgcgcggctcagtaatcacttccttttgtgcagcacttcattgtgtacacagccctctctccgacctcatccttcatagtctccctgggagggtgattgcgatgacctccatttcacacttgcagaaacggaggctcagacagagcagtgctcatccagaatcacaatgtgagcatgggcagaactggccgggatcctagagccacctgcctcagagctgtcccttcctgtgggaggggattcatcctattagacctggctctgggactgcagaagtgagctgacatgatccctgccctcagggagcttgtggcttagcacagggtgtgggcagttacattgcaggggaatgggcagctggagtaggcgagaaacttgaccttagaggacccagaagaggaggcagtgagctctaggggagagacaggggacaagaagaagggtgttccacatcaagagaaccgcatgtgcaaaggcccagaggcatggaggagcttgggccggaggggaccctgggggacgttcagtgtggctgaggtccagggaagtggggagagccgacaggggccacagaacaaaggatcatggaaagagggtcttggacattatgtggagggcagggatgggccctggaggtacagagggctgggctcagtgcttggagaggagcctttgcctcctggttgctcagctaagcttgtggttctgtctcattcagcctgggggatgagccatgctgggggctgtcagatttggctatagacagtttctggcttctggatttggctgctgagccagagttttcccttgctgggctgtgtccccaactttgcacccagaaagtctgcattaaagtgtctctccctccttcatgaccttctgtcctctcactgtcaggcctttccgccagctcctagggacttttcttgtccataactctcaaattcctggggcttggtgggcggcagggtgtggtatgtgtgtggccagcacaggattgtctgggctttcttccaagtccttccaggcctgagcctgcctagctgtgaggagactcagtgtccccatggggctggcccctgaacccactcatctagaccagcactggcctggccaggagaacagtgctctgagcactcaggggagcatcccctgcctccaycgcatcgtcatttggccacacacacctgtgaggttccagagccacatttcttcctggttgtgtcccctgatcccacaaatccaacacttggaaagttcttagaaatcagggctaagctgtcattgatcagtggaggagactgagacccatggaggggaagggtcctaccagggtcgccactcttgagagagcttttcctaataagggctaaaagccaggcattctggaggccaaagtggagcagtggccagggtggggaaggaatgcccaccctggccactctggagttaggccagctcggaatcccagctctgccacctcccctgtgagatctgggaatgcaattagtttctctgagctgcggtttctacatctgcaaactggggataataatagttcccactccgtagggttgctgcagagaataaatgcataatgtgtgtaaggagcccagcacagagcctggtgcacagaaaatgcccccaggtgttggttatgatcatgatcactattatggtgatcatcatcattgctttcctccatcacctccttgtgataaccagttctgggcaagtaacattcctgatcagaaaagggaacagccatgtagtcatgcccaccagatgcccctcacactttactgtgaaatgacacattgccattgaccagccagccagtgatccttgacctgaacttcagggaactrgctgtgtcagcagcagtgagatgtcaaccaagtgctagaggtgggagtgggagggggaaagggacagacagtcctgatctcccactgtgtatcgggcacccagtgtgtctgagccacgcacttctaggcttcgtgcatgtgaagattaagcgcatgtgaagtgcttagcccgtggccctgtgggtaataagcagtcagccactatggtcacggtgaccttggaaaggtagaggcaatgtgctttggtagggagagcttgctgtgagccaggcctggcctccagtgccaggtcctcctcctcgctgtgtgcccacgagctcactcgcttccacctctttgagcctgagtgccctccttgtaaaacagaacgttggaactccctcacggggctatggtgcggcttccgtgaaatcaggcacagaaggtgcagggtgaaatgcccagaaggcttttgctgctgctgttgtatctcattgaatctctctgattctcagagagagattttgtcatccttgttttaaagatgaggaaacaggctcagagaggtgcagtgagttgcccaaggtcccacagcaagtcagttgacagagccaggatttaaactcagatctgggccctgagtccacccttcttctctgtgcctttgaggttctctggggggcagcagggtggggcaggcccccagctcagccacctcccatgccctcctcttgcaggtcatcctttttcagtactaacgctgccggcacttccgcatctgcccgtgggcgccccacagctgcccytcagccgctgagatccagtgtccaagctgcggccaggagtccacccacctccgcatccacccccgtccgccatcctgcccaccaccaggtcggttcccgaggcctggcctttccctctcctgctgagaaccagaacccaccaggagcaccacagagtcctcctcttggaaggcagaactccctgaaatctggaatcagggtggaaacagcctgtttttcccatttaaacaggagtcctcttcaacttcagctgattacaataacaaaaggcggaattgaattgtgcgatgccaacggccttctcatttacaggtttttttcccccacattggcctttatttactacttccttggaaccatctctgaattctgaatagctgacaacccccaatgttatccactctgttgcttttgtctggaaaactctacagtgtttgtgggatgtccccaaaggaaagctatgttctaattttatcatttccatctgtctggttatgtcaagttaattcagaaagagaagagacagtgaccaaccctgagargcctaatagggcagagatggaggcctgcccagactaggaggcagcggggatagacagggaatggggagaagaaagacccccattggtttggaaatcaaggagagggcggtgacatattggaccagaagaggcactagccattttaaggagaggaaagagaaaactctggggtcagggagagaccctayccccacctaattatccagcatatatgtaagaaacatagcagcgatggtattcgatctgtgccatgactcttctgaatgtttggacaggttagagttggggacccctgttggccacttgttgacctctcatagtggtgcttgggccaggtcttctcaatggaaggggaatcccttataggggagagggaacagagcccagtgaaatggcagtcagaatgttaaccctggatccatctctaagtagagagagggtgcccattgcctaggtgagtgtgccaagctcaggattccaactggtgcctctgagcttcccaatcaatacttcctggagccagccccacccacccctgagaacagaggtcagacacagctgcgtaacatccatcctgctacaactcttccaccccaaacaaaagggctcaggctacacacgaccatgatttatgttttcaggggatgcccatttgtcccaagcttatcctgtaattctagaattacctggtgtcctgatgcattttccactagaggttgctaatcagcatgttttagcccaagtccgccttcctgctgtggttaacctgttatgttgcttttggaaggagactctaagacagggaaagcaagttcatggtacatacgcagccattgtctctgtttttacccatggcagacattgctaatcaatggcagctctatttcactgagtctggataaggtttcagagttcaaatgcttgacgttggcacttaacatgaaagcctataggtcattcttgctctgggatctacaggcagggtaggcacaggtgcagcctaagaagggaacctgcttcctctcccttccaaagacagtgacagctgactgagggcaaagagcaggcaccactcagaacgtggtgagtacagctcagctcagcactcagtcagtggtaacttgtgcccagccctgtgctaggcgctgacattaacaggagcaaccagggcccaattcctggccttggagctcaaatctttcctttgatttttgctcctgatcatcaaggccccagtggcaaccatgtggtaagtggccaaccaagccctacccagggtcacccaacacactctgccttgagcctctcctcagggtctattccttgcgtggattatgtggccgtagcatgttacagttcaaacatgtctccactaccctgttaagagcagcctgggaacgtacaggccatcaagactatttatttaaatacaaaaaaaggggaaaacacacacacggaaaaaaaattgtaagcactttttttgtaaaaccaatgtctgttttgttacatacctttcatgtcgtgctttgtaaatgtcttatttgtgtaataaagttaatgcaagtagaagtgctggcactgaaatccagaacatgatgggattccatttctttcctgctctctggtgaagggcttaggtccctggctcccagaatatgtgggctgctggacagtgtaatcctccttcctgggaaacgggtaccatttcccagttagtaaacaatggattgtggaggcctgacgatgggtttcttctgtaagtactcagtcacacctgcttcttatctaagctttggaggaaatcaggctgcttgatgccctctgttccagtctctgaacatacactctctgctgggccctgtgctggctctgcacactgagaaaaggctcccagccagaccttgtcctggaggagctctcagtctggcaaatactgtgggagccaagggggtgggtgttaaagctggatcctatcagatgagaaggtcacagaataggtaagcaagagggtggggcagggagggaggtgcagaggagcgtgtttggaagatggggaagaatttaataaggtgaagttaagggaatatggaacgggcagcagggccccaggttctgcacaagactgggtcttatagtggttttgtcaggctccagagccaccacctcataacctgaggagtgagagagcgcatctttttggtggttgtcaaatttctttcagcagcagagtcatttgctcaagccaaagctcctggtgtggagagcacagctgccctgcagaatgcagaggcttccctggcctgctgtggccctgcacagaaatgagttgctcagaaacctcagctcatggtgcacatgagtcactgactgcagggcccctctctctattctactagtttttaaatctcccatccctgattccatttctgctcctcatacatctgctcttccaatccattttcaagtgtttagatatatgtgtatctttgaaaatatatgagtttagttgtgtgtttctttacatgaatgtaccttctgttttcaaaatacagtttggaaaccaccggtggagcacaaccctatctaccaaggtgactggcgtcttggggagaggtgatcctcccaagtctgctccctagcgcagctgagagtgagcccaggcctcccttcccgctgactcctggctctgccccagcatgacgcctctgggtccctagtttgagatccaatttcctctcctgccttccaagcctgactcactgttctgcctccactgggcagccctggtgagccaggggacagagcatagggggtaacaggatctagcaacctctaaggaggaacagttagacaaagatccaggatgcatatggcccatatgtggccctggaacatgttgtcgcttcctcttctgatttttagctgacaaatgtgacctctgggatgattttgaggaatgattatatgcaccactaacaagttgttctttaaagcaaacacatattgaatacctactatgcgccaggtcccctacttgtattatctcatttaaccacacggctactgtattgttttaaagcattattataaccattttttatatgatgccaaagccacattcttttttttttttagacagagtttcactctgtcacccaggctggagtacagtggtgaaatcttggctcactgcaacctccacctcccatgttcaagcaattctcatgcctctgcctcccaagtagctgggaatacagacgcatgccaccatgcccggctaatttttgtatttttagtagagatggggtttcaccatgtcggccaggctggtctcgaactcctggcctcatgtgatctgccggcctcggcctcccaaagtgctgggattataggcgtgagccatcacacccagcctccaaagccacattctttctatggcaccatgctgattctgtgcttaggatgtgaggttcaaatgggggagctggcaagagggaaagacaggcctgagtaatcattcttgggcctaacaagcttgtccaacccaccttattttgttgttgttgtttttctgttctgttttgttttaggctttcagcagcctgaagccatggtttttagtttctgtctctagtgataagcagaaaagagggatgaggaaggggcttcactggcccaaccagaaacagaaactaagaacccatgactgctgcaggactgggcacagtgatcaggtcctactgccctctgagaccaagcaagtcactctgtctctctgaacctcagattccccatctgcaaaagccttccccttgcaaggctgttgtgaggagcagagataatgcacacgcactacctgcgccggttagtgctcaattacatctatctattattataaagagatggttctcaaacgttcagatgcatgagaaatgctgggaatgcaaattactaggccccattcccagagattctgattgggaggtctagggtggggcctgggaatatctatagctcacaattttgtccaggttaaatgatgcccactgaggaacaatcttttaaggaaaatacacctggggccactgaccgcagaaagtctttattcctgagttaaaatcaggttctagaactacagcccgtcccccagggcagccaatgctagtagggcagatggaaacctctggtggaggcagccacagagttcacggctcgggcctgtgacccacgatctcatcctagccctttcgacaggtacgggtgatccactcatgctcgtcatcatctgcaaggaaagaggaagagctggtcatgcttggtgctcgctgggacctttcctggcctggggggttccccaggtggggcgttgggactgggatggtccgtcgatggccagtctgtgtagttttgtgtggggaggaacagacctttcatttacactgaattcctcggagtggctggtcttggggaaattgaacacagaagggtttctaactgtgggtgctgctggcggaggcaagcatgaggagtctggccaccctaagctggactcatcctgacaggcagagagcagctgcttcacagtcgggcacttgcctggtctgacagcccacgcacgacagccccaggacagtgggtctaggccttgccggtggtgctaggagacagagtcctgagatcttcatttcctttctaggctctccattcttgaccctttcaagaacccatggtttctccaggggactaacaccctcttgtttactccaggcctttcagtggggaacggagaggggcaggagctcgccgctgtgcctgaaagccctaaacgcagtgtctccttagtttaatcttcgtgaccaaccacgcaatgggcaagccttcaccaccgttttacagatgaacaaacagaggctcacagaggccgaggcacttgtccacagccacagggtcagtatgtgggagagctcagactagaacctaggattgtccagctataaagcctgtgctgttttttaaacctcaaataaagagacttgagtgaatcacattcagtccacagcacgctgccatcatctctctgtgcaagacccctccgtggatttactttattttcatttttcctcctttctcctccaaacccatactgggcccctcctccaccactgcagggacctacaccaatggtgggatagagacccctcaaaatgcatgttgctctgtaaaatatgtgctgttgttttgtgtacaaatgtgtttttaatttacagaaatggcattgtgctgtggctttcattatgtctcacagctttcactcaagatctattcttgttgctgtgtgtacatccagctctttgcttcttactgttgcctaatattccatgcttggcttccgtcacattttcctctccatgccggtggtggacgcggaggttgcctgcaactcccactaccaggaacaatgctgggacaagcgttcttggccacactccttcacagatacgtggagaatgtctctggggttacgttccttccaggaggagggtcaacgagtcctgctcatccttcctgcaccgtccttccagctgcccatgcttttttcacaccacgctgccttctccctgccttcctgcctctccaccttcctgccactcctcccttcccttggtgccactacctgcctttaaccagttctcctgagggccagagtactggaggagttcttgcctcctctccttaccctgtgtctagcccagtgcctcctgcctaagagatgggaggatgggtgtgtccaccctccttgggtgacaaatggcagatgcttgggaacaagggcactccctgagagctgaaatacagagggctggcggaaagcttgcctgaatcagatcccctgccagggatgccttccttttgtgtgaaaggcaccagacccaggggcagagagatggaggctcacagacagcctatgtgtgcttggtgctttgcagacactgtgtctcattggatctttgtaacagcccagtcaggtaggggagagccttgtcctaagtccatcgccagtggattccaaccaaggttcaccaggctctgcagcctgacctctcaccccagggcagatgtgagcacgccaggagctgaggctgcctccacatcactaaccacctgcccaccatttctttacatgagacctaaggaaaacggcttgctgcctggcacactctggcaagcagccagtgagcctcagtttcctctggggaggctgcctgggagtccctgctgcggctgggaaatccaggggtggggaaagcagcgatgatgtgtcagcacacaaggagttaagcgctggtggagcccacttttgccacactgtgagcagcctggttgataattacagttctgaagtctccaggctattcgaatcagtgcagctgcaacctcttcagcagtaacccctgaaaccagacaaactgggtgtattgtgctgaaccagtcctcaggcccctccctgatcgttaaaaattgacagcaatggacttaacagccctcttcactacccctttcactctctacctggctgtacagccaccaatttgaatcacagatgcctcccctcccagcagctgctcaccaacccctccctccgcctcccctgcgcctctctgcggctcccctggccctgccacgccagggtgaggttgccgaagcacatttcatcaatatttaaaatggaattaaacctgcagctttgattaatgcctcccagatcctgggagttgtgattactattttgcaaattgcgattgttggaatatgttaatatgattgtctgagaatatcttcaccttctcagataatttctccccttttttggtaggagggggagagggaaaggagggagaaaaaagatgggggaaaaacaccccacaaactctttaatcaattgtaaattattacccttggcacaactgccagtggtgcagagagaaggaagatttctggtttggtgcatttatcttaaaaatttttggtccctgttggcccggtaattccactctgggacactattcttaaagggataatctatttgtctcggaactatttagaatcaggaaaaaggaaaatgtacatttctaaaaatgagggaatgattattttgttgtatatgcattcatttaacaaataattatgtgccaggcattgtgctagattcggggaggtggatactataagacacttgaggggatatttagcagctactgaaaataattgttaggaagtttgtatagcaacatgggggaaatgtttttgatgtgataataagcaaaagaaaaaaggcaagaagagacaagaaataaaagtacacatagtatatcctatgtcataactgtgcacagaagaaaaattaaagataaattgaaatgtgaataatagccctgcacagtgggatgagagagtttctctttccgcttttatttcccaaatcttctttcactaatgggtattgacaatagaaaaataattaaaataattattggcttttgccgggcgcggtggctcacgcctgtaatcccagcactttgggaggctgagg

SEQ ID NO: 6861 - DNA, 230093 bp, Homo sapiens
tgctaaattaaattatctctcctttcacacttggattttctataatcaagagaatgcatcatttagatgatggggtaacatgcacactgtgactaaggaaaagcttttctctgaaaggctaactagctaccaaaatagcaacagaacttggcctcttttttttattgagacagagtctcactctgttgcccaggctggagtacagtggcatgatctcggctccacgcaacctcctcctcccagattcaagtgattctcctgcctcagcctcccaagtagctggaattacaggcacatgccactgcacctggctaatttttgtattttttagtggaggcggggtttcaccatgttggccaggctggtcttgaagtagtgatccacccacctcagcctctcaaagtgctgggattacaggcatgagccaccgagccaggccagaacttggcctctttaacacagtactttaagaggctgactagccaaatgctatgttcagggttaacaatatgccttcaacatctctagtgataatatccagacaagaatagaataaataagccaatggtaaagatgccctaacaatttgcccttaattaagatgattcccattccagaagtgccactgctctgagtccagttgcttggcatttatttacaagcacttagatgccaattcccaggggattgggaggttcagaccctggcagcctgaaccataccaatcacataaacaaaaggtttgatttgtaaatcggaatgtcaatgtcttacagggagaattgacagtttgctaaaagactatattccttgtcactcaatctgcccacccttttctgagaaggaagcctaatgcagtgcttagcaggaactatagttgcctaaatctctgagttggtagccaaacaagaaatggacctgagattagaatatcattgcgggaaggggaaaggggatgtaacgccaagtgtttttgattgcaacctagaaaaagcagtgttggctgagtgaacaaaggggaatttatgggaaaggcaatgggagctgaattgtcaggaccctggagaaccgggcttggacacatcgagggagtagtaaccataaccattgaacaatctgctcagccagtttcccagtttttttgaccctctgctggacctagctttcaaaatttaatcaggctttcacaattgcatttagcctatatctagcaagtgtctgtattatctgtgaagagttataaagaccctgcactcaaagaggtaagcatgtctatggtacatattaggccaaatacaacacaatcagggctgaggcttcaaaaataaagagaggacacgagggtaaaaggatggggaaagacttcaaaggaaaaacactgcaaatgggcactggaggtggcaggattttgtggggaagtcagaactatttcaatctgcaatggaaatagtgatgatggtacagatgaagagtctaacatgagtcacccacttggttaagcactttcttctcctctgtgattgggttaaaagggtttatctaagtgaaaaggaagtttttgcagggagaggcccctgtactttggggggaggagggctatatgggagagaaggaaaggtgggaaaggtggccatcccyggcagaaagacccacacatccacttcaaaagaggttaaaaaaaaatgcttctctctgtgtatctgttggagagtgggtggtaggtgacaaaactggaagcaaggaaacaaagatggtctttcccttgatttctcatctctaggaaagggcgtgttagccctgcctgagctaggtgggtgttcaatgctactggggcgcatccaaaggcacaaaatcttatgttaagcgccactcaccctggaaaaactgggtcctgcgcaatcgaggttttagtatctggtgaaggcttttgaacatcagatccaatgtggtcagaagaaagcatcagtgtcaatgatacattgttcattcttttattcattcattcattcattcattcattcattcaaacctcttctatttattaacactgactagaggctctaccctgaattgaggctaaaggctggagtagaaaaagtaaggataagtcacttcccttcattgcctctgttttcctatctctaaaataagaagttggagtttaatgcctttgctttgcaatgtttcttatgcttaacgagcttacacatgaagtcaggagtagtttgccccggtatgagccagaggcacagagacaggggttgaagctcagaaagatgaatgctgctgcttttcctctgcctccttgaagctagggaccctctgaaaggtgccagggatgcagcagctctgtgcaaatgagaggtctggtatttgccagaagctttaccataatgcaaggagaaatagtgcatgaatgatgtgatgggattattgctgaccacgaatttactgcccaattagtgaggtgatattttgtgggggtttcatttaattgggactttcctgagcagatctaggtttatttaacagtttacattgatttttatctcgggagactagggcagcatgctgaattaccacaaccttttaccaaacaaagctcttcctcgttgacttttgattcccctttccctgcattgtgcttctgcatttctctccaaagcctctgttgaagattctttgcaaccaaagatggcatccatgcttagaattgttcagtgtctggggtatttgttcctctgtattcaagtaacaataaatgtccctaggaagatttttttttcaaattactcgtctggaaaccccttgggattcaaggtccagcccatacatgcctcgatacttccccttctcaatcccagcatctcctaccatgatgcttgctagtaggaggagcttaacaaatttcttcaaaggtgacatctcaaaggtctttacaggcataaattgtggcttcaatacaaatgctgggtttagatgatgtatcagtctgtttttacgctgctgataaagacatacctgagactgggcaatttacaaaagaaagaagtttaattggattcacagttccacctggctggggaggcctgacaatcatggcagaaggtgaaaggcacctctcacatggcagcagacaagagaagagagcttgtgcagggaaactcctgtttgttttttttttcttttattattatattttaagttttagggtacatgtgcacattgtgcaggttagttacatatgtatacatgtgccatgctggtgtgctgcacccattaactcgtcatctagcattaggtttatctcccagtgctatccctcccccctccccccaccccacaacagtccccagagtgtgatgttccccttcctgtgtccatgtgatctcattgttcaattcccacctatgagtgagaatatgcggtgtttggttttttgttcttgcgatagtttactgagaatgatgatttccaatttcatccatgtccctacaaaggacatgaactcatcattttttatggctgcatagtattccatggtgtatatgtgccacattttcttaatccagtctatcattgttggacatttgggttggttccaagtctttgctattgtgaataatgccgcaataaacatacgtgtgcatgtgtctttatagcagcatgatttatagtcctttgggtatatacccagtaatgggatggctgggtcaaatggtatttctagttctagatccctgaggaatcgccacactgacttccacaatggttgaactagacactcctgtttttaaaaccatcagatcttgtaagactcattcactaccacgagaacagtgtaggaaagacccacccccataattcaatcactcccactgggttcctcccacgacacgtgggaattgtgagagttacaattcaagatgagatttgggtggggacacagccaaaccatatcagatgaggtgcagaggatgcctgggcgactaaatcaatggtttccaaaggatttaatgtaatgcccttaagtagtttttttctcccaaggtagtttctttgaagttaagcagcatgagacttccaggttggtggatgaagaaccagggaaagatagaaactgccttttttataatgtagggctcagttaagtattcaaagttccaaggaggcaattcaggcccccatttcacacctttcactgttagagagcggagctcctatccatcccaggcccttccactttgtagatcaattgctctatcttttggcagcttcaacaaagccctgtcttatgaaaatgctttattgttcagatcagggacctggtagtaaaaattaactataaaatacttttttttctattatgcaagtaatgggtagcctttttaaaaattggaaacatagagaaaaaagtttattcctaacaaccggagcctcagtggattaaaattactcaggtttctcactgatgctacatgcccattgaacgtcaggtggggactctgcactgctttagtctcactctggatactggctgacagaccacagctttctagaatattgcggccgaggaaaagaaagctttgcggcatctcatacatctcatattgctgctgcagaagtgacagtcacttttcctcttaaacctctagtcaaaacttgtaaccatgcctccacttaacaagaggtttggaaagtgcaattctgccatgtagggaaaggtatatgaacagtggtaagggctaccacactggagaatagctcctttcatctgcctccctttgcagcctgcgtccctagtccatgcgctctactgctccagtgcccaccactgcttgactctgcctttgtgtgtgtcagttcacattatcaagaaggaccatgactggtagctctacggatggaggacccttttgtagcaggtgttcaccctgtgcccaagccgcagtgcctagaagagtggggatgggtctgtggctcctatcaggctgcaggagttgcggagacagaaaaagtatttctaggactcccatttggccttgcagtctctacacatccttggcaatttctcccatcttggcttctccttcttatcactttggtccacatacggggacagcgtctaagttctttctgaccacctcctcagtcctagaaaaaccagacttggttaagtaccagagcacagaaggcatttagtgctgctctgctcccaagtcatctattagtttcactttagccagccatacctccttggttacatatgaagcatctgtatataacttagtatcatgctttttcacattatattttgatttttatcggaccggaaaccctaaatccacaagcataacaacaagatcacatttgggctttttcatttctgtaaccagaggattgaacgctagttttgtagtaagacttcaattctatttatctgtccaggcttaagggttcctgttcttctttttaagtcattaaattgtatcagacaagggggaaaacgcgtgtgtgactttccctaaggtaagatgggcttaagggayattgaaaccagggcagagaaatgttttctgtgaccmaccagtcagggcaaggcatagaaggagcaatgacttattcattagcccagatagaaggccagtctttttcaggctgcggcgcagagacgccaggctcaaagggcaggagggccgtctgcaggcagcgccgccgcggctacctggaagcccagcaagtcacctgagtcctgcgggtgcctgggctgccaatctgcagcgacccgtccgcagcccccgggggcaggaacaccaaccccgggacaggaggacgtcctcggcccgctgactagggatccgccagcgggtgccgctgagccacatccccgcagttggcgccagcatccaggtaccgcgcgccacagcacctgcctgggcgttcccgcgcttggggcggggcttcccgcgtcccctttaagaggccgcatcacccgcccttgacgtcagagtgtttctccgcaagagcccgtgtcccgctaggctccgcgccctcgcgcccatagccccggcggcggcacgaccagaggcggccaggggagcgcgccgccccgctcggccctccagtcccsctccgcckcctccctcccgcacagcagccgccagcgcggcctcctgcaccatgtcggtggccggcctcaagaagcagttccataaagccactcaggtaaggcgcgcggcaggtgcgtcccggggcagtccggggcgaagctgcgaggggcgcgctcggcgctggccgtccggcggcagcytggggagttcggcaccgagcctcgcccgcgccggccgcgccccgcctcgcaagccaaggcggcggctcggggcatccccggtctgggcgtccaccctcggtcccccgcccccggcttggtgcgcgctgccttcccgcgggtccccggcgtcctgcctggtagcgctgctcsccgcccccgcatcatctcgcgcccgtgctgcaggaaggggaccgcggctgcactgctgccgcggcgcgcaggtgccttggcggcgcggtgggagattatgtaaagtcgcctcttcacgggtgaccttgcggagtcggtgcacccggctktcccgggatgtgttggcatgagcggtggccgcactgggggtggcggggcggaggccggcggtttgcgctcytstcccttaccctgttgtcagaaccctccttccccgccgcccgcaggctccaggggaatggaaggctggggtcttcctttagggacccgcatacattaacttttacctggagaactcggtcgtgaaactcctttgaggccagggcatgacaaacagtctgcgggtcttaaatatttccctaaaacaaccaaattgttgaagacttaaaatcatcatgtattttaaattgtttttaataaatctttggcatcttggatgtgcccatttttctttatggggttaataagctgtgactgtaataaaactgattaatttagattctaataattaaaatcattggactcaaagaattttacataggggcaagtaagcgaatacttacgctgtgacctatttcttacataatgtgtgtgattactacttttttatccttctgaaataggttcaaatttatgggatctttaaggattttgatgacttaccgcgaaatgtttttcatgatttggtgttaaatagtttttcataggttagccttaattaacgagctttctcataatttctcggaagtagtgaggtttttcctaggctaccacagtggcagccttgttatgaaccacatccagaaaaggtgagggttgtgttttacagaaccttggttaacttagggtgacagatgcagcatgtaattcccgtcgtgtgtgtgtttgcacgcatctgcatcatcttcatcacacattcttgcctttatagaatcaattatacctgtcaacttaggaaatcaagaaaagtaagactatttctgtaaaaatgtttcttaatgtaattatttttgcttttctattataattggagttatctgtgacctctctgccagacatgtttatgaaagtaagtgatttgtttgttgatgtagtttggaaggcttctaataactttatactgcaagttctttcaggtttacagaaccaagcatatgtgctgcccaggaattctgtggcaggacttcttcgatattactaacctttttgattgctctactggtcacttctctatagcatatctcagcactgcgtttaccaacacatcttttttccacttggattctaaagatttcttttgcaaagcttagtgccctcaaaggcaattaagagtcttggctttggagtgggaaaggctaaggtttgaatcctgcctctgctgcttctgaccttgagagagtatttaacttctgaacctgtccatgctgaagtgatgataatttccgttgtctcttcaggrttgaggtgaagagaaacgagtgtgtagaacacacgtataaagtgttcaataaattatagttattgacataaaggatatttttattagtataaaatactatcccttatgctatgaagaagttacccaagstagaccttttagtttttccaacttaaaaaatagagcgctccatttccgctaaatcttgaagttctgtgtcgccctwaagtgtagaaaaaataatttaaactgcgttaggaaagaacttaaaaggttggagaaggtcggcatgtgatgcgatacggttaatgtttatcacaccgaatccaaatgcagaatcactgcgtcattgtcttccttttactgaaaagccttttatttgaaaggtgaagcagcacgtagtctcttatccataatttagtgtagcacactcttagaaagtctaaggcacaggtgactgttctgtgcatatgtatatttaggagagtatgtaaagcccatgttaatgtttgcatgtgacaaaaaaattagagaaatagtcctgtcctacttttgtagccatttttttccatcaggtccgtgaacctgatgttatctacagagaagctttagacctagaattacttccttttgagaactgatrtgctggataatatagcctgggtttgtttgtttgtttatttatttattcatttgagacaaagtttgactcttgtcgcccaggcaggagtgcaatggcgtgatctcagcatactgcaacctctgcctcctgtgttcaggcgattctcctgcctcagcctcctgagtagctgggattataggcatgcactaccacgctcagctaatttttgtatttttagtagagacagggtttagccatgttaaccaggctggtctcgaactcctgacctcaggtgatctgcccgcctcgattacaggctgagcccccgcacctggcctatagcctgggtttataagtggaaggagtctgttcacgcaaacgtttctttctatggaattgagcttttttgcttgtgttagtaagcgatgataaataaaacagtatattgtttgtacttggaatttctgattaaatgtgtcacaactgttgtcttatattagaattggttatttctaccttgttgctgacagttattttcaatatgtttacaatttggaggtaaaaaaatgcttttgccaagtaaaatttattagagaagaaaatcctttcagcatgaaaatatataatgataccaaaaattgadcatcttattttcatgtacttcattacttaattgctcataaagatataatttactgtataattagaataaagtattctttttttactgtaataaagggcagatgatcttgtgttgctcttttagtgagttttattcatattgagatttcattttacaaaagtcatgtcagtttttttacacttgttttaaactggcagcagcttagttaaaaatagctgtttccagtgaacatgaagctcctacaaaatctgtatttttaaaaattcactctatcatgcatatgatgtggacacattttgctttacaatatgtaaaagtctattataaagtaaaatatattaggtcattttatgagtttgctggagctgctgtaacaaagtactacaaactgagtcgtttcaacgacagaaatacattgtttcccacttcttgagacaagcacacttgaagtctgagaccaaggtgccagtagggccacgagctctctgaaggtatgagacaggatctattcgaggctgccttcttagctcttgtgctttgttgggaatctttgggcttccttggcttgtagatacatcaccttggtctctgccttcatgctcacatgacattctccctgtgtgtgtctcagtgtccaaatttccccattttgtaaggaccccagtcatataggattgggcaagcccatcctactccagtatgattttatcttaaataattaccatctgtaatgcccctatttccaaataaagttgcattctgagctattgtaattaggactttaatatgaattttgggaggggcacagttcaatccataacagtcgttatttgcataaaaggattaaccacagtattctatatttgattcaacatctaagaggacagttcagcctataaataacatataactttctattgcatcaaaaagatatactttctccttttttaatgagttggttagtatattgctaagttctgaatgtgtccctctaaaatacrtatgttgaagcttgactgccartgtgacagtattaagaaatggggcctttaggaggtgactaagtcatgagggcactcatgattaagtcatgaatgggattagtgctctcttaaaagaagttgaaggggtcaccctgtccccttccaccgtgtgagggtttagcaacaaggcaccatctttgaagcaaagggtgggccctagccaggcacaaatctgttagtgccttcatcttggactgctagcctcccaaactgtgagaaataaattctattatttataaattaccccgtctaagatattttgttagtagcctgaacagactaagtcagaaatatacctattataaattgtgttttctgatttttttaaatgataaaattaatttgggtaggctgggttttatgatacagtctggtatatgtttatttgtcacactcagattccttaactgggaaaatttcatcatgtttgtgttctgtgtctttttgttttacctaatttcctctttcagaatgctgtattttatatggatgctttgctcaggagaccattacataagtcttttcatgcatttgttgatttggtgagatgttaaacttactaagtattggattaaatatctaattagttatgactttatctcagtgagattttcagtttcttaattgcctctaagcagtcaactctctgctgcctttaaaatcttggctgtggcttgttgcttgacccaggatttctacacctgtaccctttcacattcttagccagtagtctctaataggctgcaaggggcctatatattttataaaattataagtaacattttatacatgcatttttctgagggagaatgcccttagcctgttaccagattcttaaataaattcctaattgctgccccttcctcccctcgaaaagtaaaaatagggtggggcrtggtggctcactcctgtaatcccaacactttgggaggccaaggcgggcrgatcacttgaggtcaggagttcaaaaccggctttgccagtgcagtgaaacctcgtctctactaaaaatacaaaaagattagctgggcgaggtggcaggtgcctgtaatcccacctacccaggaggctgaggcaggagaattgcctgaacccaggaggccgaggttgcagtgagtcaagatggcgccactgcactccagcctgggcaacagagtgagattctgtttcaaataaataaataaataaattcatcatgtcatcaggagaaagtggatgtttcttacaataatcactccaacagttctgttactgggctttaggatgcctgatcaaaatgcagccttctctgcattaatttagcagcaatcaaatgtaaaaaacctttccagaggtgtcaggattgaatgaggtaatgcttgtgagagtgccatgcttgcataataaggatcacttgaaccatgtaaaacaaaatgttgttaatgcgcttgaagtcaacgatacgggcctgtggggtatatgaaaagaaagtggtgactgaaaatgatttctctgtagactgagagtcctcgtgattgaagtttgtgttgttgaaacagctatatttttgcaagcttttttccccatagtgattctttaatattttaaattgagtttatatgaattttggtttcagtctacttagaaaattttaaagtaacctgcaaattaattagaagtaccctagaaaatggcaagacttggttggggcaaatggtgactgttttgagacagatgtcattgtggaagggagaggtttaatattcaggggaagggagctgaagcttgcagagcagattccattctgccaagcctcttgtgctgcatacagagtctcagggcatcaagcaacccgagggctttcttcagaggagtagcttgaggcagcggcgagagaagggcaggacacactgacaaatgaataatgagaattaggtgaggagatggagtttaagaactgcttcaaactttaaggtggatacctgatggggctttctagagatgagcaattcttctcaatttaaggccagataggggagatgctaagtaggtaagaagtcagtggattttttggcctccttttttctctttttgttcttttaatccttcgtacccttgtcctgtgttcttttaggtaatgttcagtgaggtgtagccacaagaggggacataggagaggctcaagaaaacagagtttattatactcacatgtcttagaatgacaatcactgtacaggaggataggaggggggacacgtggggtggaggtgacagctctgagagcaggatcagctaagcaggtgggaaacaggtgggagcagagagagcaaggactgtgggcaagtgcctttactagtgatctcagtgcagttcacagctcagtgcagttcacagtgcgttgcattggtgcattggtaggtcgtggtcagaagaagacagagaggtgaacttgtggtaggggccaaccttatcaaacttgtgcacctggttacctgggtggggtgttcacagttagcgtatgtgggaatgaatgttgaggcagcaagaggcagcaggagacaacatgtgaagttttgaaactttgtaatacaacccttctcagtgtttttagtttagaatttattgtttccataatcacttaaggagcctaaaagcttaagaatgatgtacatggtatccgatggataataaagactaaagagagctataactatacttattaaaatgccatgattgtgagaccctgccaagtcttttgcattctaccaacaaaatattttcatgctatactraatcattagctgatgacaaatgcttcaggaaataatttcactatttataaaggttttacatttagtacaacttctaaatgccaaatatgatgttgtagttgctctaccctaatctccctccgccatcccctgggtcaaattgtatatagtagtaatgaatatggagaagctgtctgtaatactcgtgaagaacccacagctccatggaggtttacttggatacttaggacactgaaggacctctaggcagtgttttctgcctttttttgaattatgatatatataaaaaatagaaatatcttttttataattcaaactaacctttccccatagatactaatggaagcagttttataatgctgagaaacatctcaatatcaagctatgtattagtctgttctcatgttgctartaaaggcatacccgagactgggtaatttataaaggaaagaggtgtaattgactcacagttctgcatggctagggagggctcaggaaacttacagtcatggcagaagggggatcaaaaatgtccttcacatgacggcagcaaggagaagtacagagcaaagtggggtaaaagccccttataaaaccgtcagatctcgtgagaattcactcactatcacgagaacagtgtggcggtaaccacccctatgattcaattacctcccaccaggtccctcccatgacacatggggattgtgggaactacagtttaagatgagatttgggtggggacacagccaaaccgtatcacagaataatgcttgaaagaaacataaagcagatagcctatgcttttaaacgtacaggaaatcggctgggtgcggtggctcatgcctgcaatcctagcactttgggaggtcgaggcaggcagatcacttgaggagtttgagaccagcttggccaacatggcaaaacctcgtctctactaaaaatgggaaaattagccaggcttggtgatgcacagctgtatttctggctactcaggaggctgaggcaggagaattgcttgcacctgggaggcggaggctacagtgagccaagatcacaccgttgcactccagcctgggcgacagagcgagactgtctcaaaaacaaaacaaaacaaaacaaaaagtacaggaaataatgtccacagtgaatgacaccagtgaggaaaggagagaaggggagtcaggacagttattgtccataacagtgatggcatcctgcagggggcattgtgaaatcccctgcctgccagtagaggaagttccttggttttacaatctggctctgcaatctgggaagaactcttgttctttcttatatatatttggccaggtctaaggagggttagaggaaatctgccctctttgggaacggcataacttttcagtcaacttcctgtttatttaaatttggggattgttttacagtcatagggttttcactatccatggtagatttgagtaatgaaatttcttcataaacttagtaggcttctggccaagtgcggtagctcatgcctgtaatccccgcactttgggaggccgaggtgggcgggtcacctgaggccaggggttcaagaccagcctggacaacatggtgaagccgcttctctactaaaactacaaaaattagccaggcatggtggcctacgcctgtagtcccagctactcgggaggctgaagcttgaacctgggagagttgcttgaacctgggaggcagaggttgcagtgagccagattgcaccactgcactccagcctgagcagtagagcaagtcactgtctcaaaaaaacaaaaaccaaaaaaaaaaaaccagaaaaacttcaacttaataggcttctgatgtgttttcttgtgagtttcatttgccaatttctatgatggaaattcttttttagacctaattttcatccagtagacttggttgtgttactctgaacttaacaagagggcctgatactttggcttaaccaagaagtcttaatggtactttgttgctcaaagtctttttcatttatatttcccgttatttgcttcagggactcaggatgaccctggatcggttctgccatctgtaacatatggttttcaaggttgccaaagggaaagaatatgtttgaacaagcatgggagatgttcataagccaggcctggaagaggaatatggtagacagaatgctacgattgttggtgactcttgctcttgtgtactctcctcccctttgagtgtgggtgcaatgttcaatttgaaaagatgttattcctgagacttttaactttgtaagacaaaagggagattatatgattggacttaatctaatctcatgagccctttaaaagcaggatattttctctggctggtagtggaaggaaaaatcagagagattggaagtatgagcaggactggacatgctgttgttggtttaaagagggaggggccatgtgagtagtaatgcaggcagcctctaggagcagaaatcagctctttggtgaccatcagcagggaaaatagggatcttagacccacagccttgaagaatctgagaggaagggaattcttcccccaagcttccagataagagcccagtctagccaacgccttcattttggccttgtgaggccctcaacagggagctcacttaagcaggcccagacttctaatttatagaattgtaagataataaatgggtattgttttaagctgctaaatttgtggtaatttgttatacaacagctgaaaatgaagagaaggaatagttccttctgtttatgtttggttggctggaacttgtaacatggcccctctgtggtacacctaagagaaatggaagaaggcaagtgtagcctagctatgtgcccaggatgtaaaagtgggtttttggttaaaaagctagcagttttgctattactggtgcctataattaattaattgtgtgtctgtatattwatctatttgtgagcttgtaagtgtatgtatatgtgcatatgtccatatgtacatacacaamatacatatgcacatatgaattttaagtctagtttgctgaataagtcttttcttaatacataaggctcagtatgttccatgtgccttttgaaactgtcgyccaggctggggtataatggggcgatcacagctcactacagcctcaatcctctgagcccaagcaatcctcccacctcagcctccagagtagtgggactataggcgtgtgccgctatgcctggcccatgtgcctttttaatatattttttattttatagatttttttctacagtgctttggctttttgatatttagatgtttttctctgatgaggcacaagtttatttctgtggctcctgatcagttttttttttaacagtggcaccgttaagtacttgctgagcagtaccttagcctggtgggctggtggaacagtgacaacttctctaaccttggaatagagagactacagatctgcaaagaagtttctgaattcttagtctctgacagtgtggcagggatttcagttagagtagaggagttgactgttaatcctgcatctgtttttgtgcttgggggaaggctgaggccaacacagacagtgaaatgccttacttagtgcaggcacatcggatggctacatggtactttgaagttgttcattaagttgttgaggattgcagatttgtgtagcacatttgaagtgtgttgtggtgtaagcagcagggttgagggtgkwtgtgggcccygtaacatgtgggccattgtctgtgatccgttagccccatgctctttgacgtgattcatggatccttagccctgaatggttttctaggtacatctggtagacggtgccagacataatttggaaggcatgcggtctggcaccctgagatatattttagggacttggtgtcagttgagcagcttggccagggagagaatagtgaggcctgattttgtatctgagtggtaagtaacctgaaggagaggtgtcctgtagaaattgcagggtggacacacctctcacttctgttattttctgcatatactggttgctgaggtgaccctaatgtgcttctttctattgagttaatgtgtgtacagtggcttgatggctgaatttataccattcattattttactgcttaagtggctgcatctgggcaagaaggacctacaaaccctttgccatggccattgcacatcatcatcrtataatacactggctaaaggaagtgttttctggaggtgttcatcagtactgtagttaagagtttactgattaatattaatagcctgttatccagagatcttctacttctgatgatgaaccttgcacttaagttctgtctcccatttcactttttagttaagtttaacaaacagtaaaactgttttccattattctcttttccattcatctcatccattatgctctatgtattttgggccatttgaagctgataaacctaaaatctttggatttttcaccttttgatcattatattcaccttaaacccagtccaaattttgcagatatatttatagtgctcatcgtccctatgttctagacatggaaagctccttttccctagctccaagaaaagctggaagaatgtcattctttacacaacttaaattgttcagaagatatttttgtgatcacaaaggtgtatttaattcatttttgttttattttgtttttgagacagggtctcactctgtcgcagtggcgtgaccacgaatcactgcaacctcctcctcccaggcccaagcctccctcctcagccttccaggtagctgggactacaggctcacgtcaccactcctggctaatttttttgtatttttggtagagacagggtcttgctacattgcccaggctggtcttgcactcctactcaagtgatatgccttccttggcttcccaaagtgctgggattacaggcatgagccgccgcgcctggctaacatttaattcactttttacaagctctttcagctactttctgtgtctgaagacacagacatgtaaagcattttgatacattttcaccaaaaaaatcaccttacataaaaggacgtgtcttaaacagaaagcttatcataaaatctctatatcaattgttttcctaaattgatgactgttacgtcttccccttttgtgaaacagtgagttatactgatattttgtgatatgtactggcttgccctttataatatctaaattacctaaattcttagtgttgtcacccctccagtgccccccaaaaaaggtcaacaggtcagagttaaattagcatttactcaggaatggggkttgcaacctggctagcagtcagagattgtaccacccgagaagggcaagggggctatttaaaagaacttatttagattacataaattgcttgtcacattatttcattggtgtattaaacaagtctttaatcagtagtagaagggtacatttgtatcagttattcaggaaaaacctatatacagagtgtttgtaaagattaggaccagttttacttgtattgtgtagtgctgagagcacggttgtttgtgaaggaatgtttttcacagttccttttcgggtctcaaagttcatcagcagtttaatatggagtagtagcccaagatggagttactgatataaagcctggaacattgctaagctcatagtgtccagtaaaactgtgtctactggttgctgctgtgaatgattcaggtgaacgtaggcrttttctgtaggcgctttccacatgattatggtagaataatttgattgtttcctaagcgtatcattcagttgtatcttcatgacattttgtcaatctgtattcatgtttactgactatataagggttcaccagcaaaacagaaccaacatgatatgtagatacatgagagggatttattatgggaattggctcatgtgattatggagactaaatcctgcaatatgctttctgcaagctggagaatcaggaaacccggtggtgtaatacagtccaagtccaaaggcctgaggccccggggagctgctggtgtaagccccaaccccaaagtctcaagaatttggaattctgatgtccaagggcaggagaagatggaagtcttgcttaagaaaagagagcaaatttgctttttgctcttcccaggccctcaagcgattggatgtctgctgccctcagatcttctttgctcagtctactgattcagatgctaatgtcttctggaaacaccctggcagacacacacagaaatattttaccagctatctgggtatcccttaacccagttaagttgacacataaaattaatcatcacactgacttaatttaaaactgaatcagtgtaccattttcttaaatggaaaaatcactattaattatcatgcaaaacaaaattaagtcctggatactcttgcctgagtaaatctgtgagcttgaggtttattctgcctttgttaaaacaggagattaacagataagtagtagatattctaacaataccctgagatttcctccttcactaaattagaatggaagaagaataaaatggatattttaatttggggattcagtgttcttaaggaccatggtattgtgaaatatgtatttcgtctccctgtttcctcacagaaaaaaaacctctaaaacccatgggatcatcagggtggtaactgtcttttctctgctacgagatgaccagtggctggggactcctatagcttcaggttggggactgttcaccagaaagaccaatgtatgcttagagggttgggactttcagctccagcctccttagaggggaaagggggtgaaggttaagtggatcaccaaaggccggtgatttaatcagtcatgcctatrtaatgaagcctccataaaaacccaacatcacagggtttgggaggattttcagacagctgaacatgtggtggttcctgaaagaggatgtgcctggagagggtatggaagctccaggctgcttctcccatacctcgacctatgtgtctcttccatctggctgttcatctgtatccttttaatacctttctaataaatggctaaacataagtaagtgtttccctgagttccgtgtgctgctctggcaaaktagttgaatcacaggagggagttgtgggaaccctgatttatagctgrtaggttagaagcacaggactgtgcttgtgactggcatctgaagccagttgtgggaccgagccctcaacctgtgggatctgacgctatctccaggtagtgtcagaattgaattgaattagaggacacccagctggtgtccagtggagaatcatctgcagaatgggttgctggtagggagaaatccccacacattttggtaaccagaggtcacagaaatagtctgtgctgggtattttgaggtatatatataataggagaaactgtgtttgtttttttcctacatccttacaaggacacaagaatgtaccaactgtcttgttcaaaacatggcccttcccatacataatttgactatggaaatggttgacctttttctgagtaccaaggagttttctgcctgtaatggggtatttaattatattttagaaaaaggaaggtcatttgtttagagcagcactgagtcatctgttctgtgcccgatgttcggaaaggaggtagacatgttctttaagagaagcttttgaagtaatttagaaaatggtgcaataccatccgtcatcaggctgtgtggcacaagatcagtaggagcccagagacttcacatctcctagttttcccattctgagcacttgtgagaccccagaccagtcactagtcacttgatctcaacttcttcctcctcacacccacattttctcagttgcacagctgaggtaatatggtcctgggcatgattttaggttctgacgttctrtgcttctggtctcgttcccctctggttcattatctactgtggctatagtgacttttctaaagagcaaatctagcattgttcttcttcttaaaactcttcagtggctccttatggctcccaggataggtccctctgaagtcctgttcaggagtctgaagtgtcatctgtgtcctgctcagtgatctgctttcactctcacactctaaatgtgctctgagttgtagctgtgctagttatcctgacaccttgcaattatgccatacgtttcttgcctttcaagccttcgcaccatgctcttccctctctgtggaaattcccttctttccacttggtatttgattaatcaccactttatcagcttcatattttctcagagaggttacccttccctcatttagtgtgggttaaatgtccttccatgtgcaatgaaaattgcatgttgtgggagaggaacaacacacaccagggtctatggggcgggggtgggagagcatcaggacaaatggctaatgcatgtggggcttaaaatctaggtgacaggttgataggtgcaccgaaccaccatggcacatgtatacctatgtaacaaacctgcacgttctgcacatgtatcctggaacttaaagtaaaataaaaattaaaaaaaaaattgtgtgttgtacctctgtgaagtgtagtgctcggctcactgctatacaggcaccagtctccttgatggtatcctctagggtgggtataaagagaaggaccctgccattctatacttcattctgttgccagttcctagcctgtagtgggcatttaattgataattgttgaatgaatacatagcttctgtttctgttgatccttatgtatatttaaaagggggtcctatgcatatatttttgatgtattcatttctgcttaaaatacatcaccgatttctaaaagttaatgtagaatttaaagcacaccctcataaaattgtaagattgtaagtttaaaataaacttccttcattgtacaaatggctagcctaggtactattttaactcatttattactcacagcaaccctatgaacattattatccccattttacagatgaggaagctgaaacacagaggtggttacacagcttcagtggcagagtcaggattgaaaccacaccacctggtttcaragccagtaactgccagtagtttttaaccatgagtcctattgtcaccttatatatcaaaccaagacatacctaaaagctcttagtggtcaccaagaagacgcgaacactttagtagaaaaataagacawcaatatgaaaggcagtatttgaaagagcaagtggccaagatacgaatgcaaaaatcaaggaaatcagacagcaatatctgacatttttcattgtttagattggcagagatgaaaaggatagtaacattctgggttagcaagagtataagaacatggrtccccgtttatggtgggagtgtaaactgttaaaacacttctggagatcagtagttctcttccctgtaattctgtttttaggaaactattcacagaatataaatgtataagtatgtacaacttaggtacaagattgttcactgtagtagttattgtggtgaaaaattgtaaacaacctcaataagggatgaggaagtaaatctgtatgtcaatattatgaaatctctacagctattttatctatagggcaatatttattgcagtagggaaacattcatgattattgccaaaatgaaaaaagccagccataaagcagatatgtaatatgtagtaagcctgatattgtaaaaatatagctatgatggtagctaaaatgcactgagaatttatagaccaggcgttatgctrtattgttacagtaagattatttttttaatgaacatttgaacagtgattattcctggtcagtgggtttatgggtgagtagtgtttctatattttctttcttatctttggtaatttgatctattacaaaattttctttccacttcatcgtctttacttgtaaccccactttctcaggataagttgaaaacaaggaatcgaataattttaggagccatcacggggactaggaacaaacccagtttctagccaagttctagaactataaatatatgtcagtttgcttcattaggcatttagcttaaaactattggaacacctgccctgccctccatagagccctgaattaaattgtgctgcttgggtttcttctgaatgcatggctacttttctggtttcaccaagaagatgtgtacaaacattataagtaagcagctgctaatgacttttgctggcatttcttttaaatgaagatttttttttttcagttccctaagtcttatccctagtgtcatagcattgacactgttttttcgtaaagggaaagagggcagctaagacatgtatagggtattggagtgctcctgtaagatgttcttggtaatttggtgtgagctgttcagcctcattctccagcccttaggccacgagtctcctgggcatctgtcacttcttagcttctcagcaaaaagcctgtaggcagtgccattctagcaaaaaaagaatgaagtgagggagagatacctgagaagataggagacgttcccagtgatccctgttgaacttgaatgcggaacattgttaatagtctctggcaggcttctattttgaagacagaaaatacaaagtttaggaagccataaatggtaaaataatatattcttctcagcaacccaaacaaaatacataaaaatggaaaaaacactaccgtgaaacgtagyctcagtaatgagatgggcaggccacktttgcctttctcccaaagaggacacgtctagcaagatccactggactgctgacggtggtggattgctgggcacaagcatgcctttatggatggtctggctttctctggrgcctgccactctttgatggcttcaatggcaagtgcttcgacctctgagataaataatttctgtgaaatcatttctagagtgaagctaacttttccaacctctgcagcatcttgtgatgtttctggggataatattaacttgtaagctgagaaacagttgagactgcttcaagagatttgttttcttgtgtagtaatctgctgaagcatataccaaattgatgtttttatttgctgcaaaacttcgggttttggtccttttaaagtagtttcagatttcagcatttaaaaataattgtcctggcacagtggctcacgcctgtaatcccagcactttgggaggctgaggcgggcagatcacttgagttcaggagttcaaagccagcctgaccaacatgccctgtctgtgctaaaatacaaaaaaattagctgggtatggtggcacatgcctgtaatgccagctactcgggaggccgaggcaggagaatcgctttaacccaggaggtggaggttgcagtgagccaagatcatgccactgcactccagcctgggcgacagagtgatactcagtctcaaaaaaaaaaaaaattactatataacaatgattttttgaatgaaggtagatgtagcataattgaactttgttacttatgtattctgtattatgtgcttgttaggtggttctcttaagagtaagggttttgcaagatgcttctttcataattggacacaacttgtagaaagtgaggtgtgagtttgtttgatttatatgtttttcttatcagattatggaactatccattaataagctactctagaaattatttggatttaaaaactctctttggagagttgcaagggcctgcctgatctgaccctggcctctccaccctgattgagggccagtttttcccctctttatgctctggtcctccatctttcttaacaaacagtaagcattcgcccattaaccgccaggctctgtgctgagttttaggtatagagagatggataaaatactcattccctgcccccgtggaactggcagtgcagtgtgggagacagaccaatgattatgcaaatatataattagaatttgtcacaggtgcagcaaagaacaatgctagggcactctcacgtggaggtcatacctgacattctgttgtggagagaggccatgttcttttcagtatgtagaaaggttaaggttgtctatgaggtgcagctggggaagctctcaccagctgacgtcattcaaaaagtgaacagggtactactatttgcacataaaaaagagcaggttatggtttcacagacactttagattcttattcagagaggatagcyttgagggtaaagaactacttctcatgtcttactgaagctagggtcatggaacatctccagctggaatagtttctgttaaataagattgtatgatatgattttacatcattatctttcttaccaaagatcataactctgtctcacagaaatgtgtggtcatgcagtgtttccctgaggatgcgtctttaaactgagaaattgaggctgagaagaaaccaggcctttgcagagttgcgggccaaggggtttgagcccaccccccgacctgcccacttcatgtcatctgggagctagtccactcccactcatcctttaggccttgatccagatgatacttattggaatccctttctctgacctagtaggttggatcaggttccttttattacattcaccatggtttgtgattgtgcattaattttatggccattcgattaaatgcctgtctccttcagttggtctctaaattcctgaagggagggatcaagtttctgctgatctcttggggtagttaccattatgcccattttactgatgaggaaactaaggcacagggaagtgtagtgactcatccaaaataatacacggtattaatggtggaggcagagtttgacactggcagtccatcctttcaaagttggaatagactttaaatgaatcatttaattatttaattggtcaatggaacaaaatggaaagtccagcaataagtagtacattgtggtgatttggtatacaataaaggcagtatttaaaatcatcaaaaaagaatagattatttagtaaatggcatttggacaattagctattcgtttgagaaataaaatttaatcctttttgtcacatcttaaaataaattttaactagttggaaaatatgaaggtaaaagagtgtaaaaagaaaatatggtttcttttgaaatggrgaatactttctaaacataacatatcatgcagagactgtgcactatggatgaaggctggtgaatttttgctacttgtaaaaatgaagaactgctgagtagcaaaggatcctaaagatggttgaagtgactaatgggattaagatttgcagcatacaawtaaaaataaaatttacaaaacccagccttggcaagggtacastgccaaatggcactgtatttccagcaggttcttctttctgggatccagttaggcaatatgtgtcaatatgcagattccctttgattaaggtacttcttgraatttatcacaagtaggataattggggatgtgcaaagatgtatgttcaaaatttattgctgtgttaatggtagtgaaatattggtccagtcatatgatggagttytatgaggcaaatgatgtgatctacattcacrtggaaacctttctttgacgtgcttacggttgggggacagattctagccaggcatttgtagcatgaacccatatgtaaaattgtgggtgtggcctgtgtatgttcttttggatgggtggtgatttggaactagggtcacaatgttaattatctctagatgtgggctttcaaacgttttctttttcttaaaattttttttgatatttcctttaaaaaatataaacggtgaatatatacctattgataataaacccatccaggaaacgggaataaatatctaagactgcctatcttttttttttttctaatctgaacagttattttgcttatgaaatataaaattaggacactttgtcattttgtatttaaattcttatawcacttattttgggctcctatacatgctcttcctgcgtttggctttcctagccactgtagttgggatgtttgaaatattcagggtactgaacagcagtttagacacaaaaargtacctgggtgcagaagcattttcattaaaattacatgaacgctggagtttattctacagcacaaagccttcctggatgaactggattaatgtttgatagaaacacagcctcttaagcatcaatgttcttaaactgtttgattattaattaaatgtcctatgttcttcagccttaaaaggtaggagaaactaagacaaaggagaaaaaaatcaagatgtcaaagacaggaatgtaatgtcgaagggagaatttcaaataacccacctccacacaagcctttctcagggagacggttaaacagcacagctggctccgattctgatgttttctcagttagatcttcagagaacagttttaataaagctttaattatggagcatccctacacacactgtagacagggatcattcagctgcataatgttgctgatgatatatttatggaatgctatttccatcctagtttaaggtatctgttgctcttagttactggagctatgctgatttcagaactacaaacagyttttaatattgaacatgctaactggttcaatgtatatgttgtactactttagtttttgtggggartggactttaaagattagtttcatgctgatccacagtgtgggaacatgtttggtatttttaaaaactctttactcattgtctgaggtgagaaattgttggaagacagagcagaggggagaaagagatatgttatttatgtaggtgaaaaataccatgtgaatttagagtttagagtttagaatatggcaaccttaatgaattttggagctgcagtaggtaatggatctctaaatttttttctgcaatttttgttgttatccattagctcagtgacaatcactgtgatcccctcccttggtcagtgtgtccctcagcattcttaaccattgtgtatgtgcactaccaagcttttccctgggtgcctcatgtgtggtggtgtttctacagcttttttgcagtgctcaacgtcttcacctaataggtcacgtggtggctgtgcctgacctgcacatggtcatttctttttggttgctgaagcccaggttgtcttaagagataccgttgtttttctttttctttttttggaatcaatttttttttttactaaaggacatacagcaagatgggtgaaaggtggaaaaaataaacacagggcttaatgttgagagggtatttttagacttagaagcagcttgctgctttccatgaaatagttgagtgtaattcatgactcatgtttccrtttttggtggtttttctttaaaggatgaaggctggattaactgtgtgtttgtgcgtgcctctgcagtttggttctctggattcataggagtgggtttcttttatttagtaactatgtgcataatttccttttgtcctttgtaaaatatctttttagtcataaaaatcaaatcatcttcccatgtaagcttcagaaaaggtgaagttatatattgaaacaaaccatgacagtagttaaattttttgtagggatagcagaggaagccagtgagtggttcaataacattgttaattttcaagttctctggaatgcttaaatagagctgaagtacgttttaggtcattttgagttggtacacttttgttggtgacttgttgtgtcccaaaaacttggggtatggtcactggggaagagaatcctattggtgggaaatcttcatctgtctgtggtgggtttgatgctgccaaataggtaaaagtaattacaattctggtagtatgaaagagaaatggtcaagcttgggagtcatggattgtactttggggctgggaatcttatagattgttcatatatggaaagcattttaagggcattkcagaaagccttctggttgaacttcatgaaacttaactcttccttcccgactgtctctcccaccttctgaaaaccacagaaacagctctatttattgggttctatgacttaaaagaagaaaagactgaagagtgacaatcagacgtctttaaagttctcttttggacccaaggcaggatgctcgtggcatttcaacaccttcctcaggatcagagtagggagagacagaaatgatctttatttttgggatcacagcttgaaatggggctgctgggctgtattggatttgattctgtccaaaaggcgaaagtaatgatagctgctgggctcccatcctccatgaaaacccagtcagttcattgtcagtttaattgttgttttctgagctcttctgttttgaacatttttaaaaaagacttttgctttcctctttctaagtgttttgtatcataccccaatgcagaggccaccagccaccttgcctctttcacccccrtctccaggagattggcaggtctaatggctgtcactgtagaacagaccttccaggtgactcttgacccctcaaatgaggagtaaccggatcccatgtagacctggcagtataaaaaaactttaatattattgatttgcaaaagaaggattataaacaaaacgctaacaagacagttgattgtcaaattttcctctttatttctccrtttttggggaagatggagtgggaataaggtaggaaacatgcaccaaaatgaaaacatttcttgtaggtgagaataacaaggactctatcactgaaacattctctttttaatgtttaactgcaggatgcttaaagaaatcctacaattattgtagacattgatgtgctatcaagaaaaatccatcttaaatcccctgcaaagttcattaaaatcttcctcattgtggtactttacttgagattaatttctttaggtagcatgtttttactttagttgtagcaaagagccacatttacaacaggagcttgggcccagtcatggaacagtgctgtgtgtgmacattctgtgggactgattctgaggacatgccactgagtcttttggtctgtgttggagaggtcaccttaattccagagcagcaaagagttttatttatgagaaatatcctgatatgttaaaatatgtttttgaacatattttggatcaatttgtcttattaaaaagccagcattatttgtatgccaatgttcmttgcagcattattgaccatagtcaagaggtgggagcaacccaagtgtctgtggagagataaatagataaacaaaatatggtagatcctgccacatgctacaccatggatgagctgtaaggacattaagctaagttaaataacacagaaataaaaagccaaagactctgtgatcccacttataaggtacctagagtagtcaaattcatagacagaaagtagaacagtggttgagaggggagggcaactggggagttgtgtaacrggtacagagtttcagatgggagagatggaaagagttctagagatggacggtggtgatggttgcataaaacatgaatacacggctgggcgtggtggctcactcctgtaatcccagcactttgggaggtcaaagcccatgggtcacctgaggtcaggggttcgagaccagcctggccaacatggagaaaccccatctctattagaaatacaaaattagccgagtgtggtggtgcatgcctgtaatcccagctactcgggaggctgagacaggagaatcatttgaacccgggaggcggaggttgyggtgtggtgagctgagatcgtgccattgcactccagcctgggcaacaagagcgaaactccrtgtcaaaaaagaaacaaacaaaagcaaccatgaataaacttatgccactgaattatatatacacttacaagttaagatggtaaattttatgttacatatattttactacaaataaaagttaaaaaatagaaaaaagggtgagtcagtctccgatatgttgtttttagtttctggtcatggtggggtttggctgccctggtcctacgcttgttacaaaactgctggtgggaagggtccttagacctgtcatctgctccaacactttcacttcatacgtgagaaaactgggtctcagaagtgaggtatttaccccctcctgcgtgggcttcttccttcagtttcctggagaggctgtgcaaagtgcagcaagagctggacactggactctgctgcctgggctccactctgctctgctgcttactcgccaagtccacacagaccgttaacttttctaaacctgtttctgaatgtataaaatgggaataatgtcagtatcctatgaggttgttatggggattaactgagtgaatgcattttaggtgcttagcatagtattttcacacagtaagtaacacatgaatcttagccgtttgttattgctttgttattgctgttgttactggcatgtgctgcaaagagcctttagggacagaggtttgggattgaggctcagtggcaattacttgttagttctctgtccttagccatgctgcttaatttctccttgttacccagtgcatgaagtaaggatgggtgaagcacttgtcttggtgtggtgcttgtgaagagagagagtggagtacctgacagagcacttggtgaatggtaatgacccaggtcagttttagtgggtaagaggatgtcactgcagcctggagggctggcatctactaaggcgtggtcttcaagggcggtgctgagaacaggcatgctcagctctgaccttgggttagggtggaggtgtgttcttctaggcccgctttctagggcctcctgagaaaggggtcaccggacttctctaggtcagttgtccctaaaagtaggtcgaggacctgcaggtagagcctggtatagyttgagtcagggacagaggtattagtgttctttcacaagtcatttttttttttttttgaaatggggtctttgtgtcccagactggagtgcagggggacagtcatggctcactgcaacctcaacttcctgggctcaagtgatcctctcaccttagcctcccgagtagctgggaatacaggcattcaccaccatgcccagctaacttttttagaaaaattttttgtagagatggggtctttctgtgttgcccaggcttgtcttgaacacctggcctcaaatgatcctcttgtcttggcctcccaaastactggcattacagacaagagctactgcagtaggctacagttacttttgtttccaatcccaggtaatagacatcccctcactactgactcatcctcttcctgactgtttttcactagcttagccttacctacttccagaggaagacttcatccgaaattgagatgaccagggaggtcatttgtgctcaagaaaaattcatctagcaggyatgtattgagaaccagtatatgataggggtaagaggctagaaatataaagggtaatgaaatgctgctgacatgcaggggctcagcactttcagtatatagtcctagtacctgagagctagcaaaaaacaagcagagatgtttctcttagcccaggcagctcctcastgtgggggtctggtgccaacattgcaactgtattgtgtattatttaaatgtgtttgtatgtttgtgttcagtgtacatatgttttcagatttgtgaaaaatacataataaactgcatgtcataaaattcatggtgtgagatttgtcatagtctattacattcctaaagactctcaatattgtggacattcaaactaaatgattccagaatgactttaaaatgctagtgtcagagcaggcagtagggatgccttcctgtatrggtgtggccatattcacctgtatggggcccaggcagtaactgaactgatagtttcatcaaagtcaacacgttattttttgaactctgacactctatgcttggtatgcttgagcacatgatccctttcattaatggcttatttttttcaagtagtctcattctacccttgtcaaccttgacggcggggtcagcttcacttgcgtgaggtttgtttgtttgtttgtttgtttgtttttgagatggagtctcactctgttgcccaggctggagtgcaatggcgtgatctcagctcactgcaacctctgccgcctgggttcaagcgattctcctgccttagcctcccgagtagctgggattacaggcacccaccaccacatccagctaatttttggagttttaatagagacgaggtttcaccatctcggtcaggctggtcttgaactcctgacctcatgatccgcccgccttggcctcctaaagtgctgggattacaggcgtaagccaccatgcccgctcagaccccacaactcccaaggccaattaaaccagaagcttcccaagtgttaccaagctgcagcctggcttgggaatcattagcctatccaaaagtttgactagtatctcccttcccttttgattgatatgaatgatgctaatcttgcttcgatggtccatggctgtaccagttcagtttcttctttgtatccatcatgagagatctgatataggaaacaaggctaaaatcaattttaaaagtttctacagatttacttgatgttctctgatgaagtgaagctggatatcctttaactacctgagctgcctgccaccttctgttttctttctctttgctaaattaggggagtaaaggtgaaacttaatgttagttgttccatatcctgcagtgctgaaaactaccacaaccaagaaataaaattacaaaattcaagatgtattttggctagcttcactctttgtccaggcagcttcagtgaagtggcaatttagaaatagacggtcagcagtagaaagtaagaccccacttgtgatttacccaagttctttggaaagatgcaagccctcctgtaaacacacagtgattcagaggagcatgtttactagctgaagccctttttttctcctcttctcataaggccggttatcgagggagtttgtgtgtctggggaaaggactactttatgatagttccttaaaattatgacatacagtcatgcatcaggtaacaatgggatatattctgagaaatgcatcattaggtgatttcataattgtgtgaacatcctagagtgtaatcacacagacctagatggtggagcctgctgcaaacctaggctatatgatgtagtccattgctccaaggtaatgaacctgtacagcatattaccatactgaatgttgtaggtaattataacaccatcatagcatttgtgtatcgaaacatatttaaatgtagaaaagatacagtaaaaatatggtataaacgattaaaaatagtataactgtacagggcactttccatgaatggggcttgtaggactggaagttgcttctgggtgaattggtgagtgagtggtgatgaaatcatctaatcagttatgacatagctgagtttttcaggtcttataatcttacaggactaccatcatgtatttgagccatcrttgaccaaaatgtctatgcggcacgtggctgtatttagctgaacgattaagtagaaataacctattaagacctttttccaaagtattttttacatggttcattgttcacattctgtatatatttacatcatactgtatggtctgcaattgtatttttgactttttcttcaaattttgaatggctaaaaattccagcagggttcaagagcttgtcctttttgattgtgttttgtttcatccgtagcagaattgcctagattgaaatgaaatgaaaataatgaatggtatgacacttggtatcatcacaaactgatcattcaaatgaatgggttaaatactgttcatgtcatgatttatggaatgctttcctgtcccaaatacttgtgcttggtgctaggcatacaattatatgaaatgtttattatggtgaagaaattcaagattttccttcaccttacctcatctgttcaaatgaaaatgggatctttgtgtttggggggctgttttgcacttgtatatataaacaagtgaggaagctggatatttaggaataaaatctctttttgaatttagaatttgtaagctttcctcttttttttttttttttttttgagatggagtcttgctctgttgcccaggctggagtgcagtggcacaatctcagctcactgcaagctctgcctcccaggttcacgccattctcctgcctcagcctcccgagtatctgggactacaggcgcccaccaccacacctggctaaattttgtacttttagtagagacagggtttcaccgtgttagccaggatggtctcgatctcctgacctcgtgatctgcccgccttggcctcccaaagtgtaaactttcctcttaacggtcaaatcttactgaagaaatctgttaatggaaactttgataaatacaatgaacagatttggttcttcctcatccacataggttggaagcaacaagtattttgattgttgactcatacttctccagtgaagtgacaatgtgttgatggattaaacacagttatttttaagctgctttgacattctctaggcaaagtattatcaggaacagagccctgagatttgagagttgcagatgctttcatgattcttcactgtctgtctctccttacataagtgtttccagaaagctaataaaattattcctgaaggttaaaaacaaggaagttatgaaccggatttgaggttgaaattaggyagggggaacatgaattattttctgtaacgtryaagtggaaacaatttaatcaatcctttttatttttattgaatgtagacagaaaattcagtgcaggtggctgcattgcatttcatttacaataattaaaaaatgtttgagtaaaacagctctgttttggtggacagagatccaggacacccactttcacttacaggtgatccgctstttcactgatcccagcatctgctgcttctgtgtcacaccgctgggggaatgggrgatccagagctgatgaaggcatggtcctggctctgctttgtccagctagtgacaatgttagtaacccgcattattgagcacttaataaacaataattctcacagcccgataaagtagttttttatggcatcctcatttttagatgaggaaatagaaatgcagagatgtgatagcttgcccaagatcagtctgtaagaggtataattagagtttgaagccaggtagtcagagtttttttttttctggatattttgcaragaaagtttgagacttaaggaaagagcaaagatgctcttgtgtttaagcagatccattgagcactttttgggtcatggtctctgtacccataaaactctgaaaagtacaggggttgcaaatcatatgcgtgcgtaagccaagcaggtagaatagaggcatgaagttggccagatggtctgtggtgagcaggggagctctccgtggggccacctccctgcagctgtagccagtgagaaagtgagcccagtatggctgatctctagaagggaagctaatgaaaggtttaacaaaacatctctgggtcataaaaattgatctttacatcacatcaggtttgtgaatatacaacgtgaaacgtttagatatgtacttgatacggctttggggaatttattgagaatgtgggaaaacatttgttctctaaaagaaagttgcagatcatactgcaaagtgacagctgagcaaaggctcccccttgagaagggcatgtgctactcagctcatggcatctgggctctcattgataatggggggtwggttggaagattcttggaagccacagcaagacacaccacacctgggctctcataatcattttgccaccctagagagctccagacacacgattggccctctaacagaggaacattttaatacaagtgtgtactgctcaaggactcatttgytaagttaggggcagactccttggtaccaccaaatcctatttttcctaaatcggtcaatgtattgtcatatcccctgtgtgcagttttaactctgtgagtctggatttgaatggaggcccagctttattctagctgtgcaactgtgggcaagttccatcttctccaaagttagcttcctcagggtattgcaagaattaaatagcaaaatgcacataagtgtcyggcgtagagtaagtgatagcttcctttcttttcctcattttaatcaattacccagttggtggatgtgataacaaatgaacttcctgaagatcagagctgtgtgttagtgtagggctcagatcctctttatgtattcagtgaacactatgttctgtctaacaggcacctgctctaggttattagggccattaaaggcatgttatattctcaaagagtatacaatttagtaagagacacagaaaaaactgatgttcgattgttaggttggtttaagttgttgatacatacttggaatgactaagatcattgtttaacattggtgagtgcacactgcaatgggaactttgtaatgctggagaaaccctcaactgttaaacatatacttaaaaaaatcagggtgtaaggatccctggctgaatagtgttgaatttttttcattttcctttttttgacgaagaagtttaacacaaaattattaagcaaagccattcaagaagtacagcaagttttctaaagtttttttttttaataaaagcgaatatcttctcctataaactagcttgctgacccagaaattgaactgtgattaaaaaatagggcagtgccccctcaaaatgagagttgtcttatgttatgggacgcttttttggtgaatactttatatttagtaatctcgtttttaaggttgtaggctctgtatggtaaaattaatacagtgaaaaattacagtctgaatatagagaagatgtgagtgccaaagtgttaaataaaacccttatttcttcttagtgaaggttctttcaattgacaattaactggatttttctatatttctctgagagttattcattgtgacasattttgtttcatgacagatgtaaagaacttctttaatttttgatgttcatagagtagacgtcatacaataataaccttgcaaataggaagtatcgatcattggttttttttatttcataaagcctaacaattattttactatagggaaatatacaggttgaataactttatagttttcatgatcatgaagtaacttccaagttatttcatagggtaaacgtgggtacgtgatagacatataggacattttggtttctttttttttcatttttgcttttggttgaaattgttcgtggaagctaaaatgcattctaaggtgaaataaattttcacttatccttgsggcattacaatttaatagaaagagaagctcatttagaactttattggcttcagttccttctggctacagcataatcagagaccttgactttccatgtcatcgcattggtgtgtttgagatgtgtgtgacctgtatatgggatgtatctgagactctgtgactggtaactgaggctccctgttactgagttcatgatcttacattactgttttcatgagaagccagtggatccctgagacatggactaaagcttttaatgcctctcagaatatgtctggttaactttggtcactgcagtcttcttactctgggggccttgcccttgctacaccccgtcaggaggagattagaggtgatcattgccttgggctctgtcttcagtgccaacagaaggagacatcaggacttgctggccccaggtctgcccaactcctcttgtctttggtgcccattatgggaatcgtaatgacaacttgcctatctcaacactctttcccaccataaagtaatagaatgctttatggttctgtaagctctttttgtgtgcatcatcttctttcaccctgaaaatgactttgtgaagtcagtagctaataatattgggactagttgtgcatatggggaaattctcagagagaggaggtgcctgggggaaggttgcctagcagcagagctggcatagaaggcaagcccgtgacctgtctgtatgggggaaagtccggctcttcaagggtggcattgcctgtctgtcctctctctctagttctgtgcacagaaggaacaggaacaggaacagaaggcacagaggaacagggaggaaaagcccttccrggagtgtgcctgagtgtggcttgtggtgaatttgtggtagtagctctggtcagattttacaacttagaatatgttttgaatccatatatgtggtacactctttttgtgtgggactgacacaaccctcttaaccttaccacatctggaaacttgcttgaactgctgaatctcagaccctatctcagacctaagagtcataattgctcttaatcaaggttgtcaggtgattcttatgtacattaagtttgcaaaatgcagctctattgaaatacagaggaccagaaattgtataattgagaataaggtgaggagaggaaggggtgcatgtgtgtatgtgtgagagactgggaggatgcatttcacttgtgtatgtaattgtgggagtgtgttctcattttacttgaaaaagcagctcactgagctataattcacataccatgcagttcacctattgaaagtgtactgtttaaaccacttattggttttaagtgtgttcacagccttgtgcacccataaccgcaatcaattttggaacgtttttacacctggaaagaaaccccatacctataagcagtcactcaccatttttccacagtgcctaccttgcttccgagaagcccctgattatcactaatgtacttctgcctctgtcttttggatttgtctattctggtcatttcttgtatgactgaaataatacaatatatggtctttagtgtctgaatttttttcacagtttatccatcttgtagcgtgtatcaatgcttcattccttttttactgctgtcattttgttgtcaagtttattttgagcaagaatacagagattcacctttatcctaagctttgatgaccttaggctgtctaaatacggtcttttattgtacaataacattcaataagagtaatttcttagtgtgaccattgcttttctgatgccacgtactctagaatctgaaaagtgacagtgagatagtagaagtattgttaaatgcattcaattaaagaagcaaaacattagtattttccatttgtaaagttttggttgttaattttcaaccactttctctgtaaaaagcagtggtatgccatccatgctctgctgaaaactatgcgtgcctttataaaatatggagctgatgttgctgaaaattaaaatgacaaaatattgtgtttagataaataacaacaatggcartatttttggcaagaaatcacatattgtccctcccccaagcagtctgttccctgcaattctgaatgtttggtaattctaagcaccctagaggaaggtaacattcttcccttggtgtcagtgctaagctctgagattgttatttgtcaaataaagcacaaatgtgttttcctctagttacgtgaagacmttgtgtggaatgccttactgtttggagaaaatcttggtttggctcttgggctctctggtgatcattttataatgctcatyatgggaggtgacgggaagaatggccagcaagatgctctagcctgcagaaaagtcactttagcatttccctgctttgactatggcacacggacatttggaaattcttattctggttttggcaacacaraaagctttcctttttccccttccctcctggctgactaagctcatcttaatgccactaaattaccaatgccttatttggcaagctgcctggtaaatcaaatgaatgacgacaatactggagatcttgtgtggtcactttctaaagggttttgtgcctcctttatactcttgtctccttctccttctttggcgggtccactcagttatttggctctgtttgggaaggctctgggaaaaatgccatttatctatcttttcaacttgaggggacatgctttyttcacagatttytttgggatggaaagttctttctttaacctgattactgtttytaggtgctgtaaattgctgatcattytcagtaaatcaccagcattytgttytttytcagtcttgacaaagttgccattgtgcatatgtgtatttgtgtgtgtgtgacagggaacatgcatggtttytgaaaaaaaaaaaaaaaaaaaaaaaaaaaaaaaaatccttgccccttttagatttggaaattagcatagctaggctagccagatccctcttttggaggaaatgggaaagattggattgagcccttgtgtcaaggaaattgacttggctggatttcagggatccctgtggactggcccactaaagatctgtgtcagtatctttagtggcactggaattgggacagcgtagctattttctgtcatagggcaaactcagggggaaaagggcaggcacccaacattctatgagaacttccatgtgtcagagagtgttatgtaaatgctatgtatattcttgtgtagtatgacaaccttgtgagctgtatattactactgttgttattattaccatcactgcttcacgaatggagaaactgaggcccagggagatcgtatttcctaaagttctacagctgagaggtgggttgcggaggctgctgtccttttctaccaagtgaagtttgtctttgctctttctctgccatattctttaaaggggcagatgttacaaggttgatgcggctgatggaaacactagcataggacaaaaatacaaaatcccttcacagactcaagtttccccacacccaaaaggctccgcgacagcatttccaggtataggggcaagcttctgtagcctccagcaaccacagaggtgcccagatgccaatgacaccctgactagagtgagcatgtcctctctgctctcagagtcctctgtcattggacccctcccaactgctgtggacacttgggctgtgtgctgcctactcccaggtgttaagttactggtaggacccacggctgtgtgtttattgcacaatttgrtgaatcaaaggctgacttcctggtgagcaccccstagcagggtgagatatggacctttctggagtctgttttacaagaagtgtttactgggatattttaggaattctcagataaatccatatgatagcctacctgtatttcctatgaataaattgggtatttaagatgtatattcttttcatttgtcatttttccttgaktttaaaatttcccttcattggctgggtgcggtggctcatgcctataatcccagcactttgagaggccgaggtgggcggatcacgaggccgggagattgagactatcctggctaacacagtgaaaccccgtctctactaaaaatacaaaaattagccaggcgtggcagcgggcgcctgtaatcccagctactcgggaagctgaggcaggagaagttcttgaacccaggaggcagaggttgcagtgagcygagattgcgccactgcactccagcccgggtgaccgacagagcgagactccgtctcaaaaaaaaaaaaaaaaaaaaaaaattcccctcgttaatatgtgtttattgttaaaaacttaggacgaaagttaaaaaaaaaaacccacactacttaattacagagatcttcattaacataattctgtatttattttctataggaaaatttttaatgctaactttctagaactcagtcaaaaactactgtaatcattttaatcagctgattaatttgctctagcagcttaaaatgtttttgctccattttactttttctactgcatgatagaaaaattgttkttctgtgaatgagaaagttaaaatttgtgctcaatggcaggaccccagagagatgtttctgggaattgagattcagaggcagcctgcattcagctttcttcaggttacctttattaatgatgcccttgatcagtaaggtggattacttacccattaacacttattctacatcagccttaatgttttagggaaaatatatttactaagctgtttgtgtacaggagtatcacacagtagatgaagcacttatgttyctggaaaaaaagagataaattaggaagctttcagatttgtttataaaagaaatatgaggctaggaaagaagcatgatgacttttgtgatacacacagtgagtcagcaacccattttccagaagttagcagctgcatttttttccattgagggcaaaacataatatatgggtataactttagtgctagctaattacttctattggtrcttaaaaaaattaaaatcaacaaggagaaatctacccaaactgatccaatatacactgagctaatgaaggaaggtggtgtactttttgtggggtrgtatttttattttgattatgttgaagtggtagagaaagaaggggagagatctgggggtctgagagtcagaggaggcyacaaatgatatagcaaagcaaataactagattatgaatcttttgaaatcatgcaggggaacaaaatattgttactgccttatcaaaaagtattttctcctgtataatttaaaaaatcaagaaggtgtcaaccttaaaaatcgtatcattgaatatagtaagtccctttttttttgttaatatagcctgttggtttagtagatttttgcatcttattgtctgatttttataccatacagactaataaaaattagtttatgcacttatttgttacttttatttctgaatagataatacagtcagcgtagtrtaaaaggttagacagtgatgtctgaattctactccttcccctagctagtttccttcccagaggcaaccattgttactgttaccatgttttcctaaagacagttcctgcaaatgttggcaaatctgtgtgtgttctctttccttgtctctgtgccttcctttcttttaggaatgctagcatacatactataatattctgggtctgtctggttgtttttacttcatgtgctctgtagattatttcagtacaccaagagcttccccattgtttcatagttgggtagtattctgttgtattattatgccatgatgtatttaaggaatatgctattggtggacatttaaaatgtttccagtttgctcctttgaacaatgctgcagtatataaagttgtacatatatgtaggtttgttaagaaataagtggaaacccatagctgaaagatggttttaggattgtccctgggaattagatctctatcattgtttcccagtgctccttggaaccctcctcagggaaataggcatcattggagtagaaggcaaatgggatttcatggccaaataaatttggaaaatgcagtgtccttgattattccttggagcttcctaaaataactagcatgttaaaggcttaacgtgctcatgtggttttaagaacaacaaaaaaactgccaaagataaattttcaggctcacttgagtatcacatatttgaagatgcctgttaacatctttcgagacagtttctgggaaaaaatagtttgggaaatgttgacctatgtgattactacctgtctcaccaattccatagatactggaaactagctaactgagttttcagctgacaaattgcttgcttttggagtcaagtgtcttgacatatgtagcttgttcacctctctggtcctattgcttaaagtgagaaatagcgtatttggaaggttgtatgtcaggaccatcttctgtttgtgagcgcgagagaaggtaggatcagatatcttgggtggagcccagtctccagctcaagacttgagttgtaaaaatcgtgttgtattktgggacaaaaatcaagcagttcattttggctagggtttaggggatagaaatgggtggaggagagtcataaggctttctaaaataagctgcactacagcagaagttgcagttgggagttctgttgtagaaaatggagaggaaagcaatagatttttttccctccagtttgcattggttctcaaccggggatgattttgctttcctgctaaaggggatgtttggcaatgtctggagacatttttggttaccacgactggaaaggtgctaccagcatctggtaagtagagctcaaggatgctgctaaacatcctgcaatgcacaggacaaaaaartayctcagtaaagaattatctagtccaaaatgtcagtagtacctccattgatatacccttctctaatgggattctaccagggttggagagttaggawattgttactttcttcatacatggagaggagcataagtgagccatgtgccattctggactgaggtgccaccatggtgccagcatttgataatagtaaactcatgaccccttattcatagtttggaaatttaaaaaacgctggaaaatgtgacgtttcttcataattcagttagcagtaaaaccttgcctgtgttgatgtaaaggtatttatagtctttatttacctggttttgtgtgaatgttaatgcgcttgactgtagggtgctggcctagacctggcttggggctttatwtagtaaatatgctgtatcactcttctaaagtttgtaacattctatacttggaaacactttggtccccaaaggtttcagagaagagattgtgaacttatatattgaactaaatttttgccaaatttggcttattttgtgtgtgtgtgtgtgtgtgtgkggtttaaggagttgaaagtttaatagaagaaaggagagaggagagcatctccttgcaagagagagagagaaagagagaaacgtctgaaaaagtccaaagttggcttatttttaaaaattcagcgcttttagtaacgtttattgatttttttaaattccaaaaatgacataagatcattttgaaaagtktaagtacaaaaaagtagtaatattatcaaccaactgtatggtacttaactgtgcgctagatacaattctcagcactttatgtgcagtaactaatttaatcttacgaatcccattatacctactttacaagtgcagaagccgtggcatagtaacttgctcaagatcccctagttgatggcagagctgggctttgaactctggcacagagaaggaagtgattcatcatctccacagctggagtgggctgctgtgtgtacatggatgtatttccttatagccttctttcagccttccctactcaactatatttgagaawttcccctgttgtcttaaatattttcaaaaaacctgattgttgaatggctgactacctatttaaaagaataggtgaggtggggcatggtggctcacgcctgtaatcccagcactttgggaggctgagccaggcagattacctgaggtcaggagttcaagaccagcctgaccaatatgatgacaccccgtctctactaaaaatacaaaaattagctgggcttggtggcatgcacctgtaatcccagctactcgggaggctgaggcaggagattcgtttgaacccgggaggcagaggttgcagtgagccaagagtcaccattgcrctctagcctgggcaacaagagtgaaactccatctcaaaaaaaaaataaaataaaataagtgagtgaaccataaattatttaaacattcttttgttgttgggcatttaggctctgtccattttttcacaatagaaaattgacatggacacatttatgtataaatacttatccatatctgattatttctttagagaatgttttaatggggctttttaatagactcttcatatatactgtgaaatgtaccagtttattctctcattagaattcattgtcatcagcctggagtgttaaatgcttttccctttgatttctgattctgtgatgtagtatcttgaagttttctgagaaaatcagacagatgattggaaatttagtatgattttttttaaattggtcaggaaacaagtagttggaataactgattttataaaattttatatttcaaaaaattcaattttagagccattttattttcagattaacccatgaagttaaatcaaggctccatttcacattgttatgaagagctggtagaaataaggatagtgcagcattaagagatactctgacctgaatcttactggtatgtgatcagtatatrcctaaaacaaccattcagtaaacatttatggaggatctgctacgcaccatacactgcattttgcactgggtatccagtgaggaayaagtktataaaaggaaaaatagcaaatacttacacagtgctttttaggtgtcagacactgttttaacagcttacgcatgttacttaatttattactcccaacaaccctatgaggtagatactattattgtatccatttaactgatgagactgaagcacagagaagatragtaatgggctcgcagacatgcaactactaaccaaggcaaaccactgactgtgctagtttggaagggcagacagaagagggttggtgcagtactctgggcatgagaaactggtggcttttgccaccagcaaattggtcaagcagtccagcaatgggattggagagaaatggaggcatcagaaagatttttcaagatagaatttatcagacatggtgattgaatgtggagggagagggagaagtcaagggtaaagcctaggtatcttggtatgagtgacctgctagatgatggagcccttcagtgagtccaggaacagtaggaaagaatgaggagcatgttttagattggtgatgtcagaggggtctgaaagggggaggtaagcagaggggcattatcttcaaaatatttggagtcagtagctttgaagctcaccaaatataccctggtagtttagttatcagaaaatgagtttttaaaaaatacttataatgtgtagttcatgagaaagttttccagcgtttaaagatgttgacagagtttcagttgattgctgtggttttcgtgtatgaaaaacatgtaaaatttgtgtcatattaatgcccttttgaagactaatttcaatgcctgtagacagctttctaatgtagttgtatcatgatttgggttatcaataatctgtgaatgtatagattgttgccattttccttcattgtagataattttacaatgaatgtctttatgcataaaacagttttgatatgcaggattatttctttggaggtatagctgaactacaatttccgaatcatacatatcacaaaattaacttctagaaagactgtgctaatttatgtccgcaactacgtgcaagacctgcctcttaatcagccattgggttgaattgtcctgatgatttttgtggcaccttcattcaattcctgctttttgtaacatatcccatgatcacaatcatatgatgactttgtatcctgtgtctttattttattggaatcaatgcctgattcatacagaatattgccaagaagttttacagatataatcagataagagaggagagatcaagatcatgttctttaactctgtttaaagtattgatgtcaggatgatacttcaagtttgaggtgaagtttttgtgccaaagcctggctcatggctgtgagggcacctaggactcactaaaagatgcgtgttcttcagtgtgcacattacctgccttcatgtggtaagtggtggagagttaaagccattacatggatcactcaggacaaaaacaaattttactgtaaaatttctggtgatttgggagcaaaactaggataactcttttgcacttgcagtatgccataagtgccgcagtttttgactttttctactttgcccaataaaaatgttgctctayaacccttaatttttataactgttctggcctcagttttccacagtgamtgttcctagtttgtgtaatgttctttaggttgctaatttctgcctccagagccaggagatctgtcttcttttgattattcccaaaggtaaattttgggaaaactagaatcaggctatttccctatttttcatttggaaatttctgcattcataaacagttgcttgtaaccttttaatgaatatgcattaggagttgttttgaaaatttattatttagggattatttattagcctggttacttgccagggtggtacattaaaaaaaagtttgtccacccatctgcttcatcccgtaatccccccaaacagtcatcaactaggagaatcgtaatatgcaaataagccatctgcagtgtctaaatgggaggatagcttccaatttttagtcagaaacctgccaggggcaggggaataatttcagtagcattcttccaagggggaggatctcttaagaggcagcatgattaaaaatgcttccatagtaaataaggacactagaattgggtgtccaggccacttgtgagcaaagaacctcctatttccagattcggcgccacctgtgggatactcatgtttcatcataggtgtccacaactttattcttttaatacctctacaaagaccaaaaaaaaagtgataccaattaaaaaatgtggaagaatattaattgggattgaacagtacctgtggttttctcatgtgaccctgggtttgtcttattctctgagaaagtgggctggtaggtaggtgctcttgatgtccttaatttcaaaatgaggaagtcagagcaggcacggtaagtaaagaataatggatcctgagcctcaccttttggtcactccrttggcagggtatgtgcttggggcatgaaaaccaagactcaaagactgccaatcctctgccgcagtttttgagagtaagaactatgcttgctgtaatatggcagaatgaaattatacctgctccttccttgcttcttccttcccttcctccctcccttttcctttcgtttcctttcstttcctttcctttcckttcctttcctttcctttcctttcctttcctttcctttcctttcctttcctttcctttcctttccttccccttccccttccccttccccttccccttccccttccccttcccctttcctatctttgcattcgttctgctttagttcactgtttggaagggtgaaataaagccctggttctgttctttccccttgtccttccatcggagtgggccctttagtggttaagggtgagggatgagaagttagtctctggtgtctaaggtccctacgatacgtctgaatgttgccaggtgtagaagatgtgtcctgtccataggaggagcttgtgggaagctagctggcgaggttcagaaagtagagttgtgggatatgtggccttaggtgttgtatacgtatgtagttcaaatggaattagattctatatagggtagtgtgtagactgagaacaaaatgacctatcaatcttagggaatgaattaagaagaaggttgcctgtgaaggacaagtcagagagaaatccagaagagattgatgttctgaaagttaagactggacaatgtttcatgaaaaatgtaatcggagaatgaaggttcaatatgttttttgtttgcattttctttttgcttggaaatcatttcaaatttacagaaaaaaattacaaagaatacctgtccatttatttatctaattcaccttttcttatatttaaccctatttataatttcctacacacacacacacacacacacacacacacacacaccacccaccatatatttttctgaaccattttgaggatatgttactatatcatggtcctttacttctaattacctaagtatttatttcctaagaattgggatattctcttatactataaccgcagcactattatcaacttgagtaaatttaacattgatacaatttaaaaaatcagatctaatatttatattccaattaacaagttaacccaattacattttgaataatatttttctgtctcatacaggttctagtctggggtcaaatacttcattttatttcattcgttcgtttcttttaatctgaaacatttgcacagccttggtttatctcgtttttaagactgcatcctgcccgttaaaaatgcagtggctgtcagtttgaggttgttgctgcctcatgattagattcagggtgatgcartctcagttggaatattgcatagtgatgtgtccttgccaggatgtccaacctgcaggcaccttatgcccatcggtggcgatgatttttaacatcctttcacagtgttgtctagtttcctgattatataattattgttttctctttcttcccttgcaataagtggtctgtggggagctactgtaaggtcatatagatatcctccttctcctcaaagtcagtgcaagatttagcatccattgatgattattactgggtccagtcttcacagtgataggtgcgcaaacatgattttccatctccatgctctttccatgtttaccatttagcctttgacattctgctctaagcaagagtctcatatmatttctatttatttattttttgtgtgcactcaagagttcccattttccgttggttcataatttaccactgtactcaatttgagccctcaatcaaatttgagttggctagtgggggccccttcaagatggctcctgtgtccatgtggcatgttcccatcacttacttttgacaaatttttcastttctggcataacaatgtgatcaggctcatcttgtatatactctagccctggagccatctgttcctttgaggatcccagattccttttagtggagaaagggtataggcagtatggtctgtgttttccatttgcttctgtgctgtgtgaagtgttaggcccaggctttgggaactatccatttcttggtagatgttgggtcargtggaaatgttggggtactgaggaagaacaattttgatttgcaattggtaaatgaggaatatctgttcagagtgtgagtgagatgaaaattgttcttctrtttaatttgtttgtaaaccttggctagagttggcctgacagattgtgtccctttccctctggccatactttttttgggagggggctggcctgcattttaatgaacatgcacattttggcactctctcatgcttgcatttttagttgtgttctcgtctcaccatgctctgtaggtgcccctttaacattggttcatcctgtgtgaatgggcagggggaggtggtgagtggatggtattctggttcccttggtgggagcagcctgcagaggccagatagtccacatctgttgttgattgaatcctggtccagaagccccactttatattgctgtgtggaatgagcagaattactactgtggcaacacacagttcgttttttacagtccacctcctttcattgcctcctaacttgcaagtcacctgataatttctgacactttcttaccagtatggagctatttaaaacgcattcctacttttctcatctcatgggatcctctggacaataccttgtgtgataatcaggcagagatcaattctattttacagacagggaaacaaggcaaagagagtacatttccaatggggaaagttagtctcttttccttagtagcaaagagctagtaagtggcagaaccagaacttcaacttggcacttctgcctctttgtgctttcttcttgtcttagttaaaaactgaagaagaaaagtaagccctgtggaagcagcttaggtacaggaattggcagggtaggaggtggggtagatttcttccttcttaatcagtttcctgtctgaagcttcacatactgggggtatcgtttttcagtgtgaaagggaggctgaggtcactttgtgtcttcatgggaaacctgtcccaggaggtatgtcttaaaccccatgcttacctcaaggcaattagagaaaaccatgtgacagcatcggtctcactgactgtggttgatgaagcagagcagaaaagctgttttcttctccttgtcctttacttcagtcttccccatctcatcttccctacctgagctgatggactgtcttgtgaggctggggaggtgtccacttggctctttggttttggttcccagagggaggctctggccgcaggacacagcagatggagcctgtgggagcccatgtttgtgcctcggcaggtgtgggtcygggacgggtctgacctccacctggcacctgcttcttttattgcctccatatgtcaaggggatatgagcccatgtgagtgctttcagattgctctggcctgaggccatggttgggaatggcaggagcatgttgcgggggacagggacctttgtgagggacagttgagccastctgaggttagaggaccacacagctgccccttctagaagcctcgctgggccagaggtgtggcttcattaaggtcctagttggactgtgtcctcatctctctyttatttcctgctctgtttttgattttattttcttaaaatcttcatgctcatggatttttaaaatggcagtaatgatttttatttttttaaagagtaaaacaatggcagtctagtgcagttactttaagacatatcaggtaacctttaccagtaaatcgaaggcyattgaataaggaatgtgtaaggatctgtggactccctgaaattagatgcaaaatgttatatgtttgtatgaatgcattttttggaggaatggctcccatagctttctgcagattcttgtggacatttgacagtccctctccaaagyatggcctccaatatgtcttcttcacattcctttggagaactgcctttacctcccgtgtctctcatagatatctgagcactttaatttgtggaagagtcgaggaagaggaggccttgaaaatagtctcctttctaactaccaaatttgggggctggctcagcttcccctcccccattactggttccctgagcaggtctgagccaggataatcttctttaacctccactttctgtcaggccctggtcgtgtgctggatgtacctctcctcatgtaattgtcacaactaccctgtattggaggtgccaaagactgaataacatgtttaacttactaaatagaagaattgggactgccggtaaaaactgccagattccaaagccagagttttttcaatacactcaaggaataaaacgtcagctgctgtttttattagcactcaccaatgagacascatcctgtcctgttcccwgttttcatcctgcagcgccatatattgctccaaagcttagatagtgcccagagcccacctacagctcatcttcctatgaggcagagagctagcttgatckttggggaataatggcagagctctcagaaggtgctggatccctaaccgctttgctgggttcttcattcctggcccacccgagagctcttctggaagtaaaggcctgaaactgtraccttcttggctatggtgaaaagtaacagacgtcaagtgttagcaagcagaccctatctgttatttgacttttaaaatcacaaacaataaagtaatcattattacaaggtatttttaatgtcacattggcatgaaaaattttaattctgagagtataatttctatgaattgctatgaatatagtaaattaaaaaataaattgctgtggcggtgctctgatggcatttcaaaaaggtgtttgtcatcctaccctgccccttcatccctctgtgataactgtgtagacaaaggataaaacccaggtgaacctcctgagatagaggttccagatggcactagctgaaaagacagctggcatccagagaggccgtgtggctctttgtacacaaaccatggggattgtttatttttactgctctagtgactcaatataacagtggtctgggaagacttggctttagcctcctctctgttgtgttttaacctcttcatgtctcgggcttcttacttttctcctggtgttgttgagtgtagagtggttgtratgatgagttcacagagatttaagagctctaagttcttttgggtcagaggagtgatttctcttttttgcagtgtaaggtacaaaatattaaatatctgagacgtgactgtgagaccctggtgaagctacccggagtctcagtttcttctttaaaacacgattatatcattcaaaataatagactgtatcttaaatgagccagaatggatcagacgtttagcattgttactggcacgtgggcattcatgaagtatctaactcttctctgtaccccctcacttctgtatacatgccttctatctaaatacaatcttttgattggctggaagtagagtaggaacattaatctatttctcaaatgcagtgccaagcttaaaaatgcatctctagttctggggatgcccagataactatatcttgggtgtgtgtgtgtgtgtgtgtgtgtgtgtgtgtgtatgtgcatgcacatttatctatttgtgtaagtatgcataactgggtctaccagatgaaatgtggcttgccttgctgacttcagacattttgatttaaagatcttaaggtaagagaagtagagttaacagcatacatttagagctagatgccttagcagctggcttggaggcttttttttcttctttttaatgggtagctttttatttattcattttttttaaatgggtagctttaatttcaaccaaaaagttctgggtagatttttttctagctsaagggagaattgtatattgggcactaagtattaacgggtaaaatcctgccaactgcccttttatagatcttcagtgtgaagcaagactttgcataggttgccagccaaaaattgatattggatccaattccatcagagaagctttagtatttttagaagtaacactcactctagcacagcatgcggtgatacataataccaactgtttataaagatccatgttttagttaatttctagaaaattaaattacctttttttttttttgctgatgccttctgtctgtcaaacagaaggaaattgcattagagttcaagatgtggcctttgaagaggacttagatgaattgggatgttgacctttatagtaggaggattgcgtggagtttggttggctgggaggcaggagacctgggttctagccccagttctgccttccatgaagtgtgtgatctggattagtcacaaggcctttgtggccctcatattgtgtagtcattaaacaaaggggttgtatgaaattcccattgtgttttaattttgataagttattataatttcatgatagaaatgaaatatagtgtgcaagtatttttcctaaaattgtgagatcacgtctgtgagatccatgcagcttgggtggatccaccagtcttttttataatgaagtctctgaaatacttattgaatgaatgaatggtgctattaaggtgatggaaataattttccattcacaaattgctaacatactgcctttcatttcataacattcttccaaaaaacaatattcttgtgactattattgagtataaactggatacttctggatacagctctggttgtacataagtgttttcctaactaaaggattgtttggggaaaatgagatttaaagaaccaagatactgatttttggttatttagcactatatccttgccatttttcatggattcccttgtcttatattcagagaacattttcagattgccttaagcctgtttgtttcctgtttatccaggtttcacttttcaytgatgggctactacaaggcctaacttttgcatatacctgtgtccaggtgtctcagtccaggaagttctgtagtcctgtttatgccatgtatttggactttcaaatattcagcaactatttttttctgtatatattttggggtctcttacaccactgtttaaaatgtggttcccaggccacctgtaatggaatcacatggagatgcttgaaaaagtggcacgtttctggttaatgtgccgttcttactggagcagaatatcttggggacagacataaaaagcctcatgttttgcaagtgactctcaaatttaagctggcctcagaatcactgcttttggaaatcagggttatagctttgttcatgttcttagaatctaacatataattagaattcaatgaatatttttgagcaataagtgagcacatgagttgctgggtttgtggtagttagaaagctatacaatacctttaccagtctttttgtaatgaaagctctgaaatatttattgaatgaatgaatggtgctaataataaggtgatgaaaataatttttcattcacaaattgctaacatactgcctttcgtttcataacagtcttccaaaaaacagtattcttgtgactgttactgagtataaactggatacttctggatacggctctggttgtacrtaagtgtttttcaccttgtgttacacacaaacacacaccctactccgtttgttggaagcctgcaagtgatcaygcgtatcaatgctaggagtgacgtcaagtagactggctgggaagggcagaatgtggtaggcggttaaaaagcaamaggcacatgctatatractttttgccttttcttgttgtctttaagacttttgtgatggttacataacaccrgtgggaccagagactagggcaggccaaagatgcactgattaaggaaattactgctacctaacagttattctggagctcaartatttcctgttcattakgcaataatgtagcctttcgagtctccaaatgccatttggaagaagagggtgggggagttggaggtagtaggttggatctgaggcttagtctcttgcctgctgttttatgggcaaggtggggcaggacctataaaaattccttcacccatggcccttttctcctacaatgactgtagaaaattagaaccctttaactgtttaggaatgtgagtgttcagcataaggatccaattaggatgatggggaggagagataagtagcaatagatttaatatgtgatgtttgatagcattaaaaatgtcccaagcctatgcatgcagtgattgcttgatactgtagttttaatttgagttatagcatagagatggtgatgctatagaggaaaaaacccgcaattayttttgcaccaacctaatattaagttttatatttcacatttgtrggcttgtttcatcaacggagcrgtttccaaggcttcaaggaaacattgttctatgttttctctcatccatccccctgtggagggatgttgagaggagagtcggttttgaaggtgcagttcttgctttcatagcatgtagttaaaataaaaaccacagtgtagtgttctgacatcccctcttgctcaggcatagggcatatttggtgaaccttgrccattctgacaactgttctggcagctgtttcttgtgtcattcttttctgggctttattgtaatgtaaacccaccaaacaagatttctggcagttctgtacatggaaaatataaggactcaatttgtaggtaagtggtttctatcctggagamaacaaagcccatcatactggatgttcacatcagctgggctgtatgacaatgttggtgagtcagtgctttgaaggccctaaggttaaatgttttgaataccacccccatgcatagtattttgggttcagtggggctttaaaayatcctttattctccccacatcccatcatcttctgcaaacttaacaatttactatactttttctgaaaatgagccttttaatctcccaatccatagttggacgaggctcactytgaaaagtaaagaggttggcttattgataacttcaggcctgctccttgcttacatgctgatgtttactttttgaaatcgacctaaaaaatgtcaatactttgttatggttttgaaatgtatctgataattcctttctgggcatgttaaaagtcttaattttcttggcaacagaattttccttttagggttcagtatctgcttttcagggttatttctggaaagattttaagatagcttaagggctttcttaaccacataaaacataatttcctcaatacattttgggggaaaaatcaataattagtgttagtgtaacactaattagtgaatgccatttgctttaatgctgggttaaaattgtccttgaatttaaaaattagttaaatcttagtaccaaaaaaataaagtgaaatactacaaagaagttggtcttttgtcatacaacaacctatccatggcagtagagaaaaataattaaaaaatgcacaatctctaacacaactatttttagttttgcattttctttccatcttggccgacatagctacaaagcacaattattggaactacagtaattattttgatttttgatttttattatgtatctaatcactgttttcattttcccatatactatacaaatgtcactgtcaaagctacatattgggctgtccgggtgatttactgtgagcatgcccatattcttagaatttagattccatccagttatttgaarttgtagatgatgttatagggaacatatttttgcctatgtttttcttttaatgattacatcctttaattaaatttggactttaaatttggaatttctgggtcacagttgtttttatggccctgaaataacattctgttttatacttgtagaaatagtttttgttcttgtaaccaaccagagcacaagtgacaggcaagcttttagctttagggatgttcttaacacatcccgaagattttgtgctctcaatgtgtccctgctatttggrgcttccctgaaaaagattctgtcaggagcttctgctaattaaattgaattggtccagctttgttgtaaacaggtaacggattgtggtgttttattacttgatacttattgctgaaacaagttttatgaaaaaaggagagtattagcctgaggacaaaagtagtttggagttctgtagaggagmtgccagtattaatgaactatcacttggarcctgcaacctgtcagccttgacttttcctctcctgrgtcagccatcattggtcctccacattgcttttcactttgccagctaaggcttttcagtggcttctgatataggtcttgtttctcaagtgagtgtgccctcaggaggggaactgggcaatctgggaagggagctttgatttcacaaccatgtgggaatgccagtagaatgagaygccatgatgagtgtgggtacctgcccttcttggcaggagtggactagaaatcagttggtgttactgcaagcccagtccattgatgtgcacatccattgtgggaggatactactctcaatggctgcactgctgccagtgacgttaaaaagtcatccatgtaaaagcatgggtaactgcttaacatgtattaaatgaaaaagcaaaatacgaaatgatctaggtactgcacaagtgtcctaaatgttttgcatatcgtcaaaataatattaatataagaaagtgtaaatagctgtaataagttatggtgagattaaaagccatttctttttcttttttgcaccaacgtgttctttagtgttttrgcacatttgtagtagagttttgaagttatttttataaatcagatatgtaggattctaggtctgtgaaatgaaattgaatgaagaggatttgacagtcttcttaaacttctgggaaataaaggctgaaaacagcaggctttcatctgtgtatcttctgaagctgaaatgaacactatgcccattttgctgtatgtccatttgagtattttctaatacctttttggggagtaggtgtatsttcagctgaaagaatatttctaagtatccaagtccttaaggaagctaaaagttttgagttatgcaagtgtgccttcagtgtcctttggcaacccctttctgcactttctccactgctgtggtatgtttcttgaatgaccatgtccctcttcctgctcatgaaagccttgagcttagttgtgtataccttgcataaagcaatagagtgcagaagtaaagaatgctggttctggactcagactcttgatgtggagtcctggctggttttggaactttgggctcttgaagggagtatcctcatctgtacggtggagaccactggtaccctcaggtggctgtggaggttgcatcggttaacactagtgaagttctgagtgcaatgcttggtccatactaacccagaactgcagtggtgatgatacatatgatacatcttcttgggtagttacatattttcttcttgttaccagggtattccttttaactatgagaaatcagaaraatacagaaaatcacaaagaagagactagaaataacccaaactccacaacaggttttgctttttgtcttctctgatgatgaagtaaaatatgttggccatttggagaagtaaagatgtttgtaagtggggtgtttccagaccctctgaaatatatgcctcttttcttgctatgcctagtataatacctcactcattgtcaaccactagagacttagcttcttgttcttggttckactactaaattttttgacttgggcaaatcatttaaatatttctaggtgttctttaaggcttaaaaaccaaggttagtttagctttgtcattctttcttctcttaacctgtgacttggtttatttatggtttgttcatttcctttatatgtcttcagtgaaagcagcacagaaaatgactttggccatgtcagtcagccaacagcttttgagcagacactcttctggccctgggaattacagaaccacacaatacacacatgatctgtggcttttggagcctgtggcagggccctggatggggaagggtaagcattctgatgctatagtgtgatggaaacttctgtggggaagcrtaggattcagtgccagtacttgtgatgcaagtagttatttgagcattccttttgtttgtttttaattttaaagttcaaggatacgtgggcaagatgtgcaggtttgttatgtaggtaaatgtgtgtcatgggagtttgttgtacagatgatttcatcacccaggtattaagcctagtacccattagttatttttcctggatcttctccctgcccacacctaycaccctcctataggccccagtgcatgtcattccctctgtgtgtccatgtgttttcatcatttagcacccacttacaagtaagaacatatagtatatggttttctgttcctgcattagtttgctaaggataatggtctctagcttcatccatgtccctgcaaaggacatggtctcattttttatggctgcatagtattccatgttgtatatgtaccacattttctttatccagtctatcattgatgggcatttagattgattccatgcaagttcttagagaccttcaaagaatatttgagcatttctaactggaaggaagtgaaaaagaaaggtgtggtgagttgagcacgtggctgactcattgaggagtcctgggtttsaactgctttatctgtaagagctcaatttaattcagagttaagtgcctaaaaggtatccagcacatgcctcctggggttcgggatgcactgttcttgacctcacagagcatttatttaagctgaaagtcatgtgcctgctgtgagattgggtgctctgagtgtacacracagaggaaatctggctggtctatgttatttccttggaatgtctcttggagtcagctgtgatgcccccaggggttcaggcacaagggagaaaaatgagtggacatcctaaggctctctgaggatttcctggttgcttccaactcaagttgagtattacaggaaggtttggaaggataaaagccacaaaaatggcagtttctattttctctcacctccatttatcagcctggtcacagcagcaagtaaccaagaggtcctaaatgcagtgtccaaactgtatgtgggcccaagacctgccaaggtattcaagtacagccacactgaagctttgctttctaggcacaaagtttgattatcttatatctgcttgccatgctttttaatataactggarttagatgttggggtttctcagtctgtggacaaatatgcaggtgcttatgtatggaatattaatgatggagtttaaaaagagttacttaagaagaagtatctagcatgggataaccktggattgaraagcaccaagtgcatcttatgaatgcatttctaggycctagcacagaacttgccactgtgggcagcatgggaatgttaggtaaaggtaatggatgaatggtctgtgttctaataacctgcctgacctgtctggaatttccaacatttatcccacacccaaaactcccatctttccaaacaatattatattgcccttcctgctaaactgtttgtgtacggaaaccttatgatatataacagcatggcataacctgatccatctttgcattctccacgttgatcatagctttacaaaatgacctttttcactactggagtcatgtcacagtacaacttccagcagtgttgctgttttgataatgataagggaaattaggtatcattttcttttgactcaggaagattattttcccattgtgcaagtttactagccatagagttaataaccctcatcacccttatatsaactggaatttttatattattcttggaaatgattttaagtggatatttaattcaaatcttgttactcttgtgtccactgwacgtactacttacctagtccttggtttagtctttaatgcccaaaccaaaattaaggccagttctctacttattgttataacaattgcctgccctgtgtttcctgggtggttttctttattgtttaaaattcattacagtgatcctagtgtgttggatactagcataaaaagaagtcccttcatgtgtgatgtgttgttattgctaaattttcttacaatttgcttgtagtaggttacttgctctaacctgccagttgcctggaagggaaaggaatatcaaaggtgaacctagtgcatgaagtatttatgactcagatggtctcttctggtctgagaagaactgaagttgttgagtggagtttgcagtaaatggtggtatcttggtttgatagctttgggacaggagcacaaacatttaatggtgaattcacggtatgatgtrtttcagcccaaagttaagaccaaagcacaactttagccatatatatcttattaatgaagcttattaagtgagtaaaggaatgaaaatggaaatggttggaatatgaccatcagattcaggcccaacgagagtattcttaaattcccagtcttacataagaggctgttttagaactctggggacattgaattcccataaacgtctggttatagctcccttgtagcacttgtgctgtttattattgcttttatgtctgtgttctttacttagtcgggaactcctatagctaggaactgtgtcataacatctttgaatgaataaattcatataaaagacagaattccaccctggccttcctcaggacaaggaaatagtggcaacaacattatctttggacacacaagtgtggtttgaatcctgtttcttttgtttactagccatgtgcctttaggcaaatgtcttgtcctttctgagccttagcctcctcaccagtaagagtgggataataacctcagaagttattaacatattcagaacaacctaagtgggtgctttatggagtcacagcacgtaatgaagtgcctagcataatgtcatgattactgataaactcagtcagacacttaatatctattcctccatccagcttaccttttgatcttaaaacactgatttcagccgggcgcggtggctcaagcctgtaatcccagcactttgggaggccgaggcgggcggatcacgaggtcaggagatcgagaccatcctggctaacacagtgaaaccccgtctctactaaaaatacagaaaaattagccgggcatggtggcaggcgcctgtagtcccagctattcgggaggctgaggcaggagaatggcatgaacccgggaggcggagcttgcagtgagccgagatcgcgccactgcactccagcctgggcgacagagcgagactccctctcaaaaaaaaaacaaaaaaacaaaaaaaccactgatttcatagcactgatgttttgcaagatatcctagaggggcccttaaaaatttatcatttctcattttcaagtcagtatcaaaaaagtcctatttcrttagacattcatttatgtatctattatccagatatttattgggttcctgctgtattccaggccctctgctgagtgctagaggtatataaaccagcaaaacaggtaacgttttgggttgatctacctgtatcttacttacagtagagagagacaaaaaagtcaacaagtaaatgaaaacattgttgtgaaagtatcatgaggaaaaccaaatgatgaggtgaagactggttgggagtgatagaaaattattttggatagagtggtgagagaattcccctttgagaaatgatgtataagctgaggcttaaagaatgagacactgccaccagtactctcctctttgtgggcttgggggatgtgcagaacaaggacttcttgccttgtgggctaaggccataccaccagcctctactgtggttaccctgcccttggagctaatatcaacaggtaggtgggcctcccctcagctaagctgccaacctctcctcaacagagggtccttaccacccacccctccttgatgtcttataagctgatcccttcagactgggggagggggtggtggtgtgtgacttctctccatttccctggttctggaacttttaatggacatccgaattacaggggttttgtgagaattacattgttggatcccatatgtaaaaatggaggctaatctatcaattattaaccctkgttgtactttaaaattctgattaagaaacgatttttggcaggagaggctattagccaagtgtaatgtatgtaacacttactttataaaggtatgttgaatgaatgtatgaattctaaattgtaagatttgaaatgaaaccattgccattttctctcatgacattagattatggaaagatttattttaaaagacatggaaggcatgaactgcaaaagaaaaaagtggtaaattttaatcaaaatttaaaacttttgttctttggaagatagayctgggggaacaaggcaagtcataaactgggagaaaatattgtaaagcaaaaatctaatgaaatgtgtgtgcttagaatatgtgaagaactcttacaccatacaaaacagacaacccaataaaaatatagacaaatggtttgtatagacctgtcttaaaagaagatgcataaatgatcaaaagtatgtgaaatttcaaggaaatgcatattaaagccacaatgcgatacaactgtatacccactggaatggccaaagttaaaaagagaataccaaatgctggtgacgatgtggagcaaccggcacctttatacatttttgttgggaatgcaagttggaaaacattatggttgtataagataacataaaattgccgtataattcakcagttcaactccttggtgttagtcgaagagaaaggagaacatgttcatacagactttatgtgaatattcatggcagtgctattcataatagtcttaaaaactggacgcaacctaattatggtatgtctgtactattgaatattatgtaacaacaaaaagaataaaatgttaatacatgaaaagacatgttgaatcttaatgaaacttttaaaagttatgctaagtgaaagatgtcaaacccaaaagaataaatactgttcaatttcattatatgaaaattgaaaattggcaaaactagtgatataaagcagattagtgattgcctgggctggtagttgagagatggcatttgactacagaaagtaccaggaaactttttagggtgayagtattattattaatatatcttgaatgtggtgggagttataaggttgtgtgcaattatgaacactcatcaaaatataaaattaaaatgagtgacttttcttacaatttattattttgtcattaatttgtaaaattataacttgtaccccagtaaaaacattttaaaaatatatagtctctgccagtttatcttatttgcttctactaatgaagcattctgcagtgtttcatcattaaatataataataaaggattatttttctaagcattttatattcttattctttcagtagtcattatatgactagagaatttggaaaaagtttccttttttcttttttttaaaccatattaatccaatttgcagaccttttatttatttttccaagggcattatttctactatgaaaagactggacaggtttatgggacacattttttttgttttgaatcaaagagcttgtcataatattaaagaaaaccaacaacgttggtatgattcaaaaggagctctctcaaccggctgtctctggtaagacaggcccagtaatgcccacctgcaaggctgttgtgaagatgaactgagaccacctatgtcagatgtagcagacagcatatgccctcagaaggctggtagctttactgtgtttctccataacacttctcatttctcggagacaaggtcagggaatgttttgaaatgtttatttgaaaagtatttattgtgcatatattatttattcatttacttactatgtccttgaaatggagactgtattatacagatattcaggtcagctttaacatatcctttaggcctaatcacttttttctttcaacatgcctaatgtagcatratagttaatagcatagtagtttgacttttaaaattgatttctagggaagaatgtaaatataggaaagcttcctgatagagattatctaaacttaggcataaataataagtaaaactctgaatttaggtatgtaattgtagaatccctttgattataagcaagttgaaaaaaattgttttttacctagatgagtttattttaaaaagttattaagcatttataaaggagccttttttggggtggctcctrattattaccaagtttccaatattataaactctgtgcttgagttgaatattatagtttaggcttctatctcctagtagtgtttccaagcaaacagtttttccagtctctcagaagttcatttcagttaccatctcctcactattcctggagtgtatgttgcttatggtagcagctcaagggacagatgtatgaatgagagcaatccataaatgtttgaattcaaattatagtttttttaaaataaattctgctataaaaagaaatgaaatatttgtccatgctaaaacatggagaaaccttgaaaactttacttatttatttttattatactttaagttctgggatacatgtggagaatgtgcaggtttgttacattgatatacatgtgccatggtagtttgctgcacccatcaacccgtcatctacattaggtatttcttctaatgctatcccttcccttgccccacattccctgacaggccccagtgtgtgatgttcccctccctgtgtccatgtgttctcattgttcaacacmcatttatgagtgagaacatgtggtgtttggttttctgttcctctgtgagtttgctgagaatgatggtttccarcttcatccatgtccctgcaaaggatatgaacttatccttttttgtggctgcatagtattgcatggtttatttatgccacattttctttatccagtctatcactgatgggcatttgggttggttccaagtctttgctattgtgaataatgctgcaataaacatacgtgtgcatgtgtctttagagtagaatgttttataatcctttgggtatatacccactaatgggattgstgggtcaaatggtatttctagttctagatccttgaggaatcascacactgtcttgcccaatagttgaactaatttacactcccaccaacagtgtaaaagcattcctgtttctccacatcctcgccagcatctgttatttcctgatgatgagcttttttcatatgtttattggctgcataaatggcttctcttgaaaagtgtctgttcatatcctttgcccatgtttctatggggctgtttgtttttttcttgtaaatttgtttaagttccttgttgattatggatattagccctttgtcagatggatagattgcaaaaattttctcccattctgtaggttgcctgttcactctgatgatagtttcttttgctgtgcagaagctctttaattagatcccatttgtcaattttggcttgtgttgccattgcttttggtgttttagtcatgaaggctgcccatgcctatgtcctgaatggtattacctaggttttcttctagggtttttatggttttaggtctgacgtttaaatatttaatccatcttgagttaatttttgtataagttgtaaggaaggggtccagtttcagttttctgcatatggccagccagttttcccaacaccattgattaaatagggaatctttttcccattacttgtttttgtcaggtttgtcaaagatcagattgttgcagatgtgcggtgctatttctgagggctctgttctgttccactggtccatatatctgttttggtatgagtaccatactgttttggttactgtagccttgtatagtttgaagtcaggtagcgtgatacctccagctttgttgtttttgcttaggattgtcttggctatatggacttttttggttccatatgacatktaaagtagttttttctaattctgtgaattttctaattctgtgaagtaggattttctaattttgtgaagaaagtcaatggtagtttgatggaaatagcattgaatctataaattactttgggcagtatggccattttcatgatattgattcttcctgtccacgagcatggaatgtttttccatttgtttgtgtcctctgttatttccttgagcagtggtttgtagttctccttgaagaggtccttcacatcccttgtaagttgggttcctaggtattttattctctttgtagcaattgtgaatgggagtttgctcatgatttggctctgtatttgtctatttttggtgtataggaatgcttgtgatttttgcacrttgattttgtaccctgagactttgctgaagttgcttatcagcttaaggagtttttggactgagacgatggggttttctaaatatacaatcatgtcatctgcagacaatagtttgagttcttctcttcctatttgaatacctttatttctttctcttgcsttattgccctggccagaacttccaatactatgttgaataggagtggtgagatgttgaataggagttttcaaagggaatgcttccagcttttgcccattcagtatgatattggctgtgggtttgtcataaaaagttcttattattttgagatatgttccatcaataccgaccttatggagtgttttagtcattggttctgtttatgtgttttttgtcattggttctgtttatgtgatggattacgcttattgatttgtatatgttgaagcagccttgcatcccacgggtgaagcygacttgatcgtggtggataagctttttgatgtgctgctggattcggtttgtcagtattttattgagsattttcacattggtgttcatcagggatgttggcctgaaattctcttttttgttgtgtttctgccaggttttggtatcaggatgatgctggcctcataaaatgagtaagagaggagtccctctttttctgttgtttggaatagtttcagaaggaatggcaccagctcctctttgtacctctggtagaattcagctgtgaattcgtctggtcctgggcttttctttggttggtaggctattaattactgcctcaatttcagaacttgttattggtctgttcagggatttgacttcttcctggtttagtcttgggagggtgtatgtgtccaggaatttatccatttcttctggattttctagtttatttgcatagagatgtttatagtattctctgatggtagtttrtatttctgtggggtcagtggtggtatcccctttatatcattttttattgtgcctatttgattcttctctcttttcttctttattagtctggctagccatctatctagtttgtcaactctttcaraaaaacagctcctagattcattgatttttcgaagggttttttatctycttcagttctgctctgatcttagttatttcttgttttctgctagcttttgaatttgtttgctcttgcttctgtagttcttctaattgtgatgttagggtgttgattttagatctttccctctttctcccgtgggcatttagtgctataaatttacctgtaaacacgctttggctgtgtcccagagattctggtacactgtgtgttcttattggtttcaaataacttatttgtttctgccttawttttgatatttaccttgtagtcattcaggagcaggttgttcagttttcatgtagtcgtgcggttttgagtgagtttcttcatcctgagttctaatttgattacactgtggcttgagaaactgtttgttatgatttccatttttttgcatttgctgaggagtgctttacttccaattatgtggtcagttttagaataagtgcgatgtggtgctgagaagaatgtatcttctgtttgtttggggtggagagttctgtagatgtctattaggtctgcttggtccagagctgagttcaagtcgtgaatatccttgttaattttctgtctcgttgatctgtctaatattgacagtggggtgttaaagtctcccactgttattgtgtgggagcctaagtttctttgtaggtctctaagaagttgctttattaatctgggtgctcctgtattgggtgcatctatatttaggatagttagctcttctcattgcattgattcctttaccattatgtaatgtccttctttgtcttttttgatctttgttggtttaaagtctgttttatcagagactaggattgcaaacgctgctttttttttttttttttttttttttttttgctttccattgcttggtaaatcttcctccatccctttattttgagcctgtgtgtgcttttgcacatgagatgggtctcctgaatacaacacactgatgggtctcctgaatacaacacaccgatgggtcttgaatctttatgcaatttgcaagtctgtgccttttaattggggcatttatcccatttacatttaaggttaatattcttatgtgtgaatttgatcctttcattatgatgctagctggttattttgcccattagtggatgaagtttgttcataatgttgacgttctttacaattttgtttgtttttgcagtggctggtactggtttttccttaccatatttagtgcttccttcaggagttcttgtaaggcaggcctgatggtgacrtaacctctcagcatttgcttgtctgtaaagggttttatttctccttcatttatgaagtttagtttggctggatatgaaattctgggttgaaaattcttgtctttaagaatgttgaatattggcccccrctgtcttctggctcctagggtttctgctgagagatccgctgttagtctgatgggcttccctttgtgggtaacctgacctttctcactgcttgcacttaacattttttccttcatttcaaccttggtgaatctgacgattatgtgtcttggggttgctcttcttgaggagtatctttgtggtgttctctgtatttcctgaatttgaatgttggcctgtcttgctaggttggggaagttctcctgggtaatatcctgaaatatgtcttccaacttggttccgttttccccatcactttcagatacaccactcaaccataggtttggtcttttcacatagtcccatatttcttggaggcttcattcattccttttccttcttttttctctattcttgtcttcatgctttattttattaagctgatcttccatctctgatatcctttcttctgcttgatcgatttggctattgatgcttgtgtatgcttcaccaagttctcgtgctatgtttttccgctccatcaggtcatttatgttcttctctaaactgattattctagttagcaattcctctaaccttttatcaaagttcttagcttccttgcattgggttaggacatgcttctttagctcagaggagtttgttataacccaccttctgaagcctacttctgtcaatttgtgaaactccttctctgtccagttttgctcctttgctggcaaggagttgtgatcctttggaggagaagaggcgttctggtttttggacttttcagccttgttgcrctggttttccctcatctttgtggatttatctacctttggtctttggtgtcagtgacctttggatggaatttttgcgtggtcatgctttttgttgatgttgatactattgctttctgtttgtcagttttccttctaacagacctgtcttctgcaggcctgatggagtttgctggggggccactccaggccctgtttgcctcggtatcaccagcggagtctgcagaacagcaaagattgatgcctgctcctacctgtggaagcttcatcccacaggggcaactgccagatgccagccagagctctcctttatgagatgtctgtcgacccctgctgggagatgtctccccatcaggaggcacaggggtcagggaccccacttgaggaggcagtctgtccgttatcagaggtcgagcactgtgctgggtgatccactgctctcttcagagccggcaggcagagacgtttaaaactgctgaagctgtgcccacagccaccccttcccccagttgttctgtcccagggagatgggagttttatctataagcccctgaccggggctgttgcctttcctcagagatgccctgcccagagaggaggaatccagagaggcagtatggctacagtggctttgtggcgctcaaaattcttgtgttctaatgatgtgaagttaacaggatgcagatcacatatctaaattgacttgtaaacatttattttaggaaatgatagtatattctctcatcactaatatatttctgttgcttcaatgtgcaaaacactgtgctagatattgtggggaagactaaaatgaataatagctaacactaggcaagktcacattgtttgtcagatgctatgctaaatgctagatgtgggtgrtttcatttagtgctgaaacagccctgtgacagagctcttgttagtttctctctctctctctctctctgtctctctctctaccgtttgaggaaactgatgctttaggaagacataaagatacaaatggtggaactggaattcaaattgagaccacaaagctgttgttcttaagtctgtaacatacaaagcctcacctttctcatctgaaagtgaggataacaagctagcttgttgcaaaggttaaataaagtaatactgtaaaacacttggtaccacagaatactactattacttcttaatggtagtaattattatggccaccgtagaggagggattataaagattaaaataaatgatacacataaaggatttagcatggagcatggcatgtaagcactcaccaactcaaagaggcatcctttaaattggactgtgaaagttgacagcatttttacagttgaactttgaacaacacacgtttgaactgtgtgggtccacttatatgcagattttcttccacctctgccacccttgagacagtgaggccagtccccccaccttcctcttccacctcagcctactcaacatgaagatgaagatgaagacctttgtgatgatgcacttctatttaatggacagtaaatatatattctcttccttgtgatttattaatattttctttctgtagcttactttattgtaaaaatacagtatataatacatataacatacaaaatgtgttcataactgtttgtgttattggcaagtcttccagttaacagtaggctattagtagttaagctttggagaggtcaaaagttatatgtggattttcaactacacaaggggattgatgtccctaatctccatgttgttcaaggattccacttgtatatagagagatctgtgcttgagggaaaagaacatgatcaagattaggggaatgcatgtacaaaggtgctgtacaaagatgagattaacgctgttaggtagccagtttatatctacacaaaggtacataggaagagtaaaatgttgggttggaaaggaatttggggccaaatcttacagatcttcaaggcctggcaaagaagtttggctttgtctatcttttggaaagccattgttctgagttaactcactcaaaaacatccagggtttatttcttagcattggtaaatgaattctttagacactgaaaaaggagggttgcctttgaatattttcttgttgtcattattattataataaatttattttctaaaatgtactgaggtagtgacttgacagaatcaaagcatctcagaaaatgagtcattggcttctttctaatagctgcttaggattctaaatgtttgtgttggcagatctcacataattttcttaagtctgtgtgaaatgttcaaaagagtttcctatgataatgtttggttcattcaggttgaaaatgatgaaaacaacttctagaaagagatgacagtgtaagttacatctggcaaccyagaaacaaagttctgtagactactcatcatatcaatcattttttcccaaattattatggtgaaacctagatacaaagagcactgttccatcagggatcttatctatctctgaatagaactgtgtttcctgtatgatgttgtgtgtgagtgcatgtgtataaaaataagtctgtcaatgtgggctttttttcctttttctcttaactcaaggattaatcgtaaggttctctagtgtacatttttcattattgttttgagaaagagtcttaccctgtcacccacagtggacagtgacatgatctcagctcactgcaacctgcgcctcctgagtagctggaattacaggcatgtgccacaacacccagctaattttttgtatttttagtagaggcagggttttgccgtgttggctaggctggtctcgaacttgtgaccttaagcgaaccacctgccttggcctcccaaagtgctgggattacaggcgtgagccaccatacctgccctatcgcgtacatttttaaaggcacaattgaaaccagtgttctgaattaaaccactcacattagcttacaaatactacattctgatttggttggatctctgttttcagtataatttaagtgaaaaaaatcataattgtatgataaagataaatcgatgttaccaaagtatatttaaaagggcattggtaaataccacaaaacttattttctgttttaaatggaaaaaatagtttactatgtgcctatttaacttacacaagggagtttgctttattagagtaactgcaaatgaggcaacaaaatttttcttttggcaaatacacgtattaggtctcatttcaggtttgaggaaaatagtgaatatttttagttattttgaatacaaatatgtaatattctttttctgagaagcctaagtagtttttcttgctatgcctgaattttggcagataaacgtgtcaaaccaatttgttatacmcctgttgtaacagaagtgacaaagaaaaatcacagttcagagatttgacaggtttgtactgaaatggtgtttagtatatctaggtgttctatctagaaaaaaagtatagaatggctcaactttaaattgattaatctaaaaagaaaagccttcataaccaccagcttttatttagtgttccacatatttctaatattccaacaaggatatcttccctggagagagtagagttgagatcataccaactctgattagaattttcacttaagaacagcagttgagatgatgttatctacattcagattctcaacttagttatggaataaaatattgcacatgctgtgtttgataaaaagtaagtgaaatgtgagtattgtcaggattttacttaaactagaaataaatgatatccttgtaacagtttgaagtacacaaaagaacgtgatatatcctctttctcaagccttaataatcatggtatggattggttgaagattatttgaggtgatatccacttgaagtttttttgtttgtttgttttttttaagacggagtctcgctctgtcacccaggctggagtgcagtggcgcaatcttggctcatggagacctctgccttccgggttcaagcgattctcctgcctcagcctcttgagtagctgggattacaggcgtgtgccaccacgcctggctaatttttgtatttttagtagagacagggtttcaccatgttggccactgctgacctcctgatccgcccgcttcagcctcccaaagtgctgggattacaggcgtgagtcaccacgctcggccttctcttgaggtttttatggctgaagcatatttttgtaaatcatgttattggtgatatgatggctaaagccgacctgaatacattatacagtctttcctattgtgaacatattaattaacttgtgagattgctcatgataattctttttagggcatcttgagactgccttctgctgcattaggagagtttattgttttatgaaatacatgttttctgcccatcactggtcatcttatgtccttaatgctagaacaataggaattttcccagggctgaattctggcrccatttcatactagaccttttctctgtttctccccttttccttgtgtgtgtgtgtttgcacgtgtgcacacatgtatgtgtggtgtgtgtgtgtgagagagacatagaacacctattttgtttcttggctttgctttttattgttttttcattagtttttactgttcttaattcctaagacataatgaattttaatatctggcagggtaaactttcagcttttgctttattttcttgaaaaaaatgtctaagccatttttttctccatgtatatttttagatttactttgttaagcttcctcaaattcctgatgggatgtaataggaaatcctctgagactataaattaattttacagggatttgacatctttaaaatgttgactcatctcatccacgagcatcttctttctgcatttatttagggaattttaaatgtcctttaaagttttgacattttctccttgagaatcttgtgtgatctttgttagattaattccaagatgtattgtttttgttgctcttataattaatgctgtgtttgccttttttctggttattgcagaggaatactcttcactttgtgtatattggttttatatttgacagctttgcagaattgtgtagttagttctccattaccttattagctgtatatctttgttttagcagtttgtgggtgataaattctttctgcttttgtctgtttaaggaagtctttattttgctttttattttgaaagagatttgtgttggctaaagaattctaggatgacatttttttccttttagcactttaaagatgttgttttcatatttccaatatttcctcatctttagtattgatattgcttaacttgttttaaattcttattttgtctgttttctcactcattacttcagtagttatttttcctctatttttattctgtctttaaactgcccagggtttacttttacttatggtgtgagtcggggatctttgccaaatcattgcctcctctctcttgtcagtcctgcctgagactcttccaaattattagccttttcaaaataccacttagtggttcattaatcagtctgagtgatgaattgattgactggattttttttagttcattgatttctgcttacatctttattttctgctttcacatttctggctttattctcttggatttgtcccctttggtggatttagttatcagctaattgtaaatcattattattttctattgaaggcatttaaagctcataatttactgttgttactgttttaggtgcatgccgtaaattttggcatgagttcttcccttctcattatactttaaggattttatagtttccctcatttcttctttaaatcattattattcattattatttttacatatatgtgtttttattttatatttcagatatgtgcagtctcttctagtcatcttttttattgtttctacctttattatattgaggtaagaatataatctggtggagtttttgtaattttttgaggcttcagttttggtctatgaggtgatcaagttctgtgactgctccatgagtgcttcagaagagcagctagtctatgtcacaacactattaattagtgtatttacattttctctgccatttctgagatgggtgtcttaatactatatattatatagagtgagtatccctaatccaaaaatgtaaaatccagaatgctctgaaatctgaacctttttgagcaccaacatgacactcaaaggaaatgctcattggagcattagagttcagattttcagattacagatgctcaacctgtattattaattgatttaaattttctatcagttgctatgggaaacatactgaattatccaatgaaaatagttgaatttgttattctagtagatctgttacttacttccttctatattttgtggtcatattttcaggtacatatacctctgtgattgttgtatttttgttctacagcatttcctgtaggtaaatttcctcttggtcctttataatgtttttggctgcaattctattctgtctgataataaaattgcttcatggggtttcttccattttatccctctgtgacataatactttccatacacttaacattgactggttgaatcatggttttctcaaaaatccaatctgaaaagtctttcttttggtatttagtttcatccatttatattttcatcatgattacttttctatcaggcttattttcactgtcttgttttctgtcttctatttattataactgttttgtgtcttgctcgcattgctgttttcttttctaccttccagtggaaactctttaaatcagatgtcttatttttttccctcagttctgggaaatatttgactgttatttcttcaatactttctcccatctgtttactttcctctattcttttgagattcctaatacttctagcctccagattttttatcttatatctcattctttttacctttaagatgccatctggagagatttttggccaggttttctaagmtactgtgtaggttgtttgagctgttgtcttttattgatggtgcttctgctcctcatttgcctcataattttctctggactcatctttaattcctctggagttattacctgcttctgtggttggaatgtgtcccttcccaagtccaagtgctgccaatgtgatagtacaaagaggtagggcctttaaaaggtgattaggccatgagagctcctcgccttgtgaatgagaccattcctttgtgtacttaaatgatttattgctcagaggaacttaacttttacatggaagcctgaagggtgaaagcagttcaatttgagggtggctgaattgggctagtcttatcaaagaagaagacagatactgccttggtgaacattcatggagacattaacaaggggctgatgcagaaggtatgtgatgacctatcttcaaacaggtagaaaacatcacatctgtaacaaaagaaatgactaggcagatcttcttttaaactctgggaagagcagttgtgtgctgtattcacacagcagctatcctgtcattatcccttcagcattttaagctttgactttacccccctctctcattagcagctagcttctagaaggtgtcaagacacggagagagctgcagactgggggagggcaagaaatctggagtcagatgatcatctttcccagttggaagaaaaccagattggaaaaactgatactttggctgctcctgtttctctccactgaccactcctgtgctgccgaagactgaatcatcctttctctgtctatgctcatgtatcattcataatatcgctttactgtggtgattataacatattaccctctggttttctgtgctgcttcccctgaataaatggactcctctagggaagggggattgtcgtattgttttgtgtgttcactgaagatttgttaatgaaataaatgaattagcagtcattgaaaatgtagccatagatatgaatcctgcctgttggctagaccattgagagttttgatttatttataggagaactctgttctgagccaatatgcctgtcagtaagactagtctgtgaaagcgtagattagggcttggaatgaatagaatttaaagatgaaagttaatctttatcatctatctatatcatgtctaggagtcttagaaaatcaatgcttataaaaaattatgaaaataaatttgtagataaaaatgagtttaattatcactgactgtatgaaccagtagctagtgtgaacaagaaatagcatgctggcaggaatgagaacacattatcacgtgacagaagtgtaatacccaactgcaaaggtgctataggatcaaaatgcatagaggaaattaggtaatagtacaaaataaaaataaccaacatctggtaacatgtagacattttccatctaaattgttgcttttaatgacaaagtcatgctcctcctggaggatgtgatgggagctgtgcagtgagattaaataggtactggaagaaaccatagtttsgtgttttgcagttgttcatagatcaaatagttctttgctttgtgtgaaaaatccctcagcagcgagagatgaggaggatkaattagatcagcatgaattttccttttcctctagaaatgcttcagacacctaagggccttaagccagggtccataagtggaaagctgtaagggaaaaaagaaacttcacagtccaacaggtgagaagactgtaatttctgatcaaataaatacctaggtgtttcattgtcttgtctttttgaattcatgtagtacttcctttctcaaataaccccagaaggatggcaaggggtgtacgtgctgtgttttgtccctccctcttcctrtgcccaactggtaaggaaattggatgttttactacgatctctggctccccacccctgccccctgctcatatagcttgggaagtgatgatatgcgctgagtccattctaataaaacacacaacatgacttactgcttcatgatatgttttataagatggattgatttatgcacctatataagttgagtctgaatagtcagttttcgaagtgaattaagaataaatttttgttacattgcatcttatcaataagcattttaaaaccccaagcatatttatttaaacatataatttaaaaataaatgttttgaaatggtggttgaagaaccttttctttatttttcacattttctgatgtacttgctgttctcatcttctgatttcatgccctctggccttctagccccgtgcatcrtttttgagcacatttgaacatgtctkatccatgtagtctgaacctgttgctctctgagggttaccctactcatccctgcatgcttgccttcatctggaaccagcctgatgcattccaagaggaggatagaggtgggtccaggtcactttgcacagggatctgcacttcatgatccagaagaaaagtgcttttaaagcccaacttggcacattttaagtcaaaattaggtttgtggcagttggcacatctcttaaattctctatttttttagtcccctgaaatcatatttggagtgaaagaactgaaaaagttaaaactcagtctcttagactggcttagattggctttctataattgatttatcgtctacttaggcaatactccaatttctttattttctatgtaaattgtgttgatggatcagtacacaatattgtatcatttatcatttctattggaatgtttttattttaattactttggtagacygatttrcattaagaaakttacccatggatagatatattagaggatgttttaatattctttaatatataatattcttcagaagattaaccaactaatgtatcataaaatcggtagagtaactgactagctttatgaaattgtaaatttgttgaaaattgattttttttttactggagaygagagttccataattgaaaaaatatcctatgccagtgctttgtagattgcaagtaacgtagataatcttgcctgtagttccttgatgaaaatgatctgttgcatttacaatatcacaagtaattaattattaaagtatatgcctgtgattggtatgttttatcttaattctacttattctcttagtcatgcaaagaagaaataactgccagtggtagctgttgaaattatattcagatctattgaggagcatgttttgaacatcttttatgcttatttaaaaagaggcggagcttgtagtgagccgagttagtgccactgcactgcaagcctgggcgacagagtgagactacatctcaaaaaaaaaaaaaaaaacaaaaaaggcttttctatgggattctcatttgtttaaattatacatgtgattacttgacacgttaaagtgtacacaatttaggaaaatgggattaaaaatccagaaacacttaaraagttcttatagtgaagattaaaaaagtgatttcatttaatgactttcagaaaaaaaaatcactgggtggaacataaatgtttgaagtattcttgaacaaaagtgctctctgatactayagacataaaaattcttaaattacccgtgaaatatgctgttcctagggaatggttgtgaagtactttttagtcactcacctgatagagaaaagtagtctgaaaagctcatacacactgaattactwcttcagtttaactttttttgtgcctgctagttagttgccaggcactttacattgagtagtgaataacagacacctgcttttcaagggctgcttctgtagtatgagaaagagatacatgaacagacaatttttaatatactgtagtgaatgctgtcatagatgtacatgcacatgacctgttgtaaaatctggagcatgataggagagagagagatttgtgggcaggttgtcttctaggtcacccttccctcaacaccatgtagatgtgacctctctggtcttggcagtagtgtggttgtaccacaaacagaggcaggctgatgaggttgacggattttggtgttattctaattattcctttaagcaagtcatttacgtttctaagtctgtttcctctctgtgaattaaggaaagtagtaaaactaccctgcctcccaaggcagttatgaggactagctggggtaatgtgcctgaatgagctttgtatatagggaaaatgtatacaaattaatcgttagtatttgtggcactcactctgtgatttggcctatttcacctccctatgctctggatttattatctgtaacgggaacaataatggttgttcttacaaatggtagttgtgaggattaaatgagttaaaatatgtgaagcccttaaaacagtttctggcatacagtaaatattagctctcattttgatattcttatagcagaagaagttgaccctacctctctgttaccctggcagaaggttttcaagatactcattttgtggtaccctggacattaagattccatgtaattttgatggcataatgaaaactttctattgttggacagttgttgtagatgagcatccagaactggattaactgatccactgcagataggaacttatgaggtgagcaggtgctcccctttagctcacactatttgctgaatagtttggaaatgcctctttctggcattcaaataatatactcttctttagttgcagaaagtcagtttaatgaacagtgattaagatgctgccttttggacagtcattaataaatgttaattaaaaaccccagtctagagcatctgccgttgtcccctcagatgggtacctactatttcagatctgttttgtttagagaactacagcaagcttagtagccatttctgatacctgttttagtagcaaattatastgcttcctgttcgtttgatttcttccagggacatattttattttcctgcctccttagaatgtctggcaaaaagctttatttcatctgaattctgctgggtcatcacattggacttgtggaagaaaatggatttataatagcaattaataaaaaatagtaacaaataatattgcttaatagtaaatgtgtactgtatgtgccagccacagtgctaagcattttaatacaaaagcataaaataacattgtgagatttcctctagcaattttaaacttaaactagatgtttattcgagggcagctttaagctgcatttgcatagcaggcttttkgctgtgtatttattgggaggagagctgttrgaaattacagagctgttggaaataaaccctagctaattctcagggtttcttccagtattgaacttgtctgaaaagctgttggaaattagtgtgcactgactcccccaagatgcccctggaaatcaccactgcttgctctaccaaggtaccagaaaatctgccytggaaaatgagtcctttggattaaatctttccatcttyaggacctgcttgaagtgcaggtgtccctggagagggagctaattaaatcatttaacacttaaatagggattcagttatgaaattatcttctgagaaagaaaggagctgaaggctcaagtaacttttaatgggagaagaaaatggtgatggaagatttcttgctagtggtacttcctagggaattaactggagatagaactgggaagccagggagagaatatagagtgcagaaaaagaacgggaaagggcagatgggagtgagttaagcggccactaaggtcccttcctgtatttacactgggatcccatattatagagaaagtccatttggctctcttccccatctcagacaaagctttggttccctttggtctgcagcattgtctgtgttcctgggagaactcttcagttccatttattggctcagaagtagatgctgttgctataggatgatggctggcagagccattcctgagaatggctcattctatgagccagtgtcatagaattgtccttggaatgtcagccattgaagtaagtggtgtgtgtgtgtgtgtgttttctcacgccattgtgtcttgtattcctgggttggagagatattaatgaatttgtggagactaggaaaatagttaaactctagattgtctcatttaggttcagggagagaagtcttcatccttgtaacacagtgttgtacttacacgctctctggaatttgagttagaaactggtggtataacccagaaatgcgtttactctcagagtttactgattatttcatcagatgtggctcagaattagtgttgttccataaaagttgaaattggttcactttagaggcaaaagaatcttgactttcaagctgaacaaaaaataattgggaagttaggaaatatcttctagtttaagactcactgcttgagagcgcttcatcaccattaaaatgggaagacaaaaatatttcaattttcataaaactgggttcttgatatgacttttggctggaatttactaatatctgagattactttccccagtctgtaaacatggataatggtaactgcctgtaagagtagttgtaagtatagtggaagtattaagtaaacaggcttggattatgactctaccacctattgggctatgtggacaactttatttagtgtctttgagttagagttgcctcatccagtaaaaccctggcagggtaagaatttaataagatgtatgctaaatgcctggcatgcattaagttggtttgccattcacgtgtgctttctttggccagggctgtgttaaatttgaaatagtttctaacacttaagcatcagatgattccactgtaataatctggatttcagaaatcagaagatctggcagccttgtgtctgtccctctggctgcctgactcctcaagctgtgtgtctgtggacctctttgggtaggatgtgttctccagttttccacagaactgctgctgcctacagcgttctaccctgactgttcatkcccatatgttctgtagctgagccggtagacatttattgttctgccagtaaatgaatgttttggttgaaaagtatgttgcactaggtgtgatatttggtacacaatagatggtcattaaatatttccctttttctctattaggctgctgmtgatgtagtgaagagaaagtttaaatccaaatgatttcagccctgaactagaaagttctgtctcagtgggctgtatgatctcagaaaatcacttaatttctccattgctcagtgtttttctagggacactagagaatttggactagctgattctcagggtttcttccagtactgaacttgcctgaaaagtgatacrtaaccacacgcaaacttccatggggtgtttgaataaaaacttatatcctaaaaataaaataatgaagtatggattgtaagaacaattaggttaattacaaagtggcttaaaattaatgttcaggctgggcacagtggctcacgcctgtaatcccagcactttgggaggcttaggtgggcggatcacttgaggccaggagttcgagaccagcctgaccaacgtggtgaaaccctgtctctactaaaaatacaaaaattagctgggcacgatggcaggcacctgtaattccagttactcgggaggctgaggcaggagaatcgcttgaacctgggaggcagaggttgcagtgagccgagattgtacyactgcactccagtctgggcaacagagtaagactccgtctcaaaaaacaaaaacaaaaacaaaaacaaaattaatgttcagcgttgttggttagtaccaatctagaaaactgaagaatttaatcttttagccctgtgctgttgatttggataaagctatggggggcagggatatcaatataggagctattgtgaagctgggtgtgacagtcatatgatggatgacaggcccaggatggagagacatcttgatagcatggagcagtggacacaaaattgaacaaagatrtgtacacagtggtgtaatttggtttgaataaaaccaaccgaaaaagtaaagatgaagaaggaaataacaggtaaaacagagctagggttttagatgaaatgttcaatctcaagtgatatatatacatggccatcaatgtgtcatataaagagaatattaggatttccatttatgtttatttaaataagcaacttttcaatttgtgtgtgtgttgaattacataacaggatggtactacataaataaaacaaaacatgcccttggggtattgatgtaatcttttttttaactaataggagagtgtgatcaaaagtttgcaggctgctggattggaagttctgtttgttgaaaggtagcatagtatagtggaaactacagtctttaaaatcagatagtcctgaatataaactttaactttaacacgtaatacttatgtaacataacttaatgagcctcactttcattgaatgtaaaatgtgtgttataatacttctctcataggtatgttggatggttgcaatgggatgattttactgctgtcttttggttaatttctctgttttttgtctttcatgtttgattctttagggctggagaatatacccagtataattttactcttttaaatttgttgggttttaaaaatgacccttaactgtccaatacaaagtgtatcttgctgaatattccatgagtgcttgataagaatgtgcattctttgtgttctgtaaatgtcagttagatcctgttggttgatgtcttattcagttcttctgtatctttgctaattttctatttaatagttctatcagttgctgagaatgggatgtttggtccccatgatgagatgagtttttaccattaatttttaaaaatgtacatctgtgtctggccttgtgtgacccagagtggtcagcatagtatagaaggaatgcaaagaagctgtagtgagagaatagccagcttcatataggagaaaatgttctcatgctatgatttcccatgaattcagtagcagagtctgtcatcattagctttccggggtttgtagaaatactatcatgcctttggcctcgttgttattattgagcaaccttgcatactggaagctccagtgccttctgtatacaatgagctggattaggttagttttctagtatttagtgactctttcagtcagatacagactcatgtttgaccccgtcttttggcatgttagcatgcagaattaacctgttttcacattttgcagcagcacatgtaaaaatacatgctttcagttttttggccaagtctttttttttttttttttttttttgagacagagtcttgctcttgtcacccaggctggagtgcagtggcacgacctcagctcactgcaacctctgcctgccgggttcaagcaattctgctgcctcagcctcccaagtagctgggattacaggcatccgccaccacgcccagctcatttttgtattttttagtagagacagggttttgccatgttggccaggctggtctccaactcctgacctcgtgatctgcccgcctcccaaagtgctgggattagaggcgtgagccaccgtgcccagctggctaagtcctttttaaataaacctcttggggaagatatattctagtggaaaaggaaggacattaagtaacaaaaaatatcctcaggctttgggtcttaacaaagcagtcattcttgaaaagccactttttatttctctattcctcattttctagagtaactcatcaagttcttttaaataaatgtgtctgttttaaataacagatggctggaaaaataccccagctgagaattgatcttttagttgttgattttagtataaaacagttacattgactgtgatgattgttatgttgggatttatatccttcagtttttttgtattagatttgcttttttactgtttattaatgctttccttttgtctgctttcctcctattaaaattttttaaaattattttccctctactggtttggccattatgcattctgttagactgaaattttaacacacatactctgattaattttacaaaagatgtatctgggttttagtaattttgtgaatcaargaactgggaatttattatcatatcaaaaaacgtgaccactcagggttctgaaatacggatttattgttgttctgtgactctagtccgtttcgtagctacctgctaattgcattattattaatggttctggagaatgatccatcatagagatgtcaaggctggtataaatttactgaggaacaatttaatccatgcttcagcaccgcagactttttgttaacagatccacaattaaagtgaagctgctgccagttgttgaacttgagttagaaactgcaataagccacaggaaaagaagcaaaaataaacctcttttcagatgaaattgaaaaatatctattggaataacatgaattaaagacttgtcacttcatgaacttattgttctttttttcttttttgttatggagagagacacttctctagtctccatttcttggttactgtcaccaacagtggcagttttagataaaataatgtcgagggagaagaatactgaaacgtaaaaatgtggtggtggtagttttatttttaaaaaatatatatcctgtggaaatagttttcagttttagcttcactgtatccaccctcctagcattaattcagtacgcctaagtgaagttgctagctgctaaagaaatagttggagtgctattcagctgtgaggctaaaaatctygaactaaaacatggaaattgtttttctaatttcatttgggtaaaaatgaattcccgtgawtacatgttagcaaagcaagcttccttttattatttctcataccacagatacaatatccagaaatgtgttgatgtgaaataaaatcaaatcaaggtgattatcatgtggacattggatcaggattctggaatgttcagtttgtgggttgctttgcatttctcacttggagatgcactcacaactttatacctctttgccttagttttttgcactttaaaaatgagaagtataatgatcttgagctcacatggttgtcagacagtgaagaattttgaaaaaggcaagtttttcatttaagtgcattacatattaagaaattcatatcaaacttttgaaaaacaagtttgacaaaaaagcaagtgataktggctctacaaaatgtacttctgaactttctatatgatgtatttctataatatatagaagtatatagaaatattctataatatagaaatatataatcatatagaaaattcaaaagtacattttggagggagtctggggatatttttcagccactttcatgtataatctttctttcctagcccttcttttttccccttttaattcactcaactgtcctagaggacagtgacattttagaggaaatttattcaaaccacaagggaatatttacgaagagtttctttgcttgaaaaaaaaattatttctttgctttgatattttaaagaaattgatacttttaaagtttcttttaattttaaaatgatgtcaaacttacataaaagttccacaggtagtgtgagatacttccatgtgtactctttaccttgattcaccagtgttcatcttttgcttcattgactttatcattagttctgtctccctcgtacacaaactattttttctctgaaccgtttaagagttcctgtagactaacccttaactgtttcaacgcatacctcctaagaataaggacattttcttatataaccatagtacagtgataagaaacaaaactttttatatccagtccacaatctgaacttaaattttrtcagttgtcccartaataacttttgtagcatttctctcctccactgggtccaggatccatccacttgtattgtgtttaattattatgtcttaagtttcttttaatcttgaatcaytcttcatccttttttctttcgtgaccttgatgtttttgatgagtacaggcaaattattttgtagaatgtgtcttaacagatttgtctgctgtttcttcataatagtattcaggtgtttatttgcttatttattcattaacgtttattatgtcctcttggattctcatacagtgttataaactattactgtcaacatttattctgatgctcaaattgttacaaatctggccagtaagagccccgtcagcttaaagaatgatgtcatcatcgttctttacatcatacatcatcttgtactttttctgctgcatccttggaatcagccagtactctaaggacccctggttctttttactggagagtggtgttcaggtcttggtgctagatgtgcttattgctaccagaatgtcataacttttaggtcttcttggagatcaaagtgaggggaaaatacacacaaataaatatgcatctgtctgttcatccatccatccatccatctagttgtccgtctatccatgaaaaaccatgactttatactgatatgttcaatttcagtctagtaccacagggttcattgcagtagtcctcctttccatatttgtaactccaccgcctaagaaacatggctttattattcttaatatacctacttatttgctcacttttaacaaaaaatatttaaaatttctaccctacagcaccatgaaaaagtaacctaatgactagagtttagtgtttgcttatggttctttgtgtcttaggctgggggtatgtagtcaaagtactgcattcagaagttacttgggatagttccttttttcctctcttcaatgttactgtgttctttatttgaaatacagtaaagttcatatgtttctgttgtattccttttaccattccttcaccaatgcttgttgattttatttatttggatatatgaaacagtatggtttcaaaaatgaaagatgtccccagaaacattatgactctaattctttcagtttctctgctctgtttatgcagctcccaccctagttcctgttacctataggtaactggtatcattagtttttggtttatccttcttgtatttcttttgcaaaaacaagcagattcatgtgttttcttttcccactctttcatacacaaaggtaacgtgtgtgtgtgtgtgtgtgtgtgtgtgtgtgtgtgkatatacattaagtttgcttttttcatcagttcataggaagcattctcattcatcctaacagcttattcagccagttttctaaatattggcatttcacttgtttccagtagtttgcgattcggaaacactgtagtggataacctagtgtatatatatgtttataatattggaggtgaatattttgggtaacttcctggaagtaatattgctagatcaaaaggtaaatgtaagtacttttgttagatttgtcaaattcccatccataaaggctgtaccagttttcatttgcacaagccaagttgtgagaggacctatttctccacagttttgtcaacagaatgtgttgtcaaatgttttaatttttgctgatctgaaacatgagaaatggtattgcagcgtagttgtcatttgcttttattatgtgttaagttgaagagttttcatgtgataaatacaatttttagatcttcatttgtgaattgtctgtgtcttttggctgttttttacatggtgtttatcttgtcttttaaacatatttggtatatattwttagtgttattggctttttaactgtgatacatgttgcagcaaatacttttttctagcttgtcgtgtattcttttttgattgggatataattcacataccataacattaatcctttaaaagtgtacaattcagtgatatttagcatattcacaagattgtacagcatcaccactagaaaatgttctaattctagagcattttcatcttcctaaaaagaaaccccatgcccactggcacccactctcctcaacccacaaatcccctgacagtcaccatactttcagtctctagggatttgactactgttttttatgtctggcttctttctcttagcatagtgttttcaacatatatgaatatgttacagatgcatcagtacaacatttgtttttatggcagaataatattatatggatataaaacattttctcatcagttggacatttataatgtttccactttttggctattaagaatgatgctgtcatgaacccttgtgtgcacgtttttgtgggacaaaattttcttttttttgcatataccttgaggtggaactatcgagtcatatgataaatttatgtttaaccttttgaggtactgccagactgttttccaaagcagttgtaccattttacaattttggcagtgcttgagagtttccatttctccacatctctaccaatacttgctgttgtctgtccttttgactataaccrtcttattgggtgtgaaatggtatcttattgtgatttgatttgtgtttctcttaagactaaggatgttgagcatctcttcatgtgcatattggtcatttgtatgttttatttagagaaacgtcttctttaaatcctttgcccattttaaatattgagttgtttttattaagtttatatgttctggacactagactcttgtcagatatatgagctgcaaatattttctcccattctatgggttgtcttttcatgttcttgatgatgttctttgaaacacaaagttttgatgaggtccagcttaccagggtttttgtttttgcttttcttcatatctgagaagccactgcttaatccaagtttacaaagactaatgacgatgttttcttttaagagctttatagttttagcttttacatttaggttttaaatttactttgagttaattttgtgtaaagtgtgtggtaggtgtccagcttcattcttttgcatgtggatatccagagtcccatcactagtttttgaaacgactgttctttcctcattcaatattcttggcatccttgtccgtcaacaatcagatgcccaaaaatttatggatttgtcatttgtcttttgagattgcttatgattttttttggccatgctcaagtttgaatatttgtgtagctaaatttatcaacattttgcttatcttaattttgagctaaagaaagttttttcctacacttaagttatgggggaattcacccatgttttccccttataattctgtcattttcaaaatggctgttcttttrtctcagaaccatttattttattttatwactttagaagcagggtctcattttgttgcccaggctggagtgcagtggcacaatcgtagctcactgcaacctcaaagtcctggactctggtgatcctcctrcctcagcctcctgagtagccaggactacaggtgcatgccaccatgcccaagtagtttttaaaatttttaatagagatgaggttttgctatgttgcctaggctggtctcaaactcctgggctcaagcagtacccctgccttggcatccgagagggctgggattacacaggtgagtcaccatgcctggccagaatcatttattaaaaatccatttcactcagtgatttcaggtgccacctgtagcatatactaaatttgcatatgtatatgagtctatttttggacttcaaagtccgtttctctgtttatgtaataccatgatttttttaattaaaaattttattttgtgttagttttagattcatatgcagttgtaagaaataatacagagattttctgtaktctgtatccagttttccccagtggtaacatcttgaaaaackgtagtatggtatcaaaaccaggatattgacattgataacagtctacaggttttttgcagtttacttgaactcatttatgtatatatgtgtgtatttacttcggtgccattctgtcacatatataggttcaagtgttcaccaccgcagtcaaaacatagagcagtttcatcactgcaaggatcacttatgttgctcttttataaccgtacccacttcctctttcatcttccctagcctctggcaaccacagaaatgttctccatttctgtaattttgtcattttagtggcattagaaaagcagaattatacagtatacaatccttagggattggcttaaaacatcttttctcagtgcagtttcttggagatttactcaaattattgcatgtttattgttgagtagtagtgtatggtatggatggaccagtttgtataattgtttagtttttgaaggacaccggggttggttctgggtttatactcataaataaagctgctatgatcacaggtttttgtgtgaacataagtcttccacattcctctgagataaatgcttatgagggtgattgtattgaagtggccttgttttctggggtgacgctcagaattcttggtctcatagccaaggaaatcaaggacatggatacaccaagggtgaagtttagagcagaaatttaataggagaaagaaaaagaacagctctctgctgcagaaaggggtcccagaaaaagrgttgccatcctgtagtgaaatacaggaatttttacagacaagctagtggggaggcagtatctgaacatagggtgtgaaaaaccagttaggatcaggtgtgtcatctgcatagggtgcaaatctctggaagcccctaccccaatcttttatcatacaggcaggtcctcagcctgagctactccatgttgcttatttctttcttactgtgcatgtgctcaaaaaggggaggtagaatccccatggtggacatgcctggccccagctagccctttctgtccatgcaactgctggcatcccccagtgcaagcttccaggttccttatctatgtttgcagtctgatcttccaggctactctttgttagaaaataagtaatttcttgggctgctttytgttagaagggaagttctgcgaaggatgctgtgccctcactatctgcctcaatagttttttctacctcctgtatcatgataatggcatgtttagttatataagaaactgcgaaagtgttttaattataggggcttttcagcatgttttaatatctggtagggccaatagctcctaatagcttttcaagtattttccaagtttttacacaaaacagttgtattatgccagtgatatgtctttgtctaatttatcctacttataggattgcagatggaacaagtagcattttctttgttttcccaactttagctcttgactatctttagtccaacttggctggcaaattgtcatttaagtatgtcgcatttgcttgcaccttttctgaatttctcaattattctttttaagaaactaaaattatgaaagtttttttcctctttttattcatttcttatctacttgaaataatgggacttacatatacatcagtgattctcaaatgttagtgggtaacagattcacctggaaggcttattaaagcacagattgctaggccttgccccagagactttaattcactaagtatggggtggggcctgactatttgcatttctgaagcaccaggtgatgctgaggctgctggcctgggaccacattttgaggactactaggctatattagtagaatggcttatggagtgtctctgagaagattgctgggtcttatgattgacattatatttgaatgattgtgtaggacagatgtcattatatctgtactgctaaagaaacaagatatatgatgctggtatctaacagacttttaaatcttagtactgaaaggagatagaaaagttcagcttttaagtcattcatttatttaatctttaatttattcatcagattttattgcttccaactacatttgctaggcagtgaaatggtttctgttttacacaatgaggaattttttttttaagaagagttaaatatattttctaaaattctatatttaagaatcagaaagttactggagattaggaagggtagtgtgtggcagggtgaggggaaggttatgaggcgataacacgacaaggtgactgtagtcaataataacttaattgtacattkaaaaataactaaaacagtataattagattgattgtatcacagaggataaatgcttgagtggatggatattctattttccatggtacgattatcactcattgcatgcttgtatcaaaacatctcatgtaccccatacatatacccatctattatgtacctacaaaactaaaaaaaattataaaagcaaaaaacaaaaacgaaaaaagcccttgactttcagaagcctctgactaacctttgcagtattgtgcctctgttctacacataattaactgtgttgaaactgagaattaaagctgaaatgtaatttcacaaacttaataaatggcctttataactgataatgacatcttcgttgccttgagacaacaaccaaggacttgatttccttgagataaggactttggttgaatcagtatgtctttaagtatttaatcttgtctcataataattgtgttacctcaacaaagattgtactcataccttgacaaatgaaaccataccagtaaattaattctatttaagtcagagtagaatcaactagcagttacccactgactaatatcagagcccagtgtgttacatgaaactaaattggaaaccgacctctggaactcaatgttttgttttgacctaaatctactctgcagtgtgaggtaaatacaattgtttaaagattcttaagctgtcgatgttgaatttgcttattttgtatttaattaaaaaggtgcatacagatatgtatgtagtgtggtttggcaatagttaaaattgggagcaggaaaggaaaattttagaaatcttggtttccargcaaccaaacacacaatatcatatctgtgtaccacttgcttcatgttaagatgccctaaatgtaaataattgatggagcagagactaaaagaaccattatagtcagctgaattccaaggtccttgacctgagctcattaagctcaggttagagaatagggtggctgaattttcttagaaaaagagcccagataatatctggcatgtacatagatcttgaaaattagctggacttaagtargcatttagttttcaagctttagtttagtgaatgtggggatcctgatctgtaatccttcaggaggcaaatgagctgcaacagagccatggtttctctccctctttctgggagccacccacccccttcacccaatacagaggrcctaaggagtgattgattttataaaagatacagagtaacacactctgtatattcatcagaccgtgtaaataactaacttctagacctctcagatataaatacatctctttttacttcagaagctttccatgggtgatttcatccatgttcgtggttttaactcttgtgcttatatgaatgacttccaaatgcatacctccagcctcattctgtttcagaattagattttcgtacattcataggcccaactcaaaatgtctaaagtgaattaatctcttagctgtcttctcctccagagaagactactgcctgctctgctctgtcatgtcttgggtagtatttggcagtatcactcggctctttgatttcttgccctgttacccttacaygtggctgtttgccatggtctgtcaattctgcttcaatagtcctccctaataaatcttccctctcttctactcttagagtctctcaccttgactttttttttgtttgtttgtttgtttttgagacagtctcactttgtcacccaggctggaatgcagtggtgcgattatggctcactgcagccttgacctcctgggctcaagcaatcctcccacttcaaccttccaagtagctgggactacaggcacgcaccaccatgcctagtttttaattttttttttttttttatagaggcggggtttcatcatgttgccgaggctggtcccgaatgcaggctcaagcgatctgcctgcctcccaaagtgctgggattataggcatgagccaccacgcctggccttcactttgatcttgactcatctccctgtccctgatctttgcctgctcaagtccatcttctatacgcaaccatgattttctttagaaacacatttctgaccacattgttcccctttaaacacttggatgatgctttgtcaccagcaggataaagtctgagctctttgacttgacctactagccagccatgatctccttctccatcttgatgtcttgccattccccaaacataactttagaatacagcaattcagaactgcttttagttccctgaaaccaccataatgcttcacacaccctcacctgtgattgtgctgttctttcttactcacccttgagtctttattaattcttttgctttcaagactttgctctggcttttctagggtgcctcccttgatttcttttgctcacccatctgctgccatcccagattatgtcaattgactctaccctaaggtctccatagggcatcctgtgtctatctctatgatagatccttgcccactttattgaattcatctttaagctccttgaatggagggtctgtgttttatttctctttgtttccctctttccttgtgtggctcttgaaatcattatgaattgatctragcacttcsttatggaggyatgcagaattaacagcataattgtggcaagaaatgtctttgccttttctttttaatgcaaatgagagttagtaacatgttctttgtatttatcttgggtatccattgctgactaccagatcaccagatcaccccaaaactaagcagcttaaaacaataaacattttgtgtgtatgtgtgtgattttatttatttatttatttttttaagacggagtctctctctgttgcccaggctggagtgcagtggtgtgatctcagctcactgaaacctccgcctcacgagttcaagcgattcttttgcctgaacctccttagtagctgggactacaggtgtggcccaccatgcctggctaatttttgtttttttagtagggacagggtttcaccatatcgcccaggctgtgtcaaattcctgacctcaaacaatctgcccaccttggcctcccaaagtgctgggattacaggtgtgagcctgcccaaagcaatgaacatgttatttgttcatgattttgttggaaaatcatgggctcatgattgagttgggctcagctggatgtttcttctttttgtctttttaggggtcactcatgggtcctcattcatctggtcrcccagctgaaggtagaaggtctagaatgaccttactcacatctctggcaatttgttgctggctgtcagctctgcctccctctctcatccttaaggggactggccagggtttctttccatggcagtctcagagcagcaagagactaagggtgaaagttgcaaggtctttagaggcccaggcccggraagtgtacagtggcagttcattaacattgtcttggccagtgcaagtsaccagaccagcccagattcaagggatggggagtagacttcatctagataggaggagccaccaggttacattgccaaggggtgtgcatacagggatgggaggaatgtgattgtttgttgctgtcagcacagtataccttactagaactgaattgacgtctctactttttgagcattttttgtacattgttgtggtatttctttgtrgtagtcatctcacatgctttaaacttcgtatgtcttatttccttccttagtaggtcacattgggagctcatcttccccttcacttaggagacagtgcaataaacatttgtatctctcatagcacataccagatttttaaaatttggcgggttttaattcaggacttaaggggtgaattatcttattaaataaataaytcaagtatacagggaagtgaaagacagtcatttacctaatgctctgaacatctttcttgagataaagtagtgctgtgaactgataaagttcacataaagctaaagaaattcctttatgtattaatattacaggcatttatgtaatatcagtatctgtctgaaaagaatgcattgattacaaaactctttaagttgtacagaagttatttttccctagaacttcaaaagtctttgctctgcaagggaggggagagtaaaaaaggtgccttaaggatgtagacatgctgtatccagcactgttatttgttgtcagaaatatactgataaacatgctaatgccaggccgggtgcagtggctcacgcctgtaatctcagcactctgagaggccgaggcgggaggatcacgaggtcaggagattgagaccatcctggctcacatggtgaaaccctgtgtctactaaaaatacaaaaattagctgggtgtggtggcgggtgcctgtaatcccagctactggggaggctgaggcaggagaatcacgtgaacccgggaggtggaggttgcagtgagctgagatcgcgccactgcactccagcctgggcgacagagcgagactccgtctcaaaaaaataaaaaaataaaaaaaatgctaatgcctttcttgcatattggatttggtctactgatgactttttttcctggagttcttagaagctgtgtgtaaccaaagggggctggagagtgagagaaagcaaaagatttggctagaagaagggagagaaatacattctggtttaggggctatgggtagacctaagtttttaccctgcattgtatctgaaaaacataaatccctgctgttaatcttaatatctaatcttagtctttagtgtctcttccttttcttttttccttcccttctcctcaacttttctacaaaaatatttatgcatctaaaatgggaagaattatttttgctcagactgtaaaaagtatatcacaggctgggcacggtggctcacgcatgtaatcccagcactttgggaggccaaggtgggtagatcatatgaggttaggagttcaagaccagcctagccaacagggtgaaaccctgtctstactgaaaatactaaaattagctgggcatggtagtgggcacctgtaatcccagctactctggaggctgaggcaggagaatcacttgaacccaggagttggaggttgcaatgagctgmgattgcaccactgcactccagcctgggtgacagagcaagactctgtctcaaacaaagaaacaaacaaaaagtatatcacaaatattgttacatattcttctttaatacataattatgcatccctgaaagtggcattttgctacatagcctcaatatagttttcacaactcagttttgccctcttaaaacaagattgctggcaccatcttcactgatgaaagacttgtgtctaagaaggtctgagtcataacagatgcttctccatcttgctttctcatctttctctagtttctttttgtcctttttatctttttatattatttttctcttctccataatactgctttctaccctcttattggggtgtctgctctatgtgccaaatatgccataaattccttcatcttggcttccctcgggagagactaagagaagacactgcagaactaggtctgctcagaggagatcatggcctgccctcatgggaccatttggcgatgtcttcctccatcacgcctgcagtcactcctgtggacttagaggttgagcaagattttctgtcctgagagaacccacgttcatattctgacttggtctctgtgaagatttgaaaaacatttttttttcctgaaaagatacagctgtacccattgaagcaaacgtggaactctgttcattattttctcctttttattcattctcatgttcacattcactgtataatcttgtttgtggcttatctttgacttttatacatactacatagattggacarttttcctggtgatackgtactctcacattgtgaagggatgrctcaatattaattttagagtggatgctttgaaatattatcaatgacaagattttagcattttataaccttcaaccaagcacttatttgggggtctgcaacattccccttatgcattaaatgaatgaatgattattttatacaactcacaccaaatctctttttttaaactcatgttttcacttttattttttgattacttgtaaaagaatgctattcttgatctactgttacctactgtttaaattgtatggtatatatatatatatatatttatactttaagttttagggtacatgtgcacaacgtgcaggtttgttacatatgtatacatgtgccatgttggtgtgctgcacccattaactcgtcatttgcattaggtatatctcctaatgctatccctcctacctccccccaccccacaacaggcccccgtgtgtgatgttccccttcctgtgtccaagtgttctcattgttcaattcccacctttgagtgagaaaatgcggtgtttggtttttgtccttgcgatagtttgctgagaatgatggtttccagcttcatccatgtccctacaaaggacatgaactcatcattttttatggctgcatagtattccatggtgtgtacgtgccacattttcttaatccagtctatcattattggacatttgggttggttccaagtctttgctattgtgaatagtgccgcagtaaacatatgtgtatgtgtgcatgtgtctttatagcagcatgatttatagtcctttgggtatatacccagtaatgggattgctgggtcaaatggtatttctagttctagatccctgaggaatcgccacactgacttccacaatggttgaactagtttacagtcccaccaacagtgtaaaagygttcctatttctccacatcctctccagcacctgttgtttcctgactttttaatgatcgccattgtaactggtatgagatggtatctcattgtggttttgatttgcatttctctgatggtcagtgatgatgagcattttttcatgtgttttttggctgcataaatgtcttcttttgagaagtgtctgttcatatccttcgcccactttttgatggggttgtttttttcttgtaaatttgcttgagttcattgtagattgtggatattagccctttgtcagatgagtagattgcaaaaatgttctcccattctgtaggttgcctgttcactctgatggtattttcttttgctgtgcagaagctctttagtttaattagatcccatttgtcaattttgtcttttgttgccattgcttttggtgttttagacatgaagtccttgcccatgcccatgtcctgaatggtaaagcctgggttttcttctrgggtttttatggttttaggtctaacatttaagtctttaatccatcttgaattgatttttgtataaggtgtaaggaagggatctagtttcggctttctscatatggctagccagttttcccagcaccattyattaaatagggaatcctttccccatttcttgtttttgtcagatttgtcaaagatcagactgttgtagatgtrtgatattatttctgaggcctctgttctgttccattggtctatatctctattttggtaccagtaccatgctgttttggttactgtagccttgtagtatagtttgaagtcaggtagygtgatgcctccagctttgttcttttggcttaggattgacttggcaatgcgggctcttttttggttccatatgaactttaaagtagttttttccaattctgtgaagaaagtcattggtagcttgrtggggatggcattgaatccataaattaccttgggcagtatggctattttcatgatattgattcttcctatccatgagcatggmatgttcttccatttgtttgtttcctcttttatttcgttgagcactggtttgtagttctccttgaagaggtccttcacatcccttgtaagttggattcctaggtattttattctctttgaagcaactttgaatgggagttcactcatgatttggctgtttgtctgtttttgctgtataagaatgcttgtgatttttgcacattgattttgtatcctgagactttgctgaacttgcttatcagcttaaggagattttgggctgaggcgatggggttttctagatrtacaatcatgtcatctgcaaacagggacaatttgacttcctcttttcctaattgaataccctttatttctttctcctgcctgattgccctggccagaactttcaacactatgttgaataggagtggtgagagagggcatccttgtcttgtgcgagttttcaaagggaatgcttccaggttttgcccattcagtatgatattggctgtgggtttgtgataaatagctcttattattttgagatatgtcccatcaatacctaatttattgagagtttttagcatgaagggctgttgaattttgtcaaaggccttttctgcatctcttgagataatcatgtggtttttgtctttggttctgtttatatgctggattacgtttattgatttgcatatgttgaaccagccttgcatccctgggatgaagcccacttgatcgtggtggataagctttttgatgtgctgctggattcggtttgccagtattttattgaggatttttgcatcgatgttcatcagggatattggtctaaaattctctttttttgttgtgtctctgcccggctttggtatcaggatgatgctggcctcataaaatgagttagggaggattccctctttttctattgattcgaatagtttcagatggaatggtaccagctcctctttgtacctctggtagaattcggctgtgaatctgtctggtcctgggatttttttggttggcaagctattaattattgcctcaatttcagagcctgctattagtctgttcagggattcaacttcttcctggtttagtcttgggagggtgtatgtgtccaggaatttattcatttcttctagattttctagtttatttgtgtagaggtgtttatagtattctctgatggtagtttgtatttctgtgggattggtggtgatatcccctttatcattttttattgcgtctatttgattcttctctcttttcttctttattagtcttcctggtggtctatcaattttgttgatcttttcaaaaaaccagctcctggattcattgattttttgaagggttttttgtgtctctatctccttcagttcttctctgatcttagttatttcttgccttctgctagcttttgagtgtgtttgctgttgcttctctagttcttttaattgtgatgttagggtgtgaattttagatctttcctgctttctcttgtgggcatttagtgctataaatttccctgtacacactgctttaaatgtgtcccagagattctggtatgttgtgtctttgttctcgttggtttgaaagaacatctttatttctgccttcatttcgttatgtacccagtagtcattcaggagcaggttgttcagtttccgtgtagttgagcagttttgagtgagtttcttaatcctgagttctagtttgattttactgtggtctgagagacagtttgttgtaatttctgttcytttacatttgctgaggagagctttacttccaactatgtggtcaattttggaataagtacagaactcacaccaaatcttttaactacccatgcttctagaagctttcaaggaatcaaaaaggggctatattaaaatgggaaaaaataggaagaagcttagaaataattttaggaaaggtattacgtttaagcatagaactaagtaggaagaggtaagtggcaaaacaacaataacaacaacaaaagagtctaatcagtatgtggtggaagactactacagtgagtagtactttacagtgttaccaattaatgcttgtccttttttgttctctttttctttgttgtcattgtattttccgctgtctcttgatttatcagcaaaaatacaggcacatttctaaatttgtgttagggtttcctgtagcatggtcatatgtcaccagtgagtcctctgactctgaattaagaaaacatgggcttaatatgcagaacactgaaactggaccccttccttacaccttatacaaaagttaactcaagatgggttaaagacttaaatgtaaaaccccaaatcatgaaaaacctagaagaaaacctaggcagtgccattcaagacataggcatgggaaaagacttcatgacaaaaatgccaaaagcagttgcaacaaaagtcaaaattggcaaatggaggatctcattaaactaaagagctcttgcacagcaaaagaaactacagtcagagtgaataggcaaccaaagaataggagaaaatttttgtaatctacccatctgccaaaggtataatatccagaatttacaagaaatttaaacaaatttacaagaaaaaaccccatcaaaaagtaggcaaaggatatgaacagacacttctcaaaagaagacatgtggccaacaaacatatgaaaaaaagctcaacatcactgaaaaaaagctgaacatcagtgatcattagagaaatgcaaatcaaaactrcaatgagataccatctcacgccagtcagaatggcgattattaaaaagtcaagaaacaatagatgtgagcctgtggagaaatgggaacactttcacactgttggtgggaatgtaaattagttcaaccattttggaagacagtgtggcgattcctcaaggatctacaaccagaactaccgtttgacccagcaatcccattactagatatatacccaaaggattataaatcattctaccctaaagacacatgcatgcatatgttttttgcgtattattttcaatagcaaagtcatggaaccaacccaaatgcccatcagtggtagactggataaagcaaatgtggtacatgtacaccatggaatactatgcagctatgtgaaggaatgagatcagatcctttgcaggggcatggatgaagccagaagccatcatcctcagcaaactcacacaggaacagaaaatcaaacactacgtgttctygtaagtgcgagttgaacatagagaacacctggacacagggaggggaaccaacatgcaccagggcctgttgtggagggaggcaaggggagggaacttagaggatgggtcaataggtgcagcagaccaccatggtacacatatacctatgtaacaaacctgcatattctgcgtatgtatcctggaagttaaagcaaaattaaaaaaaaaaaaaaggaaaacatgggcttaaataggacacaagatctattcctcctttgaaaaacccattaagtttggataaattctaagaggtagcattttaactagcatcctaagcacttcctcacatgctcatagtttgcaagttaacatgatgtatgtgtatttgtgtatttcaaactccggaagcttttgtattattgaaaccaaaactgacaagaaaccttctgtgaacatgcttctgctggggtgtagaaagctcacagagtgttgccttcatgcttacaatagtaaaaaatccagatagtatacaaaatgacttttcttggtctcatcagagaatttcggtcatagagcaactaactagcctgaaatctaaggaaaaggtatgagtttccaagtagacaggacaagacatttgcttaactggagtaaatgctgatgctgatgtcacataagctagtaagaaaaagactgagttatgttttaagtactaaaagctgaatgtatctcagcatgggacctgcagctgcaaggagaattcagttacatgcaggcagttctctacagacctcaccttgtgctcatggggaacactgggggcaaggcaagtgatggaagaatggcattcttatggaggcaagcagcaaccactgcaagaaaggcatgaagccctctggatccttctctaaccctgtttctcttgtggaacaaaagccttaagctcctgggggaagggcggcaaactctaggctcaggggacaggtggagacctatttcagctaggggaaaggaacaggaaaattgctgtacstttggaggagggtcaaagaaatattatccactgggactattagagatctcctaacattgtgggaggaggtagatcacttggaacgtcctacccctatacccaggcaaacggatcctgcctaagactgaggttgaaccagaacaagagaatacttcctctctacatacaccaggatgctaagctcagagtaagaaatgctgatggtctactgctaggggagtggggagaacatggagaaagacctccctaaggtacaggcacaaagggaagacctaaagctgagggtgaagcagacattgagaaaaacactgtggcaaaccagccccaactgaagaacagggtgacgccaaggacacatgaaacctgtgatgtgcagaggctaataagcctaaattcagctctcaactcctgactcctgactaaattgaatcaactccccacacttaagattagcaggatgcgagacatgttcatttccaggcacaaatactacatacctcagtctctatagttctgcacaagatggctggcttttaaccaaaaattactgagatgcacaaaaagtgaggtaaaacaacacacataaaagaaacaaagcaatcaatagaaccagactcagatatgaaccagatgttagaactatcagagaattttaaataactatgatcaatatgttaaaggttctaagtgggaaaagtgggtaatatgcatgtacagatggggaatttcagtagaaaaggtgagattacaaaaaagagtgaaatgaaaatgctagaaatgaaaaacttagtaacagagatgaacgatgcttttgatacctccttggtagaattgatgcagttaaagaaataatcagtatatttgaagattggtcagaagagatttatgggaaatctgaaacacaaagaaaaaagagggtgtgacaaaagacccaaaaatgttagagcccctaagagctttagtacaatatcaaaagttccagtgtatatgtaattagaatcccagaatgagaagtgagtcaatagtgtggtataaaatagtgcaatacaaaaaatatttgaagagatgatagtacagttttcccaaactaatgacacataccacataagaaatccaataagctcactaagcagaatgaataccctgcaacacacatacagtcagacatattgtattcacactgagaaaaaacaaaatttcaaagtcaaccagagaaaaagacacattatatacagaagaagaaagatgagtcaaagcagacttctcatcagaattaggtaaggttacastgttaacagaataaactgtcaacccagattcctmtgtccttcaaaatatccttcaaaatgaaagaaagcaaatataagtgatcttattactcttcatttcactgccaacatttaaaaatcaatggaaatgaagataaggctctggtctcaaccacattgatctgaactgacaactgcgataaataagcagtgtgtcttgatttatgaatttgtctgtgatgtttgagttttgtttaatcctaatacatggtatagctttggtggtttttaagggtggtgtacttggtacctatatcagccaaggttttctagagaaacagaaccagtggaatggacaggtgtgtgtgtgtttatgtctgtgggtatatgtatatttatgagtggatggaatcaagagatttatttcaaggaattggatcctgtgatcttgggaactgacaagtgcaaaattcataggacatgtttgcatgaaaacccctcaggcaggaattggtgctgcattcttgaggcagtttctacttcttcagggaaaatattaattcttgcttttgaggactttcggttgattggatgaggtccccccacattactgacaataatcttcttaaagttgctgaatgtagattttaagcatatctacaaaataccttcacaacagtacctagattaatgcttaattgaataactggatactattgcctagccaggttgacatataaaactaaccatcacaggatccattattagaattgtgggaagacctaggttttcttctagggtttttatggttttaggtctaacgtttaagtctttaatccatcttgaattgatttttgtataaggtgtgaggaagggatccagtttcagctttctacatatggctagccagttttcccagcaccatttattaaacagggaatcctttccccattgcttgtttttctcaggtttgtcaaagatcagatagttgtagatatgcggcgttatttctgagggctctgttctgttccattgatctatatctctgttttggtaccagtaccatgctgttttggttactgtagccttgtagtatagttcaggacgtaggcatgggcaaggacttcatgtctaaaacaccaaaagcaatggcaacaaaagacaaaattgacaaatgggatctaattaaactaaagagcttctgcacagcaaaagaaactaccatcagagtgaacaggcaacctacaaaatgggagaaaatttttgcaacctactcatctgacaaagggctaatatccagaatctacaatgaactcaaacaaatttacaagaaaaaaacaaccccatcaaaaagtgggcgaaggacatgaacagacacttctcaaaagaagacatttatgcagccaaaaaacacatgaaaaaatgctcatcatcactggccatcagagaaatgcaaatcaaaaccacaatgagataccatctcacaccagttagaatggcgatcattaaaaagtcaggaaacaacaggtgctggagaggatgtggagaaataggaacacttttacactgttggtgggactgtaaactagttcaaccattgtggaagtcggtgtggcgattcctcagggatctagaactagaaataccatttgacccagccatcccaytactgggtatatacccaaaggactataaatcatgctgctataaagacacatgcacacgtatgtttattgcggcaytatycacaatagcaaagacttggaaccaacccaaatgtccaacaatgatagactggattgagaaaatgtggcacatatacaccatggaatactatgcagccataaaaaatgatgagttcatgtcctttgtagggacatggatgaaattggaaatcatcattctcagtaaactatcgcaagaacaaaaaaccaaacaccgcatattctcactcataggtgggaattgaacagtgaaatcacatggacacaggaaggggaatatcacactctggggactgttgtggggtggggggaggggggagggttagcactgggagatatacctaatgctagatgacgagttagtgggtgcagcgcaccagcatggcacatgtatacatatgtaactaacctgcacaatgtgcacatgtaccctaaaacttaaagtataattaaaaaaaaaaagaattgtgggaagatcgacagtggaatctttgcaaaacaatggaattgcaactgtgaactacattttgattgtttgtatttttagcggagtgataagaatgatcccagactgaagatgcacattaaataagctggtaatagtaagaatttaagatgtaaactagcattaaaaaattctaagcctttaaatatgctctctcacattaagtgtatgctttgatttttcttataatcatttcatcatctagaaccatttaaattttgagtttttttcaatccaatttcacttaagcagttacgttttcattgaaatcattggattagcagaattggtacaaggtattgaaagtttgcagttcactgtgacttcatctgcaagtgaacaagtattattttgggattttgtgagaacaggagagccttaaaagtcattgaagtacagtattgttgcagatattggaggaggagtatgctgaatggtaacactgagactgtttttgactctgtaacagggtacataggttcaatacaaacttttttaagtgcagcaaaaaaaatttcaattgtaaatacaattgtcaacatacagcatagtggagttaaaaaagcatgttcttcatagtatagtcctgaagttctaatgataaaaatcagaatgttaaaaacaaactataacatacatatagttgaactgaaaatcatgttccctatagaaaataatggtatttctttgtcctggtgataaagtttaagtcgaggatttgtctttgccccccgaaaacattattttgctgactctgataatcatacttgttaaaccagagagaaacaatgatggatgtgaatctcaaggcagtatggggaaagggtctcaaagaccacttattatctgaggcatacaatttagaaagtaattatcatatttgttaccatggcgaggattgctgcctacagccagttctgttatgtaacaaaattcatttaagagatgcctgacagtatgtttctgtaatgctctagtatttaaaaagtaagggcaaagattgtgtckcatagttcagtatcatagtagctctttttctagtatacaagttagccttctgctccctgctttcrcctaagttcatcttttccagtctctgtctacttataaaattaaaatacctctgaacttgttttgaatttgttatgctacttagcaatgggtgcctcatgtcgaggtgtaccaagattatctggttctaaccattgagttcaattttatgggagactcagcatcacaatgtggcagcctttttggccaaattttcaaccactggaattgccttttggggagttattttctgtttacgtagtattttctatagcttgctttgatcaacggtgaaaaaaaatgtagtttgggatggaaaatgggtgaaaggagaatattagatataagagaagtaacgtactgtttaacaggtgaagctctggatacattatttataagcaggagaagacaaacgaaaataagacccagtgtgaaaaaaataacagagatcgtgagcacacctagtgctcagctctggtttccartaccatccttcagtaaaaggaaccagggcacctcggagaaatggctgattctagtatgggggcaggaagcatgcaagatgagcctggagcattttgtagtgcgagagaggaaaggggtgctaaagaataaaaactccagagaacatgctgatgggagtatgtcaaagggatacagaagccagctcaaagagctcctaatggccaaagacagaaaaatttgaacagaaaaataacatagtattggatcataacctgacgtatcaaataaatatctatgagttcatactgatggaagtaaatgatgggataaattaataaatgggggagaagacacatacttcctgtgcagaggaattgcaaattatgcactctgttctagcatacctgcccactctttaagtgtgacatgctcatagagacttcctcttgaagcatacagaatggagagggggtgcagtgggagagtcactttacagtggagaaacccacacacactaccccagccaggtgatcaaggtgyacgtcatcaacagtgataaatcatgttgatagtgtgttcccttaatatgatgtgatgaaaatggcacttcacctctgtggtcttcctcccttaaactcccacctctagtctcatcatgagaaagaaacaccagaaaacccccaacagagggtcatcctataatatacctgatcagtactcctcaaaactttcagggtcatcaaaaacaaagaaaagtctgagaaactgtcaaaccaagaggagtctaatgagatacgaaaactaaatatgtggcaccctgaatgagttcctgtaacagaaaaaaatggccactaggtaataaagaagcaaatctgaataaactgtgcactttagttcataataatatatcaatattgactcgtcaattgtaacaaatatgccatattaatgtacagtgctaataagaggggacatacacattttaaagcccagtgcagatgacccctccttttgagtgtcctcaccatagcctacaaggccccatgtgatttggccctttcatctctctttaattgcatgtcttagcccctcctccttagcactgtccctgctactctggcctggttgctgtcccttgaatatgcaaggttattcctgcctttcatttgccatttcctctgcctgaatcttcatgtatatcgtttatttcatttaggtctttgggcaaataccacctcattagaaaagcctcttctgaccttcctgattataatagtatctcctgcagtctataaccacaaaacttgtgttctttgtcttcataatactcagttactgaaattatttatttattttaacttcttatcccactagaattaggcacatgaattcggggactttgttaattctgtttgttcctctgtctgtagcaactagaacaactccaggcaagtggtaggtagcactgagtaaatatcatgtgaatgaaagaattctcaaattstgccccttagtttcctctgaatgcttaaccgcacattctgkgtgactcttggaaagattgttctctgctgtgtgttatctttttgtgcmtgtatgagactttgtttcccttctggattgccaaaactgcagcagttgtatacctctgatttatgtctacacycccacartatctagctaggtgcctggcaaaaagaagtgactgctcagtagcgtttatgggataaacatgtgtttctgctttggacctgtccttttactgcattcagcattcccccgggcgaggcctcaggcactgcataaaaagttgaatatgtctgactttgtttttatggactcctccaagctttatctccctatccactatctgaacttcrtgctgcagctcccttgattttgacctctttggctttggtcttggtttcccccacatcacatgtcctctttagacttgacaacatcactcccatttttaaaaacaaggccctgacctagacatcccataggatctcgcctcattctgctcaaaaattatgttgatgaggcccaccaagctcctgtggccagctaagcccaagacaggtgttaggacctgtgagtggaagcccagtggtagaaatgtgcactgtggcttgcatgtggcaatctacctaatgggagaattactctctctccattctttcctagcccstcacatttattaagaataacatgaaaagtgccgggtactaggggcacctatgtgaataaaatacaaaggctgaagaactcatagtggaaacacatggtctccatatcatgagaatcattatttatcctctagaargccagggaatttgttcatgaagcttaacccagagtcctcttgtctacttagaagatcttgccagaatgggttacagacatagtgattagctggaagtaaacagacttctgcaacctagccttcaaaaaccttactaccgaagtgtggcaaatattatacttttaaataatttcttccagtggagaaaagggcatgctttgtgaaacagagacttctgaaacctcttattaccaataagaaccttagcatgctagggtaaagttaatgatgaattggtctcggcaggtgccacaggctagattttctgccatttagtttttgtgtttctcacttgccaaggggtgactgartgtttttcattgtttatytcctgttccagttgttgctttatagctttttccagttttcttctttctctttgagacataaattggtcttttaattcctactaaccctaattctacttttattttatctatcagaaaatattgccacagttatcaataaaaacattggaaagatgtgttttgtktgtctcttttaaatttgttggacagataatagaaaattagatagtaatatattgcttagaaaaacgtacttaggacatttcttgctaaccttaattttttgggyggcctacaaacaaatccctatctaattgatttttgtcagggtttataacgttctaagcctgatcttcagttgatttgcgtatgactcccacatgttgaaaccaaaacactcagtttattgaacatatgaaataagactggatttttaaaaatctgcaaattgagttgctttcttctagctctcaaaaaattgatgggatttgcagtcagagaagattttacactaacatagttggtattttattaaaagctaatttgtactattcactaacaatatagattatagatttccttatttttcctggaactttgctctttatcttgtcagtatttgatttggactttaaaattagtggttttgtacacttttgacagttattacaaagtactatatattccacataaactgcctgatgttctttgagagtacatactgaaaagtttttttcagccaacagaagaaatggaagacgaggacctaatttgacaatatctataaaaattacaaatgcaatctatttctcagaattcatttctgaagtattctttcatatgtgtggcatgacctgtgtgcacatttattaaatacaacatttttgaaatcgtaaagtgttggaaagagaccaaacaagtatatattaatagaagatagactaagggatggtacatctatatagtggaatatgcagatgttaaaaaagtagagggtgcttgctatgtatggatatgggggacagcaaggtgcagaatatgcttatctgagcttttgagtaagaaggagtggtatacaatggtattcttatttgcttttttttttttgcctgaagaaaccctataaagatatttaagaaactattacatgtgcttgcttgtaaatattacttggagaagccaggtgtggtgactcacacctgtaatttcagcacttttgagaggccaaggtgggtggatcatttgaggtcaagagttcgagaccagcctggccaatatggtaaaaccccatctctactaaaaatacaaaaattagctgggtctggtggtgcatgcctgtagtcccagctactgggaggctgaggcaggagaatagcttaaagacaagagacggaggttacagtgagctgagattgtgccaccgacctctagcctgggcaacagaggagactccatctcaaaaaaaaaaattacttggagaaagtagggcagctaggaggggcagaggtggataagaaatatttttcactgtatactttttattactgtattagttggttttcacactgctgataaagacatgcttgaaactaggaacaaagagaggtttaattggacttacggttccacttggctggggaggccccagaatcatggtgggaggtaaaaggcacttctaacatggtggtggcaagagaaaaatgaggaagaagcaaaagtggaaacccctgataaacccatcagatctcatgagacttattcactatcatgagaatagcaaggggagagaccagctattcagttacctccccctgggtccctcccacaacacatgggaattctgagagataaattcaagttgagatttggatggggacacagccaaaccatatcaaatagtgttttggttttttagccatgccactgtattgtccattgaaaataaaactttttttaagtattggaaacttgcatgtatactaatattgatagtgggttttggaaatttactgagtgtctgtttttgagcagaaaacgttatgtttggacacatggatcagggtcctccttttgagacttttggttgctggtgattttttctccagtggcaagtacttgagcatttcttctgcaacagaaaccctaccatttaggaggcttaatggatgctcttttggttgcattagatggatgaagaaacaaagatgaactaaatatccaacttctactttctaggagttgccattacttctgtgtaaaatagggatagaaagtttttgttttattttgtttacttctgtgtaaaatagggatagaatgtttttgttttattttgtttgcagaaatgcgaatggtgtaaagcttcttcaaatatggacacacacatacacacacacatataaaaagaaaggctgcctttattctgccattttatacaagaatctttctacacataaaactggacagcaaaattgctacctgaaaatttgtaattcttttcctagatgatatttttcaagaaccaaagttgctaagaactccagttctctgctggatgaatcaagcgagcagtgaacgaaatgcctggcaaggcttttgatgggagaggagtctcattttgctttcaggatagacactgaacatcagtacatttgtaatcgtggtaaccacccctgtcttggttagagctttcatggtaataatttaatttctattgataaaagaatttattactgaatgtatagtggagaagaggaagcttattaatgatctgaatttatgtgaagtgtacgctrtattttattttcctactttcttccatgcctaataatatttttcaagatttttagtggcagtgcttctctcgtttttctagttggaaactttcatattattcagaaagaaaaaatcctggtaaggaaattggagaccaattttctgtattagtctgttcttatactgctataaagaagtacctgagactggtaatttatgaagaaaagaggcttaattgactcacagttccacaggctgtccaggaagcttgtcttggggggccttaggaaacttaaaaccatggcagaaggtgaaccggaagcaagcacatcttcacaatggcggagcaggagagagagaaagagagagcaaatcttggaatatactaagagtctggtgttgattgcctattttttaatgctaataastaagtgttctttttctctgggggatttcttaactgttctattgtaaaagcaactactataattgccttttataatacccagatcgctggatttgctatatactagacttgatgtacctgaagctgctaacaggattgcctgtcatttagctttcagaattcaatttataaaatgtcattatttttccccttccactgcaatactagagctgaagacagacagggaaaagcaagcaaatatttgagagtgtgaatggtataagttgagggtatgaatgttggaaatgaacatattcacctctaaataaagtgagagaaaccgctattctttctaaattttccatgtgccagtaaaatgggaatggtgatttccttaaggtattgctctggagaatttaaataattgagttaaatgtcaaacttcacatttagagagcytactaaaaccttcacaagtgggggcttacagactagagttttatttttatttttattttttctgtagggaatggagtaggggaggcagtrgcacacttaggtgataccttgcacagcagtcacaatgttgaaatttgaagaaatctagtgaaaattataaaattttcactagacatgaataaatcattatgaaagaatataaaaatagccagagatcactagaggggaaagaggcactgcaaaagttactggagggaatacaagagaagaaaataattagaaaacagtcagtaagaaatgtcatcccattctgtcccctggctgctttttgtggctttgttcagtgggtgaaaattctggagtgtttattggtgtcttgtagcataagatgaaatatcttatcaagatattttcattttctcaaagtgaaatgcgatccctttaacttcttaggatgacaggtacatgtggaagcatcagagaggaacttgggatcccacgagctagcctctgcttcatacacagtggagtagatgcctgaggttgtcagcaaatattgaagatttttatttccagggggttagaaacttcacgtagcttctctgctctgcacacataaggagtaaktggattattttccctgagtcagtaaggttttcggtgtcacataatctcaggggaacaaatgcarttgcttagatctcaatatactcctcagatggcaactttgaggaggtaaccaggaggtatctgcactccctctgtgctcgcctggggccttctgactttctctgtawaaagccctttctgtattgatgctcccgggtggtagtgggttggatggccattacataatcacaacctctttttttcagtcagggtagctattatgcagagagctaggagtggattacttcttggcaggaataagcacagaaaaatctatccagatttttttaaaaatggaaacattgtgaaaaaaatcttgatgtctctgaaattggaggatggtattttatctgaggaacatgggtagggaatgttggggtcatttcttagctctgaccttagtaagtcatagaggcctttttatactgatgttgcatttttaaaaggcatcttgacatgatgggagaaaaacagcagaccaaaagaaggcagacctgatagttctagttcaggctgtgttgttgtctgagttgtcctgcaagctgatacaaatcacaacttccccgagcctctcttttctcatcccttcagtgaaggccctctgtaatacccaagtcctttccagttctgaagtctgttcaaagtgggggcagctggaggactcagggaggtccacactaaagaggactttttttttccttttttaaagagaacatttttaaaatctagctttataactcaaggatattttaaatacagataactattacatttgtattttgtaatgaatatttcagatttatgtttgtgccttgaagctaattgactgtgaagaaaacggttttataaacaaagccaaagagaaagtattcctggatgtattacagcagacaaataatcactttactactatggtatattagtccattctcacactgctatgaagaaatacctgagatggagtaatttatgaacagaagaggtttaattgactcacagttccacatggctggggaggtctcaggaaacttacaggcctggcaaaaggtgaaggggaagaaaggcaccttcttcacagggcggtaggaaggagaagtgccgagcaaagggggaaaagccccttaaaaaaccatcagatctcatgaaaactcactcactataatgaaaacagcatgggggaactgcccacatgattccattacctcctactgggtccctcccgtgacacatggggattatgggaactacaattgaagatgagatttgggtggggacacagccaaaccatatcacatagctttggattatcccttccttttttcgatttttcatagcccattttttgtggatgctaaaaccaaaattgctctccacatgcatagcatatccataaccctcttaccttccatcactttctgggacttgttcttattttagagtgacttttaaagactgaacatgcagaagcctcattgcctcttagaaataaaggatgcccttctgggaggatgtactaagtccagtgttggaaccttgatactgtcctgggctgacatttcctctttaagaatcagctccctcacaccacagggtattagagaggccacatgggctgtgaaaaccgggcactcagggctggatagattgattgctaacaaacatatagtctgctttcttcagaattagtagctggctttgcaccttcaacttgagcatgagctcaaatgcatttcttttttttttttttaaggcggagtctcactttttcacccaggctggagtgcagtgacatgatctcggctcactgcaaactccgcctcccgggttcaagggattcttctgcctcagccacctgagtagttgggattacaggtgcacgccaccatgcctggctaatttttgtatttttagtagagacagggtttcaccatgctggtcaggctgatctccaactcctgacctcgtgatccgcccaccttggcctcccaaagtgctggtattacaggtgtgagccaccgtgcctggcctcaaatgcatttctatacaggtccagtcagagtagtggccagtcccactcatgtgttcaaaatataacctgaggaatgcaaagcaacatgtttagtcttttgtcttaataattcctctattagcaacttcattagacatccactagtacataactttgtcactgaaaccatatcattgccccccgaatagccttctagactcctaaccttggaatrcaccaaggaatatttaaactgtctcatagttttgcagaagcagaaaatgctaggattgtaaccctgatgatcagttctccctgatgacttggcctgtgttgcgcctactaaattcttcttrtcttctcstttgctctattgtcatgatattggttgaagggaattagtaaatcagactggcattgaatctctgggarctagaaaatgggctaagatttagatggcatattcactttctgcrttccgtttgtctgsgtgcttgttcttattcattcctaattttttcctgtagctagtcttttaggattttggtgtcaaccttacatataattgcctgggtacttcctgaggtgatcctgctgattttagaagaagtgaaagggaatattacatatggtagtagaaggagtcctggataggaagactttgcagtcctggcttcaaktccagatgcaggcagtcacttgtcactttggtcaacatcttaaggcctccaggcttcagttaccttgtctaaaacaaggcaccttctgcctctgaatttctgactcataaaatggtccaagccrtattgtcagtgattagtgcttttaatatcagcttcatacagaggtagctttccaggctgctctaacttttggattacataacagagatagagtgcctgatggatggatatctcggtatctggcatgttatggtgagtgggagacagccagaagaaaatccttggaaagtatttttttaaatctgtgtgaatatgtttatattgggatggttctgaattctaggttttagataaactaagaaaattggatgtaatatgaagagataaaattccatgagctgaagttgatgagtaatatacaactaagagaggagaaaaggaaataagagattaaatgagatagagaaaaataatgctgggcaggccatttaataaattctctgactttgtttctgcttatgcagaagaggtggactaaattatacctgaactcctctgttctgtgaaggtcacaagtacagatgtttctaaccttgaagggaagtaaggtgtttattcatttttttcttttagcttttgttctttccctaaagatagagaatatgcaaattattaaaaaatcaaatacaggccaggcgcgatggctcatgcctgtaatcccagctctttgggaggccaaggygggtggctcatgaagtcaggagactgagaccatcctggccaacatggtgaaaccccgtctctactaaaatacaaaaaactagccaggcatggtggtgcgtgcctgcagtctcagctacttgggaggctgaggcaggggaatcgcttgaacctcagaggcagaggttgcagtgagccgagatcatgccactgcrctccagctaggtgacagagtgagactctgtctcaaaaaaaaaaaaaaaaaaaaaaatcaaatacagaaagacatgggggaggaaaagccaaaattcggtgaaatattcctctctgtataaaaccatgattgagtcactgtcagtcatttggtaaagatactattagacttctgtgcaagcagcatgaactgttgcatagcattcaaggtgaaggaaacaagcagtcacagcttatatttttccaaactaaattaaatccaactgaaatgtatacttgccagactgacaggaatttcaatatcaccmtccagggatattctctcctgtgcctagtttgtcagccccctaaccccaatccccacacgtgtgtacagtctagaaaggaatttygctgaaatctgctttcaagcagagaagagccttaccatccaccaatctcctgctgccatccctggcctgccctcagccttactaccatgtggcaccactattgagcactagcccctcttggctgtccagtagtgcttgsttttgatactgtgaaatatcatgagcttgagctcccagcaaagaccacgtgcctctttgaacaagggcagctctattagttcagtgcatcatccattttctgtgttacataatatatcattgatggcatgtgccatcatttattcagccagtcatctcatggtgaatgcatagatcagcattatttataaagtgtcacgwtgaacactttacatgtatctttggccacctatctgtgtttttagagctaacactcaggagtyatgttgctgtatcaaaaggtttacctgttaagttttgacccctattgcaagtttgcattctggaatagatgyaccagtttacattcctgagagtgcattggagtgcacttccttgtcacrcttgctgatgatctctgtgcaagaagaaaatagttctggctaccacaatctcagaagaagaacatatggtcatacacatggcaacattatctctagagaacttgggttcctctggtattcaggatccatctgctagggatttattatttttcttgtttcccctctctaagttggtgttgaattggtcatgttgacccacttaaattcagaggatgagctattttatttatctcatgttctcttaccatatttgaaggaatggccagatttttctcagccttccaaccctttcactgtgttttgtcgtgtatgtaggatttacccagtagcaaaactrtaaattcagggtcttcaagctaaaacttcctaaagcaataccctaagactcagttgtgaactgaaaaatctgtgggactctagaggagcggaagatctgccccttggcctcttggttccctggattcctgtggttaggttagctggaactaattgctgaatatttgtttctttctgaagttaaccagttattttcttatcttttgttctttagccagattcatttgtctttctgactttttcatgatttttctgtattttacccttattctttagaaatrtttstctattctgtgcttgtgattgatttctaacgtctcctagaagttacaaagggcctgggttaaaatcctgtcagcaataacgccatatggtttcctagatgctctgcacactaaagaaaacacttattctgatattttaatcaaactctgaggacttaaacatatggtataaagaatgctagttaatagctttttgtgttattttaatggcaaaaactgcarttatgtttgcaccaacctaaatagaaccatatcagagtagcagaagaactcatctcaaagcctgtcttagagaggtggatggacctgtgcactgtgtttcatcatgctaatatggaatgtgcctgcctttgggcaactcatttcatagtgggccttaatcccaattggtaaaatgaactataacctttcatcattccatagattcagcttaaagtgggcccacagaagaagagagggtagagagtgaaaatggagtcacaaacccagcagagaatcctccctctggtttctgaataaacattgtrtacacagaagaaatcagtacgcagaaccttcccagaggaatcagactgactacaaaagttgaaaatctcttgctacaaaatacttagaaatgatggataaaacaaaacaaaaatgttttcattcatagcaaaagtaaccagaaagtgttatcaggagcctaaaatgaagagggaaaccgaagacctgagctgcttcaggaggagtagtgaggggagaggtggtagcaggtagtgggtgagggtaggacttgagtatatcgtgtatcatttggggcctctttgtggggagagattggaagtgagtcacaagcatgagtatagaaattggggaacaggtagtaaaataattaccgtcattcgatgwtatgattgtatacctagaaaactttatgggagcaattgaaacaacatgacgaacaataagcatgttcattttaacatacagaaatattagcatatgggaatagcctacatagatgcgaacagccaccaattagaagatatcgtggaaggaaagatctcatttgcagtagcattaaacaaagataaaattcctarctataaatgatataatttttctatttaaaaaataaatataacacatgtatratttttcctagaaaaagasatgagaaacagaaaagcataccatgttctttttatgattgaaaagacttagcatcataaaggagtcagctttctctaagttaaastgtaaatgtaatgtgatacttatacaaaagataatatttttagtaagataagcctattataaatttatggaaaaatagtaaagtatagcccaggaaaatataaggaaggataataaggaaaactagccctaatatrtatttaaaaacattaaaaaatctttgatatttaacatagtgtattactrgttcatgaagaaacagattaatagtttaacataagatacaagtgtatttcaaatcactaaaacaaaatagataataaatggttttgggaaagatggatagtctgcttggaaaaaaggttggatccataattcacatcttggatccataattcacattggcaggaccaggaaaattttccagtggaataaataaagatttaaatgttaatgaatgaaatcataaaaatcacttgaagaaaccagtgaagaaatttgaaagtagttttgatctgatggaagcttttctaattatgatcccaaacccagaaactataaaggaaagaatcaggatatatgtaccgatataaagaggagaaatgttgcacagcaaaaaaaaacacccatgagctgggtcacgaaaaaatttaaacagatggaaaagcaaggagcaaaacatagtgaaccctcttgtttccatctcccaatttcaaccatttcaaactcatgactgaatttctttattttgaaggtaatccttgcttatcatatcattgcatctaaaacaacctgcatgtgaatataaaagagtccttttttccctcaacacattaaaatgccattattacaattargaaattagtgattccctaatattcatgatgatttttaaggcataggaaaaatgagtcttccagtaagtaaataatgtccaccgaaatatctaaaaggcacaatctgtgatttcagaaatggtttttttaaagagattaatatactgcagaaatttctattaaactaaatttagacatgcttccccctttcagtgttccaaatgccctgaatctgttaatgccttgctgtcagctggttatgccacttgattatgcttttgttaatcctggatcttgctctgacctgaaagaagcccattactttatcctgccttaaaaatcgcttaggactgcgacagatgatggcccagcagtctctaataaatccctcaagatggggacacatcagacattgtcaggaccctcaagctcttgaaggaggattcaacagagatgaaatgtggaggtagtagtagcctgggtgttgccagaatttcccaccctttatcaaatgaaaatgagctgcattatttgggtagggaatgattttaaggattgtatggctcggggaaaaaaaacaataaaaatattttataaataactagcttgagtgaatctcttttcataaaaatatttaagatgcatgtgatgtcaataatgagtgatgttgaattttgatgtaataatcacaagtttgaatattaaaattagtgtgtttagaataacatggcagtttcatttccaaaagttgaggaggagggactcctccttaactcattctgtgaggtcagcatcatcctgataccaaaacctggcagagtcacaatgaaaaaagaaaaacatcagtccagtatccttgatgatgaacatagatgcaaaaatcctcaggaaaatactagcaaaccaaatccagtagcacatcaaaaagctaatccactatgatcaagtagtcgttatccctgggatgcaaggttggttcaacatatgcaaatcaatatatgtgattcgtcacatacacagaactaaagacaaaaaccacatgatcatctcaatagacgcagaaaaggcttttaatacaattcagcatccgttcatgttaaaaacccttgacaaactagacatcaaaggaatatacctcaaaataataagagccatttatgacaagcccacagccagcatcatactgaatgatgaaagcattcccctggaaaactggaagaagacaaggatgccctctttcaccactcctattctacatagtattggaagtcctagccagagcagtcagcaagaggtataaaaagcattcagataggcagagaggaagtcaaactatctgtctttgtagaccatatggttctatacctagaaaatcccatagtctctgccagaaagctccttgatctgataaataacttcagygaaatttcaggatacaaaattaatgtacaaaaatcagtggcatttctgtacaycaacatcatccaagctgagagccaaaccaaraacacactcccattcacaatagccacaaaaagaataaaacaactaggaaaacagctaaccagggaggtgaaagatatctacaatgagaattacaaaacactgctcaaagaaatcggagataactcaaagaaatggaaaatattttatgctcacagataggaagaatcaatattgttaaaacagttatactctccaaagcaatttacakatttaatgccattcctatcaaattaccaatgacattcttcacagaattagaaaaaraaaatattaraactcctatggaatcaaaaagcctgaatagacaaggctaagctaaaaagacaaagctggaggcatcgcattacctgacttcaaattatgctacaggctatggtaaccaaaacagtatggtactggtagaaaacagacacacataccaatggaacagaataaagagcctagaaataaagccacacacttaacaaccatctgatttttgataaagttgacaaaaagaagcaatgggggaaagtactccttattcagtaaatgttgctgggataactggctagccaatatgcagaagattgaaactataccccttccttacatcatctaaaaaattaacaccagatggattaaagacttaaatgtaaaacctaaaactgtaaaaatcctggaaggataacctaggacatgctgctgtggacataggacttggcaaagatttcatgacgaaaatgccaaaagtaattgcaacaaaaacaaaaattgacaaaatagagatcttctgcacagcaaacagacaatctacagaatgggagaaaatatttgcaaactatgcatgcaacaaaggtctratatccagaatttataaggaacttaaatttacaaacaaaaaaaaamcccattaaaaaatgcacaaaagacataagcagacayttttcaaaagaaagcatacatgtggccaacaagcatataaaaacatgctcaacatcactgatcattagaaaaatgcagatcaaaatgacaatgagatactatctcacaccagtcagaatgactgttatcaaaaagtcagacaataacagatgttggcragattgcagagaaaagagaatgcttatacactgctgctggaaatgtaaattagtttagccattgtggaaagcagtgtggcaatttcttaaagaacttcaaacggaattaccactcaacccagcaatcccatattgggtatattcctaaaggaatataaatcattctaccataaaggcacatgtatgcatatgttcagcacagcagtattcacagtagtaaagacatagaatcaacctaaatggacttgatatagaaaatatgtatcatatgtaccatattcaggccacttaaattgacgtagattcaacctaagtcgactggataaagaaaatgtggtttatatacaccacggagtactacgcagctgtgaaaaagaatgaaatcatgtcctttgcagcaacatgcatggagctggaggccgttattctgagtgaactaacacaggaacagaaaacaaaatacagtatgttcaggtataagtgggagctaaacattcagtacacatggacacaaagaagggaaccatagacattgggacctactcgagggtagagagtgggaggagggtgagggtcgtaaaactacctgttacgtactgtgcctatcacctgggtaacaaaatacaccaaatgctcatgacatgcaatttacccatgtaacaaacctgcatgtgtaccccatagtgctaaaataaaaatgaagaacttggtagttccatccaatttgttttaaaaaatgtttaataaaaaaaattttggagacatagggctaaaaactgatcaaagtaatatatagaaagtattagtcgatgatatcaaagtaatgtcgatatatctaatgtaagagatcaaagtaatatattctaaataaaacttagatttgagtcatttgagagtttaccccttttattctggagtggcaaagggacatgcccaaggccactaagtagggcctgaatcccatgtcatgatcccagtgcctttttcctttccatgtgatcatacttcttcctttcatacctttaagtcaattatcttccttccttagaatgtgtgttgaagttttgaataaagcataatagacatgaatgtatttttatgctttcctaatttaagctgtttttctccacattgcctgtgatgctagcacctcttcatgaactttcctgtcctctcagttgtaccaggcttttgattctgccagatgcagcgggagagcaattgctcttcctaaagaaatccatagytggctttattttcctcttatcttttcttgccatggtaaacttttatggtcatttatctctgtcataaaaatgaatgttgtacgtgtaatctttcctgtcttaaattatatgacatatactgttcatgtctttgttctagtttcttttatgtaaatgggcattttggtttatgaagaaagatttgtatcttatttttttcctcctggctttagacatcttataggtgagtcccttagagttttggatcttccttgcaggtccctctattcctgatatctaagactaatcttataccattaaaatgaataatgacccttaaaaaatggaatcctcttctcacgtaggagagtcaggagaggctagaaaaagttgctgtagggttttacctcaacaaaatagtaagcatttgaaaggcaattcaagcagtgtgctttggccagagaaatgtagcatttcagagtaaaagggatttttaggcaatttgtatatatatatgcacttgacatataaagcccttacactgctaaccagtggtcagccaatccttgcttaacccatgctgaagaccagaaaatcaggagagcagcctacagtaatggggggaacttgtgcttttaatcaggcaaatttctgtatcctgactgcaacacacacatgttgtgaccttgggcaagacccttgactctctgattctccatttycttgttgtggtctcattagagaattaaatgacatatcaactaccactattctcatctatcacatctgagctgaaatatcttccactggctctcatgtctttcttctaaatcttcctcttggggtcatacagaacacggttgtaatctcactagctatcttctaggtgtgtttaatttcaagtctcaactctctctagggctgtccattatcttttatgtgtttgaaagctgtgcaatcaaaggacaatggagacagaacattggtaagccaatgtcaccttcyagcattctctgtgatctacctgtattttactgtgctgtactaactttgtgctatgcaactgtgctgtactaactttgtgctatgcaacagtcactttgtgaacttgtggtatttgtgaacaggagctcaaattaaatattccatttcagtcattaactgatgtgaaaaactcttccttttctggatgaaactayagatatgtttgggcaaaggagagtgaaagttgatattgataccagacactttacagctattagaccttacacctaaatccttatgtctaagatttaaagcacggtcccttacataagcctgtttcatttgctaccgataataaaaatcctgtcctaacacagacaagtgaaaaagtaacctcacatgcatattctgtttcacactcatcttgtgtatttactcttcacgtgtctcccaaatccaaataaaaggtgagacctagagagacacatgttcacacttgtcctcttagaagcatgtagattttatgcatgatgtccccattattgtaaatggagtgcacaaagataattcagcaagtycttatctctcagtgtctcaattatgaatagtttttgattcagtgttgccctgagggcctctgaggtgggtagagaaaccgtctgtctccagattctggactgttcccaaggtcttggcttctttcttcccatcgtggtcattgctgttcccaggttctgtgcctgcttctggacatcctcatcactgtccccactcctttcatttttcccttcatttttctacagtctcactcgtatttgtgtttggttttgatagtgagactgaattttgtttcygcttaaatgattatcacrctttatatatttcattttttgattttgactcttagcattctttcatgtcagatgtttctagagaaactctactttgcgtaatttagggaccccagagtagagcaawtccagtttgaaaatattctaattttggcttttaaaaacatgtgaagtgtgaggatgaaaccattagagcttgactttcttagaaatttgtcaagtatatatttaacaaatatatacgattgcgttatactttatttataaactaaatgttctttaaccatgaacacctggtcaggtgtctctagtggctttaagtaaagaccacttcatttaccctcatgtggctaagataatgcctcttgttgtgcttcaggtttgttatgtgaaagcagtccacttctgagattagtttaaaatgttctatttaaaggctgtttgcatggccccatttaagaaattaggctatgcaaatccaacctgattacgagattcagttttaaagaaatttgaagtgcatttgagactctttgttaccatcgatcttagattttactggaatgaaaccactgagcttcaggcttgttaggtttcacttaagaattccatttccagcatcaatgttattacctttcattctgagtcctaagtgaccaagctattatttttctccctgttcagcaattgattttgttgccttgatatacttttatttgtcagtttatttcctgctgccatgattcttactcctatcaagacattagtttttgtttctaatgtgggtaaaatgtttaggccagaggttctgctgatctatgattctctagattctgcaggttgaagtgtttcccagggcttgcttatttggggaccatgaagaatccatttggcctgaaaaaagcttggtttatttgtatactacttgtaagataagtcagtcctttacaatatcctgtcgtggatggaatagaccactcatgaatagaaaacagagtgtattaaagcctttaatcaagaaatcctaccaaattcctaatcgcagatgtaagagcatatttcttgtgtagcaagtccatgaaaccaaagggctgatccatacataaatgtgtgatacccctcagcagagagagatgctccagatattaggctgtttttggtgctgtctctaacatgcaagtgggctgtgtatcattggtctcttttcctccgatgtgcctagtagagcatcctaaaggagcttacaactgaagatgaaaactagcatgtgaataattacatgttacatataaagaaaacgtttctcattatattaacataaatattatatatgtgtgtgtatatatagtttaacttatttgtattacacacacacacacacacacacacacacacamgtttaacctgtattctgtctcccctgttactttgcttattttagaatatggcaatattttaatattttggacagccaaactgacatttattcaatatattgagttcctagtatgttccaggcactgtggaagggtgctgaagacacaaagaggagtaaaaatatgcatccttttcttaaatagttggaagcctagtgagggagatagaaatatatrccattaacaatagagtgagggcagtacccctagaggccctataagtacaaagtgctttgaatccttagaggaaggagtggtccttatgattggagtggaattgtctgggaaggacttgctatgttgaagagtctgagtttcaccctaaaatcagttagggaactgatatggtttggctgtgtccccacccaaatctcatcttgaattgtagttaccattcaattgtgagtgagttctcacaagatctcatggtttaaaaagaggctttcctcccttttgctctgcatttcttcttgctgctgccatgtgaagaaggatgtgtttgcatccctttctgtcatgactgtaagtttcctgaggcctccccagccctgcagaactgagtcaattaaacctctttcctttataaattatccagtcttgggtatgtccttataacagcatgagaacggactaatacagggaccattaaggaattytaagccttggagtgttatggtcaggtattccttctagaaagttgatactgtggactgcaatttaggaatgagaagctagaggaatttttcaacaaattaaaacaatgaattactatatgatgcaggaattctacttctagatgtagactcaaaagaactgaaagcagagacttgagcagatatttgtacatccatgttcacagcaacattattcatgatagtcaaaaggtggaaaaacccaaatgtggataaacaaaatgtggtatatatatgtgcaatggcatatcgttaaaaccttaacaagggataaaattttgacatatcctacaatagggataaaccttatagacattataccaagtgaaataagccaatcctcatctttgaagtgtgataataatagtacagctctctcctcttatctgcaaggggtatgttccaaaatccccaatgtatgcctgaaactggrtattactgaatgctgtatataaattagatacagtaggagattcacaacaataactaaagtagaacaattataacagtatacttaataaaagatatatgattgtgcacattcattctctgtctctcgctctctcagaatgactgtgggtaactgaaaccatggaaagtgagatcacagataatggggaaaaaattgtgtctatttaataaaatgacagggtggtggccctgaggaataaattggctaactcatgtaaggtgcttcaaaggatgcctgacacagtaactcctcagtaaatgtgagctgctactgaagtacttttgttaccactactaccattagtgtttttttatttgaagaactaacttaaatatatgacatattaatcttgtttccttgactttgatgggatgtcttatttttaatagctttattgtggcattcttcactacagtaactgtacttatttaaagcatatagcatgataagttttgacatatatatacatctgtgaattgatcactgaaatccagaaagcgaacagaatccattactttctcaacagaacccaatgctttctcaaatcccttggtaattcctccatttccccagaygaccaatgttattctttctcttaccatagattagtttgagttttctagagttttggatacctgtaatcatataatattgtattcctttttgtctgacttctttcaatcggcataattgttttgagactccatgtttttgtgtatataaagttaattcctttatattgccaaatagtattccattgcatgaatataccacagtttgtttatccataagcacctgttgatggatgttgggttgttttcagctttggagaattataaataaacctgctatgaatattcttgtacaagacatattcttttaatggatgtatgttttctttagggtaaatctaagaatggaatagctggattatgtggtagatgtatgtttaacttttaaaaacagtactcaacagttctacaaagtggttgttctattttacaagccagcaacagtgtactagagtttctgttgctctacaccctcactaatacttggcatggcagactttttagttttttccactctgataggtgtgcagtggtatgtagttgtagtttttaattggcatttccttaatgaccaatgatgttgagcgtctttttatgtgctttttttgctattcctattttctttgatgatgtatctgttcaaatctgttcctcatttctctattgggtgattttcttattgtttctttagatttgagaattatttacatactgtggatacaaattctttatcatagatatgcttgtaaatattttctccacatctatggcttgactattttcctaacagtgtcttctggggagcagaatattttaattttgataaaaatctagttcatctaatttttcacttgtgatttataatcttggagacatctctaaaaaaaactttgccgaacccaagtttacaaagattttttcctatcttttctttcagaagtttcatagttaggtattataggtagacctgtgatcagtttgtgctaattttgtatattactgaaggtgtggattgaatgttttttgtttctgcatatgaacatccaatttctctagcatcatttgttgaaaactctggtctttcttcactgtattgcctttctatctctgcaaacaattatttgtcctacatatctaagtttgtttctagattatttattctgtagcagtgatctatttgtcttttctgatgccaatacctccttgattacagtagctttatgataagtcttgaaatcacattcatctaagttgttttgtccatctatgtccttcacagtgttttcaaatggatttagaatcagttaatcaatctgttggtctatctgtatatccatccatccatccaaccacccacccacccacccacccactcactcatccatctcactagctataaccttgattacaatgtccaatagaaatagtaagcgtgaacatccttgtgaacattcttgccgtgttcctgatcatagagaaaaagcattcagtctttcaccattaaggatgatgttagctatacatttttcttataggccctttttaaagtttaagggcattcctttcccttcttagtgtgctgggtttttttttttaaatcaaaagtagatgttagattttgtcacatgctgttgagatgatgatgtagttttcctttttagttttttaaatgtgttgattgatgttttgagtgttaagctaactctatattcctcggataaactccacttatccctctaaaatttgtagaatctgtagtgatatcctctatcatttgtaatattgataatttatgtattcttttcctgtgataagttttcctagagatttatcaattttattgatcttctcaaataacatgcttttggcatcattgacttttctgtactgtttttctattttttatttcactgattttttggctttgagctttattatttcctttcttctgcttgctttggtttaatttgcttttccttttcagtttgttaaggtcattcgttttgagacttttattcttttctaacacagatgttaggtggtataaatttcttcttgagtactgtggtagtgtcattccacaaattccatgttgtattttcattcagctcaaaatgcattctaattttcttttgatttctttattaaccagtggattatttagaagtgcattattaactttataaatatttggagattttccagagatctgcttttttatttctgatgtaattccattgtggttagagaaaatacgttatagaacttgaatccttttaaatgtattgagaattattttatggtcaagaatattgcctgtcttgtatacgtttcatgtacacttcagaataatttatattttgtcatcgttggatggagtcttttataaatgttaataaagtcagtgtggttgataggatagttctagtctactatgtatctgrcaattttctgtccatttgttttaattattgagaaaagggtactgaaatcctcaactttaatttaggattttgtctgttttacttgtatttctgtgtttttgcttcatgtattggaagaaataatattgggacataaatactaaggattgttatatcatcttgattaattgagccctttattagtatgaaatgatggttttgatccctagaaatagtccttactatggtgtattttttacttgtgttgacttgtgttactgtgtgtgtctttttccattctattaccttttttcctaacctattagtatctttgtgtttaaagtgtttgtaggtttgtagtaagcaaatatcgttgggtcttcatcttttatccaatctgaaaatctctgccttttttatggatgtttagaatatttacattttaatatgattattcatatctttaggtttaaaccagtcatcttgttatttgctttctatttgtttaatctgttatttattcatttcctttgtttttccctgcctttttttggattgagtattttaatgattctgatttatcttccttgatcttatattgttcatagctatttgtcctgctactttagtggttggtagtgcctagatggtctataacattgatctttaacatcacagtttaagtgatatttagtacttcacttattgcatacaaaccttagagcagtatacttcatttctgtctctcttggcctttatgttactgttgtcgtatatatattttacttttagctatattataaatccctgagtacatagttgttgtttttgtttgaatagtcagttatcttttaataggttttaacaacaaaaaaactcacatatataacctgtaacattttctatgcttttaatttctcatgtagatccagattttcatctggtatcatttgttttttgcttgaaggactttctttaatatttctttctcagtggttgttgagtgatgaattattccagcttttatatgtctgaaagtaagtctttatgttgcctgtgtttttggaaggtgttttcacaggatatagaattcttggtagacatgttttgttcttttagtgctttaaagatgttatcaacagtctttttgttttgtattgcatatgcagtattcatagctctcatcctttgtatataatatgtctttttttctctagctggtatttaagatttttttccttatcactggttttgagtgtttgattatgatttctttcttttcttttttttttttttagatgkgttctcactttgttgctcaggctggtcacaaawttgctttgttgtccaggctggttatgaatatgatttcctttgatgtaatttgcctagtgtttcttgtgtttaggattcattgagcttcttggattcatcagtttgttgttttactgaagtttggacattttcagccattactttttcaaaattttttttgtctctctccaattcttctctccctcatgaacttcacttactcttctgttaactcactcgatattgtcctatatctcactgattattttctttctttttttgattcattttctccatgtgtttcatttttggattgattttattgctaggctttaaatttcactaatcatttttcctgcaagacctcccgtggttaataccatccagcatattatttatctcagacattgtatttttttatgtctgggaattatacctcatarttatgtgtatatataagcagctgttcctcaactcataatgggcatcgcattatgtccagataaacctatcataagttgaaaatatcgtaaattgataatgcatttcatacacctaatataccaaacattatagcttagcctagcctaccttaaacatgctcagaacccttacattagcctgtagatgagcaagwtcatctaacacaaagcctattttgtaagaaagtggtgaatatctcatgcagtttattgaatactgtactgaaagtgaaaagaagattggttgtgtgggtgttcaaagtattatttgtactgaatgtgtatcacctttgcactgttgtaaatttgaaaaatcttaagttgaactatcataaattgaggactgtctatgtttgtacgtgtgtatgtatatattctacatctctatttaactttttgaacaaatggaaagtaattataattattttaatatccttgtcaaacaattgtatcatctgtggcattctgagttggacttaattggttgctttttgtcatttggatcttttattttttgcttctttgcaatgcctaataatctttagttgtacgatattgtgaattttacttgacttagggggctggatgttttaatttttctataacagttcttggtctttgttctgggacacagckaaattacatggaaacagttttattcttttgggtcttgcttttaatatttgctaggagggaccagagcatcatttggtttatagctaaagcgccttgctttgcgctactgagatgagacctctgaattctctactcaattccaggtcaattataaggttttccagtatgtgcagtgggaataggcactcttcctggccccatggcagtgtgctgagtactgttccctctactgtttttggatggttcttttctcagtcttggttagtttcctcacatgcatgtgttgatcagaactctactgaataagggaaacattttatagatatcttgggttctctctcagtgcagctctattcactctggtatgctgtcctgaaaatgctagtcaccttggtggtctcagattctgatctctcttcactccattcgcctatgttctctctctttgcattgtgacctggaaaatctctcaaagcagtaaactgggagagttgtagggctcacctcatttgtttcctctcagtcagggatctctgtctttcatttcttgacactcattcttaaaaatggttgtttcttatatagatagattcatacatacatatggttgattggttggttggtttcaggcaggaggttaaacctagtccctctcactccattttgcccagaactgatggcctgctttttatttcgtcagaacctggtagctatctatatctttaaaggcgttcattatggtccagtgggaacagcaatataaagctgaaggtctcatcctatttctaccaattaccagctgtctcaagggacagacttgtggagtctcctattcggaaggtcatgtggctgatcatccagtgccgcataaatcgctttctgtacrttctctcttttatgctgtcacatgttgggcagctctcccttttgaagaacacatttcgtattttgggtatttctcatcattcgaaacatctttttcatattacctgaaatcggtcttttactaacctccatccaaatttgtctagcaaagtcatatgaaattaatcttttttcccacacagtagccccactcttatttgagggcttttgccctcttccttcccaagtcatctcccagagtaaaaaccttttgatctctgtgagcttcagttgtctcatctataaaatgtgctatttattttaaaaaggattcctgtatctgtgagtgcctcctttactgagtcagataccatgccagatgctcaggatgcagaagagaatatgccctctctgccttccagggactcagacaaagcgggggaagagaagttaaatgatacagcgcacagataaaattgctaacagaagtatgccaggcatgctgggcaagtcataggattttatagatgaaattaatggaagtatgtgaaatgtactctatgtgctgtaaaggwctgtatgtttgattatgtttgatattatttagtagtagtcaaagatgtactagcagctgctccatacccattatttttttctggagtctgttatgctttgaccttttcggtgttaaggttctgtgtgaatcctctgggttccacataattaataagttttagtgtgtgccaacagggggtggaaacatgacagtaagttcattttcttcctgctgttgcaggttatttgggcttggctcttgtaaaagacaacttgtacccagtgaattctcacatgaattcawatcttrtaagctaggaatactgtaaatctctactgatgcttgactgagtaggactttacaactccagatggcagttgtaatactttagcatttaccatacagagaaatagaaaacaattttctgaagaaagcagtgacaaaattccaatatcatggttttgtagcactagttcatgccatcctccctcacacagtgttagaacttcttatcgtgatttatcaagcatttcattacattgccaacgatatgaaaaacaaaattaagaactgctgtatactggtgtggcatggtgctgaagtcaggctttgggaaagtacacaatgtggcagcatttcttaaaggcctggagacsgtgttaaaaatgcagattctggccaggtgcagtggctcactcctgtaattgccacactttgggacgccaaggcgggtggattgcttgagcccaggagtttgagatcagcctgggcaacatggtgaaatcccatctctaccaaaacaaccccacaaaaattagctgggcatggtggcacacacttgtagtcccactgactcagggggctgagatggaaggatcacctgagcctgggggagatcaaggctgaagttagttgtgatcatgccactgcactccagcctgggtgacagagtgagaccctgtctgaaaagaaaatgctaactcccaggccccacctccaaatattcttatttagcagttcaagaaagtgggggctgcattgtacttttaattagtttctggatgattctggttcaggtgggtcctgctttgaggaacactggtggagggagtgaccatgtgatataaggagaatcgattttccttcttcttctgcgtgtgaccttgtatttattctgccatccrctataacttctgagggtttactttttatcaggaatttaaatcctaaggtgtcataaagatgagttaaaatggttctgttcttgaagtatcttcagtgtgacctgtctggtttagtcagggtagctgtctgatcttgaatgggttacttttaagctcactgcatataattggaataatatggtctacctaatcttcaggagggttgttgtgaaaaccaattgaatgtcaagtgccttgcagtagtcatagcaaatactacttagtcctctcttagcattaattgtgccaatattacttctttccaaagcggttcaggtatctaaataagattctgaactctaacacttcaaacattgtaaagtgatacatgtgagttaactatttatagactgtttctaggaactgccaggcctaattccagtcaatgttttcatgatctgccaaattcagagcagcttataaatatgaagaagggacagaatcttgtctagagtataaagttaagctattggagtcaggtacatcatgtccttctcagtacctttgaaagtttttggctgggcacaatggctcatgcctgtaatcccaacactttgggaggccaacgtgggaggatagcttgattgagcccagcagtttgatcccagcctgggcaacataacaagaccctgtctctaccaaaaaataaaaaaaatttatcttggcatggtggcatgcacctgtggtcctggctatttgggaggctgaggtgggaggatcccttgagcccagaagttagaagctgcagtgagctatgattgcatcactgtactctagtctgggtaacgaagtgagaccctgtcttgaaaaaaaaaaaaaaaagttgtaatgcccttgtgctactggtatttaaaatgtaatactgtgtgaagaatcatttccacacttgatttcatgtatcacctgtgtatatataataataaactataaattatatattatttttgataagtagaatttctttttatttctgtttactaattaaaaaaaacctcctctttatttttgatgtgttgaatatcctgtttataaagttgtagttgaccaaaacaaatacacaaaatcatcagtgacaaagtagtattaaattttatcaataggaagaaagatgtttactttattttgcttgattctcaaattttaattttagcaacatcccctctcccaaataaatttagtaccggagacacgatgcgtcaaagaagttgtcccaaaagagaattaactgcatcatcttatgcctctttacagacaggaggggacaaaagaagaaagttacttttctaacatgctttcgatacttagattgttaaaagaaaaaccttaggcaaattaaatttaacagagttcgactgagcaaagaatgattcgcaaatcaggcagcccccgaaccaaaatacgttgaaagagctttggcctgccttgtggttgaggaagatttatgaacagaaaagggaaagtgaagtacagaaaacagaaatgaggtaccgagacagctggattggttacaactcagcatctgccttatttggacatggtttgaacagttggcagcgcttattggctgaaccctggtgattggcccaagagttggttacagtctgtttgcacatctagttaggttacagttcactacctgctaagaaacctttaggctgaacctaaattatataaggaggcagttttaggctaagctcaatttaacaaggtgaaataagatataaggaaacgtaagaaaaatgaaggacttaccactcagttttctaaatttaacttttcagaaagcctaatggtcttggtattgaagatgcatacctatctaaactggtggttcttgacttatgagccatgatgtgcttttaggtgagccaccaaaatttgatgaatgtggacaattakcgtttgctgcagtggtcactacagtggctttccagaggaaacattttgattggattgagtggtagtgtgttgtggagcagggtacgacttgtggcacataagacatgggaagccttatagactggttaacaaaacgaggtcagtgtttcaggccacatctgctctgctttctgaactctcgcactctcctctggctagttcctgcctgcttggtcctgagtctctttgtggccctctagattggcagcttggctaaactgactgcttggcttttgattttgtttttggctcttagaagtggacccacccactccaatgtgattgagaaaattaacatcgaaatggccacatccaggggtttctatggaacttgaccatttcagggtttatttcaggattacaaaagtaatatgtatttattgggaaaagtataaaygaacaaaaggaaatttaaacaatctatattctctcaccagagakagttttgatatataaggacttagttttctgttaatcttttttatatgtatattttaacaggatcatactaatgtaagcctgatttcttttaactttactacatataataaatatattttccatcattttaaatggttgctgtgtgttccattaaatgaatgtaccataccatattttacttaaccagtatagtttttctggtaatttttttggaaaatttctctttaatttcccattaccattccacctaaagaaaaaaagtatatttttatgggcagctatctatgcatgcacttaccatacatgttcctcactatatatttgtagctttgaatccctggttctcaggccttaagagttggactgagccatactactggcttttctggttctccagtttgaagagaggccttcccagcctccgtaacacwtgagccaattcccctaataaataccctctcatttatctgtatgtgtatatctcctattggttctgtttctctggagaaccctaatataaccactaataggaaaattaggacaatgagatgggggttagttctggagagaacccagtggaggtgtccgcagtgaggtgaggtgaggttgatagttaacgctggtgcctgagacacatgtatgattttcatcacagtagcgaaggattcactctctctacgttgctatatccacttgtaagtacartttgtaaactctactttggaggaatctgaaggtggtgaggaagtgaaagacctgcccaaagtgacatacccagaaagtggcaggattgatacccaggaagtgtggctttttgggcttcctgtctttaagttaacctcagatctgttctttgcctgccaagagaaggtaaatatgattatgaaaatcttctgtttagtaagctttactggtctctacttttagacaaaatgtcagttgtctgtatatgcagtaccaatatattgcacatacagaaaacttgcatatactgacatgtagttaatgtctcaatactcaagagaaaatattttctccatgcaatggtgaacattcatttactgttggaaatagtcactgcatgtttgcactctaaacctttygtgattgagtgtggcaatgagtgtgcagtaaaatttttttttcttatttttttattttattttatcattattatactttaagttttagggtacatgtgcacagtgtgcaggttagttacatatgtattcctgtgccatgctggtgtgctgcacctattaaaatcatgctgcagtaaattttttttttaaaaagaattcctctatttaccaaatagctcatcggagtttacatacctctggatcacttcccttcagcatctgataaggcttatgcatacattgtcacttattttcttcataaattagccattttcttctgtcagtaatttatgtccatatctgactataacaactaggattccagtaggatgtggcagatccaggtgagagatgcatatccagggcaccctaaatggaattagctggttctttgtgtcagctcattatctcagcttcactgctgatcctttctctcacagatgccttgaatctaaatcacagtgcctgcttagtaattttacttaaattgtaaaagatgactagcactrtacagtcaaagcacatttaaaacacactcacagtttgttttctgtgacagaaaacaaaacagaaaaatgttttccagatgccagtgcaagcttattgcattggtgtagataaatggtctttgtggattttatttgcttcatatttgtacaaagctttcataatgtactgtcacattctcaccttaagtattttttatgttttttatattagtgtkcatggagccttctaaaatttcttctatgttcactatttttaccaaacttcaatatattatattttcagttaaaaaattagaatgaataagttctctggttgttttatgtaattaatatcacattatttttgccttcagtatcatgtacatggtacatgtttatgagctgttattaataatttagcaacttctttctaaacaaatgattttatacatctttcatatatgaacctaaatacagagcagttcactgccaggtgtggttgagaaatgtatctcaataatttgttgagatgaaatctgttaacttctcctaaactttcaaactgtgtaacaggagggattgcctctatttaacctttaatggaaaggtcggtttcagataaagtcttttgacaaacaacatcttttcttcatgactctgtctcagaatttccttgctaccactttgatcttcttcgtctatttgcctgaggatttctgctacctatgaagacttgcctccattgatttttgtgttttttttctctctcccagagtgaaaaggtacatgcctttcctgatttgcactttgaatgtgtcatcctagtgtcatctggcctccattgttacagataagaagtcatctgttcatcttattgtgatgccatcattacataatgaaattcataatttttctcttattgatttcaagagtttatctttcaacgttttgaagtgtctggtgtggttctctttgagttttttgtacttgtaattcattgagcttctttgaagtatagattagcatttttcatcagtttggaaaatttttagctatgatttctttgaatattctttgtacttctttctgtctctcatctccttcttgtattttgattatgtgttggtttgctaactgctatcccccatttctgaagccctgtttactttttcttctttatttcctctctgttctttggatcatctcatctgccttcatgtatcatcaggtttgttgattcattcttttgcccatgcaaatgragtgcttagcccttcttgtgaatttttcatgcaaatttttatactcttcaagagtcccatttgactcttttagaaaataatttgtgtttgtatttatatcctctatttgataagacattgtcatcatgccttactttacttccgtaggcatggttttcccttagttctttggacatatttaaaatgactactgccgagccatatctgctaattccaacatctgggccctgaaaaggaagtgtctgttgcctgttttgcacatcccccctccccccgtgtatgtgtcacattttcctgggggtgtgtgtgtggatrtgtgtgtgcatgcacatgcatgtgtgtgtatgtgtttgaatgtctcataattccttgttgaaacctgtacattttagatactatggtaactctggatattgatcctctccctcttctagggaaagtttcttgaagttgttgtttgctcatttgtttatttgtttagtgacttggctttactaattatttgaagaatatttttctcactctgtgtggcccctgatgtccctgctcaaatttgtttctttgtgtttatctgttagtgtgggttcgtaggagtcacccctgggtctgcctaaatcatttattgatcaatatttgtgcttaagctggcttagccagttggatgtatgcgtggctttcacggttcagggaatttatacttttgtcctgagttccacaaggctctagtagataagtggttctttctccattctctcctgagagggtgcagcatggacatccatacagtcttccagaccatgataggtgaatgagattttattttattttaactcccttcctaggagtcacccctgggatagagtagcttaatgttcagcaagtatttggtctaaggttgtgcttaagcccctcaagttagtaaggcttttgcattttgctgatggatctgtgtacgacttgggaaattttttcaagtctgttccacattccactcgatttactcctgagtagaaataaaagaggtgtgcattccagggcatgtgcttagccttctttgtctctaggggtgagtgtgattccaagagcactcttctttggtgtctctcagtttccttggtccaccgtttcacttattgttactgttatcatgaagctaccaggccctgcataactgtgtgccaccaaaatctccattgtttttgacaatgctcttaggcgtgaacttctcccctctttgttccmaataaagtcagtctcctcagtcagcaaggcagaaggggagctccctctgtcctcagggcatgccatttctcytgcacagaatctctgtggcactgagtcagagttgtggtgatggtggctctggtctttgtagcctgcctctcttcgtgtggaatgtctaccctgtgagtgagctggggttggggttttaagggccccagtattctcagactttgctcttggcacacagccttgctgcacaaatgggaactgaatggggaaaggagacagagtcctcttagcagcacctgccaagaattgtgcttccacaacacatggctgggggttgaataggcagcgagaggcactggcagcctgcccctttcaggtgaaactctagccctagactaggagctggggagagtgggaacccccgtgttcttggccatatcttcccatagcaaagtttccatcacagagctggcagtaggggtgtagggagggtatgggagcaagtcattgctccagtgccacagattcttgccattcttaccaagatttagtatattttcttgaagagatgtttcttcacttgctgtatgcccttaggaaaatttccagaaactttaaatgtttctttagtttgttttaagtaattttcaccagttaaataaatggtggttgcaccaagagaggatctgctaatctcacactgctattccagaagactccccttcttggcgtggttttttaaggcttttctccagcagagtgacatttagcttatctgatgggctaatccttcattgtcattgaatgtgttcatcaggctgcgacctcttatatctttgtgttccctgtctccagtaatatgaatgctacttcatagtaagtactcaataaacgtctgaatgaatgaatagatactacatttttaaagtgatgtgttgatttttattcacaaggagtgatgcaaacagtgtggactttgggcactgtagggctttgctggctgtggaagtaggttttgactctgctgacccagcataatcatagtgagctcgaatgtttaaaaatagaaggggtatgaagaactactacacracacacgaataagaagagacaacccaatagcagaacaaacaacagtagcagcaacaacaaaaaatagatgtgtgatatgcctaggcaggctataaaataggaagcagagaggatcaattagcattaaagatattccacctrtcaggaatatgacatttaaaacaatgatgtatcataaacttataatcatcagatttgcaaaaattaaaaagtctgacaaagtattggggaagatgtggagaaacagaaattttggtaaactkcagataggactataagttggtataactccttcggggaggaatgyagcagtaacaaaataggttgaatattatatagtcacacactagacacagtaattatactacaaggcatagattccagggaaaactgtcactcatgagcagcaggagacattaatagagagatgcttrttgctgcactttttgtaatagtgaaaatcataaaacaacccaaatakgtrtcagtggggaaatggagaagtaaatgttaatatagacttacagtggaacacgatgcagcagttaagatgaatagtctgcctctacagagagcaacatatataagtttgatgggtaacaagttacagaaggttgtataaggttgtatgcggtatrgtattttatactgtttatgtaagttaaaatacagcaaataagtttttgttgtttatggataccatagcacaggtgtcaactatgtaaagtgtgtaggctgtttttgaacagctcacaagctaagaatgaygtttacattttaaaagtgtaaaaacaaccaaaacatgttacatagactccacctgaccctcaagttttaaaatatttctatttgctcctttactaaaaaagttttctggtttctgcagtacagatgatctgtgtgcccagggccatgccctccatgccctccagcccaagcttggtagacagctccctgaaggccacctctgactttcctgccccaggagttattcytgtgccttggaacttcagttcttcctgggggcagcctgaaacatcagggattaacacactggaggcaaccacagccactgggaatgtgaatcagtggatgacgatttccatatcttcctcttcaaccaaggagcagtgctgaggcatgttcttcatggtccctcacagggacccagcagaattgagccattttgcctaacttggtgaccggctccagaacatgccctttactgaccttccctttccctgccccacccctctcttctggctccttccctctgtttgctggaaccatcacccagataatctgctgtcccttcatcctcattctaggctctgctttggaggactccagactaagacagacatgtgggcagtaaaagaataaaactgccattgggaaggagactggttatctcagggaagacaggaagcataaaaggggttttcattgtatttgttacatgttatttctttatttgaaaatatctgcaataaatatggcaaaatgtttgctttttaaaagctgggtatttacatttttgagtttgaaataatgtaacagatttctatgcgaatctagtcttcctccttgacttttcattctttaggaacctgactcttgtggtgcttaaaatctggtttctaccttggcacattcatcatatcctgaggaaaattgatttactatgagaataaaggaagggtgtatgtatttaactaatagaaaagatgaagtaccacagcaattaaatcaaaagtggcttttcctccattattttgtgcttcataatataacttactcttccagcagaatggtggtggtatctaaaaccttctacttacagatactcttctgaattttatttttaaatttttaaaattatttatgtatgtatgtatttatttttattatactttaagttctgggatacatgtgcagaacgtgcaggtttgttacataggtatacatgtgccatggtggtctgctgcacccatcagcctgtcatctacattaggtatttctcctaatgctatccctccccttgctcccgaccccagacaagccccagtgtgtgatgttccccttcctgtgcccatatgttctcactgttcagctcccacttattagtgagaacatgcagtgtttggttttctgttctagtgttggtttgctgagaatgatggtttccatcctcatccatgtctctgcaaaggacatgaactcattattttttatggctgcatagtattccatggtgtatatgtgccacattttctttatccagtctatcattgatgggcatttgggttggttccaagtctttgttactgtgaatastgtggcaataaatatacatgtgcatgtgtctttatggtagaatgatttataatacttttggtatatactccgtaatgggattgctgggtcaaatagtatttttacttctagatccttggggacttgtcacactttccacaatgacaaatttatactccaactaacagtgtaaaagtgttcttgtttctccatatcctctccagcatctgttgtttcctgacttttaatgatcattattgtaactggcatgagctggtatctcactgtggttttgatttgcatttctctaatgaccggtgatgatgagctttttttcatatgtttgttggccgcataaatgtcatcttttgaaaagtgtctgtttaaatccttcgcccactttttgatggggatttttttttcttgtaaatttgtttaagttccttgtagattctggatattagccctttgtcagatggatagattgcaaaaattttcccccattccgtaggttgcctgttcattctgatagtttcttttgctctacagaagctcttcagtttaattagatcccatttgtcaattttggcttttgttgccattgcttttggtgttttagtcatgaagtctttgcccatgcctatgtcctgaatggtattgcctaggttttcttctaggatttttatggttttaggtctgacgtttaaatctttaatccatcttgaattaatttttgtataaggtgtaaggaaggggcccagtttcagttgtctgcatatgggtagccagttttcccaacaccattgactaaataggtaattctttccccattgcttgtttttgtcaggtttgtcaaagatcagatagttgtagatgtgtagtgttatttctgaggtctctgttctgttcattggtctatatatctgttttggtatgagtaccatgctgttttggttacggtagccttgtactatagtttgaagtcatgtggcatgatgcctccagctttgttgtttttgcttaggattgtcttggctatacgggctctttttttggttccatatgacatttaaagtagttttttctaattctgtgaagaaagtcaatggcagcttgatgggaatagcactgaatctgtaaattactttgggcaatatggccgttttcatgatactgattcttcctatccatgagcatggaatgttttcccatttgtttgtgtcctctcttatttccttgagcagtgtcatgtacttctctttgaagaggtccttcacatcccttgtaagttggattcctaggctttttattctctttgtagcaattgtgaatgggagtttactcatgattgggctcwctgtctattattggtgtatgggaatgtttttgattttttgcacattgatttttttaatcctgagactgctgaagttgcttatcagcttaaggagtttttgggctgagatgatgggattttctaaatatccagtcatgtcgtttgcaggcagagacagtttgamttcgtctcttcctgtttgaatacactttatttctttctcttgcctgattgtcttggccagcacttccaatactatgttgaataggagtggtgagagagggcatccttatcttgtgccggttttcaaagtgaatgctgccagctttttgcccattcaatatgatattggctgtgggtttgtcataaatagctcttattattttgagataggttcaatcaatacctggtttattaagtgttttagcatgaaggagtgttgaattttacaaaggccttttctgcatctattgaagatactctcctaaattttaaataacaggtcaaacatgatctaagttgctctaaatatgacgtgaattgatggtaattcaacaaagtgcaaaattttcaggaaactatagttctttgggaaatttcacttagacttcagaaaattaaatctcactgaagatttcaatatgctgtgtaaggagaggaaccaaaacaaaaggacaaaaacagttttttaaataagtgcacacttaggcttacttagagaacgggatgttyttattagcagatttgggacttgaggcatgcaaaactttcagagagagccatatgttcttatgcatgccagccttgcgacagtcacgattctgtggttctgcagatgaaagcaaaacgttgtatagtccttgtggcaggaatgataccttttcctaaagcagcgtcctttggttatgccaagctgttatttggctgagtggctttgcactaaatatatctagagcgatgttttaaaattataaatcttatgtttctccctgctatggactgaatgtttgtgttcccccaaatatacgttgaagccctaacccctaatgtgatggtatttggagatggggccyttgggaggtgtttaargttatatgagttcgtgagggtagraccctgctgatggaatttgtgcccttawaagaagaggaagaggaaaagggagggaggtggggggaggtagggaagagagagagagagaaagagagagagagagacagacagagagagagagagagcatctttctctctccacacaaccacagaggaaggtttatgtgaggacacagtgagaaggcaaaggcagcgtcatgcaagccaggaattgagcgttcaccaaaaaccaaccatgttggcactcttatcttgggcttctagttctagaaccacaagaaggtaaaattctattgtttaagcttacccggtctctggtattttgttatgacagcccaagctgactgatagactccctcatcgctgttaggatggaagccttagtttagtccaaaggggcttgcaggttctggcttttgccagtgtcttcagcttcatctcaagtgctctctccctccctctctgatttgcatcggtgctggtctcttggaggagctatgctttccctatttaccccctgggcttttggacatcctcctcacagtatcctcagtgccggacatacaaaagacatkcagtgactatttttaaatgaacaagtggtagaaattagaaggtagtcagkttctgacctgtgatggcagaggaggagatactgtgatagggaaacaagcatataaaaaaggcaacacatttgactgttgtgtctgatcatgactgttttaaatgacatgagtgttgagtaggccaactcactttcactctttttttggacttcatcatattctcaayaacaatcataacagcacattaatattaccctttaaaaaataacctgtttaaggtagtactgttggagatggtgaccggagttgttgctaattactctttttttctgtaactgccttttgccctcaaggtttgccactggaagaggcatatctggtgggaaagaggaaaagacaaatgcatggtggttcaggggaatgatatcaaagagaattaattagaaattggaagttaaaggaaggataagcagatcaaattagtatagaggttggtatactgttccactgcctccttgtctgttaatgtattctggagcatatatcaggcctacattaggcactgggaaagagggatgaacaagatcaaaatcactgccttgcaggaactcagaaagtttgtagaggcattcatataaacaaygatagtttaaaatactgtctaacaagtgctgaatggttaggcacaggggccatgggagcacagaggggtttggaagtcttcatggggaatggtataattggcctagtgataatatgattcaataggcctataggcaaaggaaggagattatggatttattattgaaggacagtaaaacctaattgattttaatcaattcttgttcatttccaagaaaatgttcaccaacagcttttagcaatataaacagttatgagaagcaaattttaaaaaatttaaaagatttttgcacactgaagttgcatattgattatagccaacccaaatagatcctttcctgggaacagaagtttgastgggtttggaatcagggtacctgggtttcagtcctctctctgtaacacctggctgtctgaccatagcatacctggtcacttcactccccacgtccttggcagttcttactgctgctgccttccccactcttcagcacaagtgtgtacccgtgggatgatatcttcccatcaaatcataagtttaattctacagtgattcttttttgatgggtggtcagacctcctctttcctacaaccctcaccccatgtcagaaatataatccttcattttgccaaagcaaaacgaagttagactgcatatgctaatgaatgtgtttatttccctctcacattctctttttttaaattttttttatttttttcatttttttattattatactttaagttttagggtacatgtgcacaatgtgcaggttagttacatatgtatacatgtgacatgctggtgtgctgcacccactaacttgtcatctagcattaggtatatctcccaatgctatccctacccatctcacaccagttagaatggcaatcattaaaaagtcaggaaacaacaggtgctggagaggatgtggagaaataggaacacttttacactgttggtgggactgtaaactagttcaaccattgtggaagtcagtgtggcaattcctcagggatctagaactagaaataccatttgacccagccatcccattactgggtatatacccaaaggactataaatcatgctgttataaagacacatgcacacatgtgtttattgcggcactattcacaatagcaaagacttggaaccaatccaaatgtccaacaatgatagactggattaagaaaatgcggcacatatacaccatggaatactatgcagctataaaaaatgatgagttcatgtcctttgtagggacatggatgaaattggaaatcatcattctcagtaaactatcgcaagaacaaaaaaaccaaacacygcatattctcactgataggtgggaattgaacaatgagaacacatggcctctcacattctcttacttaacctctgcttgccagcttagtgaaccagtgtactaaagaactctggtaacatgagttgatttgataagaaaacttaatataggtcccttctagaaaatgcactctcagtmgagaattgcattttgaaatataaatctcaagttcatcactccagttcatcactccataacaggtgcccgcaggcacattattttgcttttcaagatcatctggaatgatgccatttagactaattgccctcaaccctttaatttacctggatttttggaaagtatctttgtttcctcattcagccacatgtttgtctgaggtagaagcattttggaagtttacagtcaccacatccatgagttttcatgtgatgtcaccttgttcttaggtaacaggacaaatattgatgctcatagattgacactaatctcttgcattggtaaagtactttacaattgacaaagcacttactcaattatactgtacagtcttcacataatttcgtgtataactgtcctgtgaggtagcttttagttatccatatattagaaaagttaagaggtaagacattttgcccacagttttcaacctagtaagtagcacacaatgtccattaacagttgaatgaataaacaaaatatggattatccatacaatgaaatattattcagccataaaaggaatgaagcagtgatacatgtcacaacatgaggaaccttgaaaacataatgctatgtgaaacaagccagagacaaaacaccacataattatattatttcatttatataaaatgtccatagtaggtaaatccatagagacagaagtatatgtgtggttaccaaggttggaatggagttgggggaaggagcctgggcagtgaaggctgtaaaaaaattctttttggtatgatgaaagcagtgtaatatttgagtatggtgatgattacataactctgtaaatacactaaaaatcactggattgtgtactttaaacgggtgaactttatgggatataaatgatatctttacaaagtaatgcattcttctttcccctacattccagaactaaaggacaagtaacttcaaaagtgctgcctccgggctcccttcctggtacctattctgcttcacttttgccacrtcatgagaaggggtaaccagtctcttaagtcttttctttctaaatattcctctgtctcttcctctcaggtctcacttgaacaactaaaggggcagcctcctagaatcctggtattcactacctaccactcactggcagatgttgacattagcacattactaagcctaagcagaattaagagaaaaggaagccattagtgccaggttggaatcctgcaataggacttagcacctgtcctcagtttaatgtatgagtataagcaccctgaatctatagaaaatccagaaatgtccattatttataaaatgctccctgtatatttgtgtttgtgcatgtgtgagatttgtatttatgtaagagtatgacatatagctacagttgacccttgaacaatacttacttgaactgtggggtccacttatacatgaattttttttttcaaccaaacgtgggtggaatatagaatattcatgggatgtgagccctgcctatgcagaggaccaactttttgtatatgtgggttctacagggccaactgagggacttgagcatataagattttggtagacacaggggttctaggttctagaaccaatcccctgcatacactgagggacaactctrttggcacagagttgattgaggcagtaggaaatgggaagataaagctggcagctctttccacacatggaaagcataataggaaagaagggcttaagttagcaggtaggtggtgtgggattcagggacattactctgcgtatatgtttcatctattgcagcagcstttcctgttacatacttataccctgtgggggcagyggacaagtacagttctgatacctgagactgtgcgaagaaagcaagccaggaatttgtrtgataggggagactccacaatttctcgtttgattcagcataagcctgcattgttggggtatctccaggaagtcagccccagtgcaggcagcagacctcacggcatagggtggaagcaaagtggagcatctgtcagtgcatagccttcttaagcaatgatgagctgcttagcattcaggacattcagcccaagattataaatgaaatgtgtttgtgtgtttatatgtgtgtgtatgtatgtatggatatgtatgtctgccctgtcactggaaggctttttaaattttttgatttagatcatagaatttctagagatactaattttcaaattttatacctcagacaggaatccatctttctgagttttgtgtagttatatktttggtcctaatttgtcagtaaacaggacttttatttcctccatagagaagtcagtgatttttctgtctggggtgtcttcttgcatgccccctggttgtccatccactttcatgactacctctgcagtctcttcatatctctttcttattgttacctaaggtaaagcttacgatttattattgtatctgtgagcatggtgccagtagcttcctttggcttaggaaggaagaacatttatctcaggatagagcttcactgccacatttggtgacataaaatgctatatggagaactgactatactgaggtgtgaaatacatgtaggaagtctctcaaatacattcagatatccatcggcttgcagtttgtccctgatgttggctttctgtgaagctgaagtgcctaccttgaatggatggaaaaaaactgtccgagtctttgtgccctgtagccgtcaattactgtacttttcatgagcattgcctgtggttccaaatgatatttctataggcagaaagtgagatggaagagggaaatattgtacacaaaaatatgaggatgtgaacagagcaggactgttcacaatagcaaagacttggaaccaacccaaatgcccatcaatgatagattggataaagaaaatgtggcacatatacaccatggaatactatgcagccataaaaaaggatgagttcatgtcctttgcggggacatagccgaagctggaaaccatcattctcagcaaactaacacaggaacagaaaacaaaacaccacatgttctcactcataagtgggagttgaacaatgagaacacatggacacagagaggggaacatcacacactggcgcctgtcagggggtggggggctaggggagggatagcattaggagaaatacctaatgtagatgacaggttgatgggtgcagcaaaccaccatggcacatgtatacctatgtaacaaacctgcatgttctgcacatgtatcccagaacttaaaatataattttaaaaaataagaaaaaaagtaaatgaataaataaatagaatttatctgagaaaaaaatatgaggatgtagttcctattatctgattcctagtgtcctttggatcatgcttattttgtctctaagcccattgtattaacctacatcacatatacgcagtttgcactgctggaagctatcaggctctgtaatactgactctgaaatgattgtttcagccgcaccctactgctacctccttgcccgtcctctgagcttgcttatactcattagggaaacttctttgactgttatgacctctttctttcctgattatccctttactttctgttttttggttttggtcgttttcgttggttctttccctgcctcgtctttaattgttggtgatgctcagggttccttccttgactcagctgtactctggagatgcatgttctccctgagcagtcgcctttgagctctggcaacacactctcctgtgcatatgccacatgttttgcttgtttgctttttgtcatgtaggaacttctgtgtaataaagsttcttccctaatcccatgtctgttcatctggcttacttactcctttcagaatcagcccagcctacaggaagcttttcccagcctactcttctctctcaactatgttctaattgtccatgagggtattctgtactttggttaatgtatgtacaccattgtattgaaatgatttgtttatatatacagtcatctaaacaaaactgcaggttcccagacagcatgtgcctgttttatttgcatttaaaaccttcagtgcttgcaaagtcccaggtatatagtaggcattcaatttgagtgctgctatattcattccatttggtggatttaatcttaagatgtttttgtctctttttttctgaagaatggaacttgcaccaaaataaccctaatctgaaaaaaaaatgtgtcatggcattttctttttaagcaccttgcatagtactttctcttttcctccctttcctaatatatggtctgcctgtgttgtactataaatagtactgcagcaggtagaaattgtagcagttagggttctccagagaaacagaatggtgagacatggatatacatacatacatacttatatatacacacacacatatacatacatatatacatatgtgtgtgtatatacatacatatatacataagtgtgtgtgtatatacatacatatatatatagagagagagagagagagaattttatttcaaggaattgcctcatgtgattttatatatatatatatagagagagagagagagagagagagagagagagataattttatttcaaggaattgcctcatgtgattatgtttgacaagtcagaactttgcaggtcaggtcagcaggcttggaaactcttgctcagaagctgatgcttcagtctagaggcagaattccttcttcctcagagtcagctcagctttgttcttagggcttttccattgattggatgaggccyacccacattatgaaggataatcttctttacttgaagtcaacagattgtagatgttaaccattttcacaaaacagcttcacagctattgcattagtttgattgaataagtggatactgtagacttgcgaagttgatgcatgcaactcacygtcacagaaataagcatgaaatttgtagttgtaacgtatcttagaactcttctgattacccaggtccaccctgttgtggctccattttgtggatgaggaaacaggcccagggtagtttgtagtttcaattcacaaaactggttagtagaaaggggctagccagaaattttctcttaacaaatgagaaatcctgattgacttgcwttggccttgtcaacagagtcatcaggcattaggttctagaccacttattaaccagctcagaaatcccaaagtaattattagcacttttttcttctctttatgagttgcttttttttttctcaaggggatttatgactagctttaaatagaattcgaaaaactactacatgtcataaatctgacctcaagtcttagagtctgttattagcagatactgtctttttatattttctgtaacttcaatggcttattgcagtggactatgaaaatgtataaaattttttcctattgccagggatgggaaactatggaaatgtcatccctgcttgctgaactgccctcttaaattgccccttatctgatgatgaactaaattatttgggggagttgaaaaatagagaaatgccagttattttttattcagcacattgtatatactcaaaacattttctstaaggcaaaaacaggaaaccttgcaaacgaaactgtgggtaatatgtagttataaaccatctttccaggaaggagctgaaagctctgcatgatccctctattataaakttttccaactccttttgaaggatgttaagtaatttgccccatagtctatgggaatttttcacctyggggaaatggggctgagaaagttattacttttaaccccagtgaaccacaccagaaacagttacagcatcatacaaatcaatttctgcattttccataaagtgtttggcaaggaacaaaataggctggaagctgggaaaaaggccaagtacttaactcactcaaactcattttaaagtttttagctctagatattcaaagaaaatcagtgttcatcctgttgaattcatgggaacatcattgttttttatattatataaaaggaaactttccarttttcttaaatatacaattttttgatagtgagaaataaaattawctcaatttagatagacaaaatgcctttactcattttctaagaaaatcttaaatttccggataggaaaataaatatatattttttgaaatccattttcaaaacatcatggcatttaagcattccaacttaatgacagctgagaaagactgctgtgagacatatactgcgtaaagtgaatccaccctgtctattatacatggggataccaccatctggaaaaacaagatctatgtatatttagccaaataccaaaagaatactgctgaaatttcactctcctgtttccctctaagtatttgatatgtcatcaagtattgtattgtattgtattgtattgtattttttaaatgttttggtactttactaaataacaaagaacttttgcacagagtcagaggatggtcttttatttattatcagaggtgatgcctttctataaatattgagaatacagtagtgtcctayagggatagctatttcgtctttctaaagagcttgtgcattaagtaatgttgttctttaataatgcacttaaattacatttagatttttttgctaaatgtgtgaaatcagtttaaaattccatctttcatttaagactgcttattaaggaataataatcccttatttaaattatgatttttgacagttgacaaagtgcttttacacatattttctcatctaattctaaaaacagatctagtgttagatgatgttggttttcattcctgaggtgaagaaattgaggcagcaagagtttaggcattttctttttcacgcaactattaggtgacatttccaagactggaattcatgtgtcttgactctaaatccaatttttaaaaacccttgcctaaagtggctctyatttactgaattgtcaacggtattctttgtacatataaataaattattttatggattgccccataatgcagattaggcaggataatttatgaattctgatttctsctcttaaaacctatgcatacttaatttatagaatgttaattaaagtaattctgttttaatatgagtaaaattatggtgatttttcaaaaaagtattttggaaaagtattatgtttattttctatcaaatgtatgtgggtatacacacaaaracacatttgcctacatatgtgtgtgtttatatatgcaaatatgtrcatatgcatataaactaaaatacatgtatttagacggyagcaagattaagaaaataattaggtcattaatactaattgcagttgtaatgaaagttgtatagtggatgaatgcagaatagttaaaatgaagatagaattttctttagccttggctgtaagtaaaatgtaatacatcacacagtttgttgaattttcttactctttccctgtttttgatagagtaaaagatatactttggagtggagattaaactcttaagagatacagaccaatgccgactcatagttaagggtccttatttaacttacatgcaatttttggttttagaataattcattgagatatatattttctgctctgctcttcaagcgctatgttaattactgaagtctcagacattttcaaataaaagaacctgtgatatatgatctcttccattaacagcttacaattcatatgagcaaatatgcttagcagttttactcaacgagtagttcgttccaggtaatccaacagatgatgtctcattaagagtacagaggaagtccgataacttccagctcagatggggagtcacagatgatggagaaggtgtcatctgggtgggcgtttttggcaattggtagaatttgaagagtagaaaaggaaatagtttcaggtacaaagcaaagggaacaaacagcacatttggtggatggtaaggaaacctggctttgcatcatgaatagtggctgaacaaaatcagggaaattaagaggtaaataaactggcagtgtgggaggtatgaataaatttggtcttaagtctattgaatttcactgatgatgcggttttcaaggagacctttttaaatggcagtttggaggcacagtggttggctcttaagcatttagtaaatgaaatgcaatgctgggaagaatcagagccacccctagaggatggaatgtcttctgcgtagaggtgacagctaactgggggaggatgagtcattattggaaagcaggacaacatcctttgggctsagaacagtggccatttatttaagctgtcgctggctggtggtcctctttgacatttttcttatttggtatatggaaaaaatatagcataagacatccactactgcaggcttaaaattaagacttttaatttaaaacgtgagttgattgtattatttattttcttttttgaaatttgagctgtttgaaataccatcccagagtgaggtgagcagtcttatttgccttgatttatgctacctctaagtcatcttaacattagtattcacaaaactacattgcagtgaaattcaacaaatctttactgaatacctcttatgaggaagaygataaagaataagaggaaaatgagatttttagtttgtttggaatacagagtgtatgggaagtataatagattagaagtataaagtctcaatgctgtactaaatgggcaccattaaaggttttgaaccatcaatgtttttaggtttttaaatggtacaggagagttgtttttaggagttgtttttagttttttggatgatacagggggacatattggttcacttgttctgtttgattcgcatatcttttgcttttaaataggtgaacagtttctcaaatggcaaatatgttagtcaaagtatactaagtggcatcagataacattcagtactgtgaagtgtcaattttagatatcacctcagtggaaaaataatagcatcaaataaacagtaccaggtaaggagaaacagagctcttcattattggccagatggactcaacaagcctgtgttcctcaccttgatccttatgcataaaacaaaaggaagttttaataacatttaaagaaaaggaagaaaaaatgtttgccatactcctaaggaatgagtcagttgttacatagtctgctgttaaattcggggccttgatatatttagctcctttgtgacttggaaaaatagcccagagaacaatatagatgttatttttaatattactttttcccccaggaatctaattacgtaagaaattttttatatcaaccaaccattcaggccagtataagtgtatcagtacataactgctaataacatcattcgctatatttggtgaactgtctctctcagcagctcaaatgtcagtttttatagagaagaggaaagctctctcttgttcgcattctcattgaggcactcctccctccttcttcctttccctctcttcttccctctctcttttgtgaacacacacacacacacacacacacacacacaccccaaatagttaaagccaatggattgatgatttgaccccgttgtgttatcaagactagttctgaattactaatggccagtgggatccaagtatctcatttgatagagtgatgcagctactgtggtgctatgctgtggatggatgcaagaagaggggaaattaaaatcactctatatttaacagtataggattgaaagtgtgatgtaggcccttgtgcttttgataagggaaatggtttattcactagagttggtcaaaatgtgattaacacagggttaccaggattctctattaatgaaagcatctctcagctatatatttccttgtgtgtctgttttttaaatgaaattaaatatcacaggtcacaggtcacatgaaggggtctatctataatgattctctttgacaacaaatggaatwttggaatatagtgagtttcctgacattggagacagccatgtagaatggagacaacaattgatttggggttttgtagaaaatattttttattgtgtgggaattcagctagattagagtttcctagcccaaatttaatggtaaaccatgtacttgaaaaataagacaagaggggactgacatgtgagccagaactgttgtcactgagcaaaatgagagatagggaatcagtgtgacagtaaaaattggtttggtgatagggacaatattaataacctttaagaccccctctattcatgagtttctgtaacttaaacctgaatatgctcgtcaactcactggcacttgaaatttttttttttttttgagtctgagtctcacctgtcacccaggctggagtgcagtggcacgatcacggctcactgtggcctcaacctcctgagctcaagcaattctttcrcctcagcctccagagtatctgggaccacaggtgcacactaccatgttcaactaatttatttttatttttgtagagacagagtcttactaygttgcccaggctggtctcggaaatcctgggctcaagcgatcctcctgcctcaggctcccaaaatgctaggattacaggtgtgagccactgtgcctggcctagtaggttcttaactgaattctaacccccgcacccaatttctagtttgctaaaaacccttaagaatgcaggatgcaggccaagaagctggcttgccaaacaaggtcacagttggtacaggcttcaggttaggtggtattgatgtcagaaaaatcctaaatctgtgaagactgctgaaataggggatcatcagtcagcatcactcagggcacaagttaagtgagagggctgatatcaaggattaagagttaaggcagtgggtacacctctagccttgtgagtctaatggaacttcagacggaggcatccagcaccacggacagctcttcagagctgttgggtggatgtaaaaactcctaggggtttttcctggaaaaactgcttctamttcttcctagctaaagatgtctactatacacaagtatcggactttatgcaaccctctcttttctcatcttcaatgtagtaataataaatgttctatatagttctctgggtacacatattaaatgataaattgaaagtatgtgtcagtgatacaaatttaataacctttcactttgaatcattgccctttatctacctaagattgtattatgtcaaggaaaattgccagcttcttcttaaagtatgaaataacagttaaataaactgatgggagaaactgtgrtatggtaaacagatatacactttattggtgagagataggaactaggatttattgtataccatgtaggttcagacatatgctcttayaattsttatgccatttaattttcataaccgctctgtgtacctatcaaggaatggaggggtcagtccatgtcatgctcttccactgcgccatatttctcctatttctactgatgggatggaatgggtgacatctggtatgcagggccagagtgatgatagaattccaacttgtggctgtcctaagagtggtctcttctgagtgttttcccgatggcaggaagtgggagtgaaggacagatagagggggwaagcaacacagctcaggtcccccaacaaggagatatcagagcattcctggccaggagatggagcagggtatccaggggccctttggaatgaggtaaaccaggttgttgctgagcttactgtgggttggtcatggtaggaatcttctcaaagaccctcaacctagctgctattgaaggaaatgaaaaaccatactttgatatctgtgtgcgataactttatgtaatacagtgacaacttagggaaaagcatctatctttacaattagggtattttaaagggaatgaaaaggtcttcgtgccattaacatttagtatttgtgtctttgataaaaccagagtatcttttgtgtgatccgtttgtatttaatttgaatcattatttcagaatataaaagtgtatctaatttttttattttattttttgagacagagtctcgctgtcgcccaggctggagtgcagtggtgggatctccgctcactgcaggctccgcsccscygggttcacaccattctcctgcctcagcctcctgagtagctgggactacaggtgcccgccaccacgcccagctaatttttttgtatttttggtagagacggggtttcaccgtgttagccaggatggtctcaatctcctgacctcgtgatccacccgcctcggcytcccaaagtgctgggattacaggtgtgagtcactgygcccggccctaattttttatraacatgaattttacatgtggttagtgactgtttgcatttgttatttgacaaacataaaatrtatcataatggaaaatgatcaagtagcaaagaaatgccttcaacagctttctatatgttttggcttatgtacttaaggatgtagacagctttatgagacagactatactatacaagtacttttgtctgaagattagctgggctgagactttttttcttttcataacagtttgatagatgtttgtgattatctgttcaatagcccatttaggactaggttgaagaagcagcagttttctgcataggtagcatttgagatccattatcagagggaaatgattattrtatgatgctgttgtcccttagaactttcaagaggaaaatgttaggattaggtagttatataatgatttgtttgatagaaggagcactgaggttgaaatcagaagatacaaatttgaatgcttgcttctatwcccaccagatgcatagcctttagtaagtttttcagaccctcagagccacagtttgctgctataaaaatgagactctccacctaagtcagggaatggttgtgagattacattagatgacatttgtgaaagtgcttaaaatttctaacacattttttaaagaaactgtttataataattctcctttgtggttattttctacagaaagtgagtgagaaggttggaggagctgaaggaaccaagctagatgatgacttcaaagagatggaaagggtaagccttcactactgcctagtgttccctttgacataaamatgtctaccataattagaggagaagagaaaacgggagagggcaactgttttccactggtctctgagaatactacattttgttatttaaaactacttttcatgtatrttttaaaacataaaatgtaaaatattctgtcttccctttgtactgtcctgaggacaaaacctcagtgaaggtgaaaggtcacgatgaactttttctggtgggtttcatcatcattttaaaaaaataaggacagtgttgagctgatgtttgaattagggtgagatgcgtagaaaagaagctgcagaatgacatcccaaatgtttttgggagagtttaagtcactttctggctttaaggaccttccttactggatgattggccagaggcagccatgtatagtggagagaatacagttttagagcttgtccaaccttggcccaaactccccttcctgccatgtgtcacaaaagtccatctattgatcagagcctctttttaaaattttattattattattgttattatttttttgagatggagtcttgctctgttgcccaagctggagtgcagtggcatgatcttggctcactgcaacctccgtctcctgggttcaagcgatctcctgcctcagctccctgagtatctgggattacaggcacgcaccaccacgtctggctaattattgtattttttgtagagatggggttttaccatgctggccaggctggtctcgaactcctaacctcaggtggtccgcctgcctcagcctcccaaagtgctgaggttccaggcatgaaccactgcrcccagcagagcccctttttaagtgaatgtaaaatgagaagactaatactcatttgggggattttagttaaggcttaaaaataatgtagattatttagctttctgcttaaaaggtaggttctcagcaagtgagggtagaagtgatgaacaaaacatctcattttatttttcttgggacatgagccatattttcgcttttacttttcttttactttaacgctcttcagaacaggtgatatttaggcttatgattaaaagtgtgtgttacattgtgcacagaaacattttaggtcttaagtgggtggtgggtaatggatctgagagtagcaatcctgtacttgaacagaagaggatgttgcaaactatggtacctagaaaccacatttaaacattgtaaagaatattgcttttgtacttcgttgtaacaaagcaattttttaatattctgattttgattctaccagaagttttttagggactggatattgttttagtctacatcagatccaacaggctgcctcagttttgctgtttttactatgtttgcatgaagagtcaaacaaaaaattcctaggtattcattagtgtagtgtgagaaattaaaaaaaaaatcctaggtactttctaccttgtctttttagtttttctcttggtgagtttattgatgaattcaataaatattttctttgtgtcttccatgaaccaggaggtaggatatagacaaggttcctgartgcatgaagttcgtagtctagtggggagggcaaacttggggcaagtaatgaccagcgtggcgaggaggaaaactaatggagctacagaagcccagcacagaggaaactcacccrtactgcattgtcaaggagaaccttcctgatagttaagtgaagatgggaaagagttagcagagcctggtaaaggaaacagcatgcaagcaggcaagagggaacggttgagttcctgaaaaaaaaagataagttgccaagaggcagggtcytgtgaaatcagactgcatagtattgatccagctggtcattctggctaagttcttgagatagacctcactgatggatacccagtggtgaggagattttatactggaattctgagtcccagccttcagaagtctggaaaaccagactcttacagctgaggcctggcacctacttcctccaactggaccaaagtctgcattggttcctatttctcatctctggatggttctaaataccacctgatcctcaaccaaagctggtagccactaatatccatagttctggaaataatattttacccattcatcttctacrgcatctgagactccaggaactgacacacatttccagaaatgtcttgtctttgactcttctactgcccataaaattggagttcctcacgcttcatttgaacagcccatgggttaatccgcctctgtcttcacccagtcttgcttgatccctccttgtactttgatgctcctccttccccctcacccctggagagcatttatagtttgccacgtggccaatgtcatgtcattaatgaaagattaggcaggtatttaggaatttggaactaagtaccaggaatcagaatttgacacttccttttagcatctgccaggactaaagggaataagctaggcagctcactgtctaaagtgagacaagctaacttcctgtttcttaaatgagactaaaaagaacaggaaatttggagaactgagtagaatttatcactgagcaactaattagacctttggagatttattttggtgagaaatatatgccagttttgcaaagtaattgaaataaaagagaatcctccaagcattttactttaggcaaataccaacagaccttcctctgagtatgaaagtaaggtatmaggattatttctcctaatttatagaaatgtttctgaaacttttatttcaaaatatagatactcctgcagcaaagtaaacatctgattgactgaagaacacactcatggctctttacttgggtttatacctgaataaattgagagatttaggtttcagtgcagtgtggcaattgttttactctttttgattctgtatatcttttgtttctgtctctattgcaaattttgcaccctccactcatgctaaatttacatgaatagtataagatttctgtggtaattgaaaagcacttgctttggatttagactctcaaatcttttctcgcctgttaattgattattcacacaaatgtttgagctcagtgttcccaagcagacagaagaattgcctttccatagtttgttttctgctcgtcaggcatttggggtagagagacctttgctcatctgtattctcggaggtgcaattagataacaaaatgaaataaattagaggtttgcttcaagcagcattactgggagagagaagtgggttttcctaggggtgtttctctaatcagccgccccagccactctgtggctgagatgcagtaaaatcatcatgtgtgtcccttagctctgcagccctcctctccctgagctgattggatagaatcctgcggctgtgctgtctctgtaggatccctgcccatcattatttctctcctaagtgccttgcatggaattctttttgttttcattttaaatgctgtctgttgcttacaagctttgttaaacacaggctaaatgtcttactctggtgcaacattggaggatttgttctttgaaaagctataggattttttgttaagaggaagttcggaaatttgaagaacctctggttccttctcaaattttcctcagttgctgcaatgattgtgtagttttttgttgtgtgtacagttacattcattaatttacttggaaagtgcctccatgttaaggcagtatccctgccttcaaggggcttccagttttgatttttaaaaaattgtaygtaaatcagtaccttacagaacatagtgcttggtgtcctggggaggtttcccatggaatmttcaggctgggtacatcaggcttcctagaagagagagggcgtctgagctaaatcctgaacatgtctcttgtccctgattatgtggttaattcagaattctaagctgaggaatatagtatctgttttgcagcctgaaaattatygtgggaaatcccttctgttgaacccagaagatgtcctagggatagaaacatgtctataggccctttaataaaaatgggattctttttaaggagcaactttgagttttaagaagagcaagttgttgagaaagaatgccatttcatatgagagtaagagaggattattggcagattcaggtgtggagaaagtccaataggaaaatgtccatggtcattatcttcatacactcagtcactgggtggagaggggttcaatttttctatccagcccaagtggtagagctagaattaatgagtagaaaccatggggagatagattctggctcaatataagaaaaacttttggctatcaaagctgggtttttggtgtgtgtgtttttgtrtgtgcgtgtgtgtgtgtgtgtgtgtgtgtgtgttttgcctcagcaatgactgaattccctatcactgcccatgtttgaccccctygttcccaccgcccatgttggaacacacactgacctgctagttccctcccatcatgtgaggcacaccagtcatctcttgtgagttttgtggttagtaatttgttactaataatgtcactttttaatgatgtcactcttacttggattccagtgatctctctcaaatggggagagaaaggagtagagtttcagctggaatgctctgagcaacacgtatccctgagtgcacccataatgtctccttyatggtgtgatgggaaaggaggaggcgtggagcattgtgctaagacacacccccccggtgtggggatgtaagaagggccagagcyccaaacaagatgagctttgaagacatctttttccttagtctgaaattcartgatgacaagcttcctctgagttacatgtttgcaatatrtagttccaagcttatattcattaaaggtaatgaccaagaagattaacagcaaaaaaaatacattggagcaatcacagcattctaataaccttgtttatttttgttttttaacacgttgtttgtcagttgggctttctgaaaacataagataatgctttaaatcaaagcagcttggggacagatggattaactcttctgagtcagcaggggactattaaaaacatcactcttggacctgcctgtatctcgctgccagacagaccttcccaggacacrgttttcatcatgtctctgtgattgtttattgagctgttcttgttcaggagtctcagtactttaagtgggtgtgtatgcattattaatagttgtagtttcttaacttcagtgacagaaaagttaagaatttgaaaatattttagtttttcatwtgcctttttaatatttcttttatgttaccactgtgagttacccattttcaagtgggtgtgtaattcatctacttatttatctaatttatttatttacttacttatgtggagattgaggtctcactctattgtccaggctggagtgtagtagctcagtcatagctcactatcacctcaaacttctgggctcaagtgattctcctgcctcagcctctcaagtagctaggactaccagcacacaccaccatgcctgcctaatttttattatttatttgatatttgaggtccaatttctytctttttttaaacttgtatcttaacttcaggggtacacgtgcaggtttgttacataggtagacacgtgtcatgggagtttattgtacagatgattttatcacccaggtattaagcctagtactcattagttatttttcccgattgtctccctcctcccaccctccaccctccaataggtcccagtgtgtgttgttcccctctgtgcgttcttgtgttctcatcatttttgtcccacttataagtgagaacatgtggtatttggttgtctcttcctgcattagtttgctaaagataatggcctccaggttcatccatgtccctgcaaagaacctgctctctctcttttatggctgcatagtattccatggtgtatacgtagcacattttctttatccagtctctcaytgatgggcatttgggttgattccatgtctttgctattacgaatagtgctgcagtgaacacatgtgtgcatgtgtctttataatagaacaatttatattcctttgggtgtatatccactaatgggattgctgggtcaaatggtatttctgtctttaggattttgaggaatcaccacactatcttccacaatggttgaactaatttacactcctaccaacagtgtataagcattcctttttctccacaaccttgtcagcatctgttgttttttgactttttatctcattgtggttttgatttgtgtttctgtaatgatcagtgatgttgagtgttttctcatatgtttcttggccacataaatgtcttcttttgaaaagtattcatgtcctttgtccactttttaatggggttgtttgctttttttcttgtaaatttctttaagttccttatagatgctggatattagacctttgttggatacatagcttgcaaaaattttctctcattctatagcttgtctttttactccgttggtagtttcttttgctgtgcaaaaactctttggtataattagatcccatttgttaattttcgccttggttgcaattgcttttggtgtcttcctcatgaaatttttgcccatgcctatgtcctcaatggtattttgcctaggttgtctttcagggtttttatgattcggagtttatacatttaagtctttaatccatcttgagttaatttttgtatatggtgtaaggaaggggtccagtttcaatcttctgcatatggctagccagttatcctagcaccatttattgaatagggaatcttttccccattgtttgatttttgtcagatttgtcaaagaccagataactgtaggtgtgcagttttatttctgagatctctattctattctgttggtttatgtgtctgtttttgtaccagtaccatgctgttttggttattgtagccctgtagtatagtttgaagttggatagcatgatgactccagcttcgttctttttgcataggattgccttggctattcaggctcttttctgtttccatatgaattttaaagtactttttcctagttctgctaagaatcttaatggtagtctaataggaatagcattgaattcataaactgctttgagcagtatggccattttgatgatattgagtcttcctatccatgagcatggaacgtttttccatttgtttgtatcatctctgatttctttcagcagtgtttgtagttcttcttgtaaagaacttttggccgggtgcagtgactcacgcctgtaatcccagcactttgggaggctgaggtgggcagatcatgaggtcaggagatcgagaccatcctggctaacatggtgaaacccygactctactaaatatacaaaaaattagctgggtatggtggcaggcgcctgtagtcccagctactcgggaggctgaggcaggagaatggcttgaacccaggaggtggagcttgcagtgagccgagatcacgccactgtactccagcctgggcggcagagtgagactctgtctcaaaaaaataaaataaataaataactttcacctccctggttagctgtattcctaggtattttattatttttgtggcawttgtgaaggagattgttcctgagttggctcttggcttgactgttcttggtgtataggaatgctagtgatttttgaacattgattttgtatcctgagactttgctgacattctttatcagcttaagaatctttttggctgagactgtggggttttctggacataggatcatgccgtctgcaaacatggatagcttgacttcctctcttcctacttggatgtgctttatttctttctcttgcctaattggcctggtcaggacttccaatactatgttaaataggaggggtgagagagggcatccttgtcttgtgccggttttcaggggaaatgcttccagcttttgcccattcagtatgatgttggatatgggtttgtcatatatggcacttattgttttgaggtgcattcccttaatacctagctcattgggactttataacatgaatgaatgttgaattttattgaaaaccttttgtacatctattgagataatcatgtgtttttcttctttagttctgtttatgtgatgaatcatatttattgatttgcatatgttgaaccaaccttgcatcccagggataaagcctacttgataatggtggataagctttttgacatgcctctggatttggtttgccagcattgtattgaggatttgcatcagtgttcatcaaggaccttggcctgaagttttcttttttgttgtatctttgtggctaattttaaaatcttttgtatagatggggtctcactttttcccaggctagtcttgaactcctggccttaagcaatcctcctatcttggcctcccaaagcactggggtaacagacatgggccaccatgactgactgaatttatttatatattaatgatcactaaactcacaaagtgttggtgctccctttaaggtgtctatgtttttcttaaacttttgctctgctacagcatctggtataatgtggtatctaatagtatgaaatcatatctttcagtccttttgttgctccacaaacaacgccacgctgttcacgagtccttacacctaagttcaggaaataccaacttttcttcagggaagaaaggtaatattcccatgtctctggaagagtaaccccattctagtcatttccatgccttctattctttagtatcttgtctctaaagactgagacagctggtgaaataatcagtatcatctatagattcagcatggcattattattagtgaagctagcacctagcacaggaatcaagatttttttgtaagtgctttaggtttttggggccagagggtctctgtggtctcttacaactccttgccaatgctgtcaaaacacaaaagcgtccattgacagcgtttaaatgaataagtatggctgttttccaacaaaactttatctaaggatgctgaaatgtgaatttgaaatttgaataattattttgtgcagtaaaatagtagtctcatttcaaattttttcaaccatttaaagaagtagaaatggaagtttttattacctaaaaaacatgcctgtatcygtatatatttacagtttcactttcttttttttatttttattttttattatactttaagttctagagtatgtgtacatgtgcacagcttgcaggtttgttacatatgtatacatgtgccatgttggtgtgctgcacccattaactcgtcatttacattaggtatatctcctaatgctatccctcccccctccccccaccccacggcaggcccccatgtgtgatgttccccttcctgtgtccaagtgttctcattgttcatttcccacctatgagtgagaacttgcggtgtttggttttttgtccttgcaatagtttgctgagaatgatggtttccagcttcatccacgtccctacaaaggacatgaactcatcattttttatggctgcatagtattccatggtgtatatgtgccacagtttcttaatccagtctatcattgatggacatttgggttggttccaagtctttgctgttgtgaatagtgccgcaataaacatacgtgtgcatgtgtctttatagcagcatgatttataatcctttgggtatatacccagtaatgggatggctgggtcaaatggtatttctagttctagatccctgaggaattgccacactgtcttccacaatggttgaaccagtttacattcccaccaacagtgtaaaagtgttcctatttctccacatcctctccagcacctgttgtttcctgactttttaatgatyrccattctaactggtgtgagatggtatctcattgtggttttcatttgcatttctctgatggccagtgatgatgagcatttttccatatgtctgttggctgcataaatgtcttcttttgagaagtgtctgttcctatcctttgccccctttttgaagacttaaatgttagacctaagaccataaaaaccctagaagaaaacctagacaataccattcaggacataggcatgggcaaggcattagacttcatgtctaaaacaccaaaagcaatggcaacaaaagccaaaattgacaaatgggatctaattaaactaaagagcttctgcacagcaaaagaaactaccatcagagtgaacaggcaacctacagaatgggagaaaatttttgcaatctattcatctgacaaagagctaatatccagaatctacaaagaactcaaacaaatttacaagaaaaaaacaaccccatcaaaaagtgggcgaaggatatgaacagtttcactttctttaaacagcsttccctaatggctcctcacaccaatcccaggcaaggttagttgaagayggaggctcaggagcttataagatgagaaattcttgtaatttaggatgcatcaaaacttactttcaaatagtaattggaaattttggacattgagaaaaataacagttacatgtcataagttcaaagttaaactgtactgttctcaaatggcaataagctcaattctgggagcttatgggaattgctagttataataagttacttaagtggaaatcttctttatgctaagttaatcaggcctgttactaagagaatatgtacttggatattaccagcttaggtatataaataactcttctgscaagtgcataacaaggcayattcaggggtctcatggggttatggccctcagcttgtctctggctgacacagtgtagtttagcaaaagagtcctgggcattattatggaggaccgaggtggagagaagttagaaattagtcagcctcctactggcagatgacttcagaatgtgactaatcattggaccattcagttcttctggtacttttttaaagaaagcctctgattaatggccttgggaactacttttctcctcataacacacttaaagagctcctttcccttctctaggccacaggtgtggacatttaataaattaaagcgttaaacagaatgctcccctggtctcttcctcttatgtccatgaagtctatcaagtaattatctgtaagaatgcagccatgcctggtgcagtgactcwtgcctgtaatcccagcactttggaaggccaaggcggatggatcacttgaggccaggagttcgagaccagcctgaccaacatggcaaaaccccgtctctaccaaaaaatacaaaaattagccaggcatggtggtgcgtgcctctagtcccagcttcttgggaagctggggagggagaatcgcttgaacctgggaggaggaggttgcggtgagctgagattgctctactgcactccagcctgggggagagagtaagaccctgtctcaaaaaaaaaaaaaaaaaaaaaaaaaaaaaaaattgcagtcagtagcaagggcctaggaatggatttgccaaaagtgggtccctctttagtataattcctgataatgaaataaaaatgtaactgtattgaataaagttgttttcagaggtggtggatttcaagcgaaggttattttatgttgtagtcaaaagggtttaggtagaacttgctctgtaatgatgcctggactaggtaaccaaaagtgttgaaggagtctgcctcaatgggcacaaagtcggtaaacatctgggtgggatgagctctttctttagacaagtcacaagggacactggaatagtttttattcctacttctcttttaagatggagtcctgccctggggacmaaatgtaataatctaatattggtatccccagggtctctgggtcttccctgagaccactggcttcagccaagctagtggtgtctgtttacactacatgagtggttgggctccctacacagagcttaaaagggaagggggttctgtagccaaaatgagaaactagctttcacagccttccttgctcacctccctgtgggccaggtgggatagacactgcaggtaccagtctctgtagggaaacccgtgaaactgagggcctgtggttcagcagatcagcattgcagagcctcccttccagagaggcccaggatggaatagtcttgtggatgaagcttccacagactttgagaagtttcaaaataaaaacagaatatgggatggcaggtaccttcctgctgatgctgtttcaccggctactgccaggtccccagccccatcttagggagggaacaaagcatattccagctctgacttggcctctctttcagattgggagatgcctctgttgcctgtctttttaggaagagcttttgctttcaagaagtataggatggtcattaagaacacacacactggaactagaactggggaagtttcttaacccctctgtatctgttttctcatatacattacagagtttgtgagcattgagtgtgtaaagatatttatagtccttagaacagtttctgacaaacagaagacagcttatggtgatgattgttataattattaaggacagagatgggggaaccttagaaattggtcagccccttaacagcagatgacatcaggatatcaaacagccattggaaaatttaattcctatggcactcttttttagaaaccttggctttttgaatgattttccttctcatcataactacaggatatttagacacatttgtcatctaattccttaattcccatcacataggcagcaggagatctacatttgtacttctatcacacatgtaccatggagtttcagcatatttgttccatacacacctttgatccatttccctggcataagacattctatgacttgagtacatagtggttgtttggaattttgctaatactaggaccttcacatatggcttcacaagttgtgtactgcacaactccagggggctactgagcatttttaarctaatcactacctggtacacactcaatcttaaagatctttgaaatttgaatcaatcaaaaggatatttatacaagatttatatgtagacaggcacatttgaaattgcatccttctaaagataattttatatcattataacttcacaagaaaaaatttgttttyctctgttgatcctagtaatagcaaacacacacagtaatatgactgccatggaatgaaaaattattaagtaytgaaaaactgaactgaaagataaaatcttytaatgtgtggattatggaaaaggaggaggcttactttatgcaaggctgatattatataccggtatatattatataccggtatatattggtatatactgatattatactggtatatactgatattatatactggtatatattatataccactaggtacagcaggttatggaaaagtttctcatagttgaagggggagccttttaacaaacagaaaatttctscagtggacttaattgatacctaaatttctacattaaaatttaatcactttcatttatacctatgtcatatattacatgtacataccttgaataggaggatgcatttattctcattagtcatttaccatgtagggcgaataggaggcccacagatgctgataagaaaaggatttcttggagaaagacagagagcactgcagtgagcaccttccatgacctctttcaagtggggagaggggcctgacaaagagaacacggtgagatgctgaaggcaaacactgaccattccaaatttagaaatttagaggatagaacaaatttggaggatagactctagcatcaagatttttgtttagcattaaccaaaagttcaaggacagactagaagtctttgctcaagattttatatttttaggatgttcttagaagttaaataaaaagctccccacttcttgaataagcagagttgatgctgcatgattctttcttgagggcagcaaaatctgcctccatgcctgacccactgtaggcatccaataaatgcctctgggacaaartatgtttcattttattcaccttattttcaccagaaggtaatgawttatattttgaaacaaattttaggaaactacaagcttcttctttggataaacgggctttccacatcttggcagaccactgctgagtacagtgtcagcatgacttccagccgcgtctcagcctccctcacctactgcgggacttgtccggggctctgttgcatacccygccattgtatacagactcaaccaaaaacyggtattctaaagctcatcatttttgtcatttagagcacttattttctcatttcagaaagtggatgtcaccagcagggctgtgatggaaataatgactaaaacaattgaataccttcaacccaatccaggtaaggcatcatcttatatgtttaaaggatccctcgaggtaactttyagtttctctttgrtagacattttaagtttggtgtgtttcttcttttggtgttgcttcctcggtccacttttctgagaggttagcgacttcatggatagcacattttaactggggagaagggctttttaaagctcacattgaagtaactggaagatctgtggtattttatctgactgtggtatatttaacaaataatgtatgcaaacagttcaggtgacacataatatcmgagtagctataaactgttatcagtttgaactttcaagagatggtaagaaggaaaattaggatagtttaaggtaagatataatgattcccagaagatgtgaaaaagtagggaggtgaatcgttttcatgaaacacagagggtttcttcatagggcatcaccaaagtcttcagagcgttgatcttgattctgattcttctccaagcacatcacagatcagcattggttcctgctaacttgttatactctaagaaaaagaagtggtaatagagataacggagctatatgttgataagaggaccaggcagagttggggcagtttcggtaggcactaggtatagcaaagcaaagcaaagcaaagcagcctacctgatagacctcctcattaccattcctgtgtgtcagtttctaaccacagggcatggaaacgggaagygaggctggttgtatttaagtgagatgtgtgaatatttggaataccccttaatcttgaggctagtttctttgcaagtttcaggttggggttccgtgtattttatggtcctagagaggatggtgcagacaactgcttcagccccaatgagtttggatactgagcaatagtggacaagtgatcaaaaaaaaaaaaaaaagggggcgggtgtgggctgagaggaagcaggtgtgtgctgtactaagtgctggctccttttctatgccccctgctgctggctgcagcttccttccatccttattcacctatgaccagcccagctgctattctgaggatgagcagactatgtaggaataactttctggatatttgttgctgttgtttttgttcataaaacacattagaaatgagcttatgtgagggaggaaaatatggaagaaaatgtgataagctataggaaccaggaatttaactgacagtggtctagatacattttcaaatgcttagcaaatttgtcaaagcactgcaaaaatcaggtttcttatttttacccagaaccttcttggtaaccactgtttttcacagagatgcaaagatctcttggatgcacatttattccttastgtttaaaccactgtcataggtcaagttctgaaagagaactgctcgccctgcttccccgcaagaaatcattatataggggcaagaagttttggtctttatctttgcctagaaccttgaagtactccatgatttcctgggattttcacgagttgtacttgtaactcatsgttgtagggctaagagaaaggcagtgggaggaggaatatagtatttattgagcactgatgcattttcartgcagtgctaggtatatgaggcattgtctcatctttaaaagtaaccatttttctccayataaagtaaaaacagttgaagaatttctagtatgaaaatagactaaaaattcattgtaacacaaattatcagtgggagctcatcagttttcctgagtataatggaactgtgctctgttgtaggtaggtgtggtgggttgcatagtgtgtctccccaaattcaggtccatccagaactaaacttataaggaatgtgaccttatgtggaaataatccttgcagatgtaagtagtgatgtaggatcttgagatgaactcttcctagatttagggtggcccctagaaccagtgatgggtgtccttatgagaagaggagaggacacagagaaacacaggaaagaaggccacgtgaagaatgagaagaggttgaagttacaygtcacgagcaaaggaatgccaggagccaccaccacaagctggaagacatgaggaaggattctctcagagcctccagagggaaccaactttgccgacaccttgatttcagacttccggtatgctgaactgtgagggaatcaattcttttctttgaggctgcccagtttgtggtcatttgaaatgacagctctagaaaactaatccagtacgctagcctcattttattcaggaaaaaacaagggtcagagaatttaaggaactttcccattcatacacctaggaagggatgaagacaagattggaactcaggtctgactacctcctaagtctctgcacttcacgttgcacgatcctgcctctgagaagggtaggctccatttcatttaggtgtgaagggtccttccctttcagagagtaccagagaaattcagaaaggaaattgtgggattaaggcttatttttattttaataaaaaacatcaaaggaggaggtaattgagaaratctgaatgtttagaaatgacatttttaatacaatattgcatgtgctaattggctgccaatataatggttttgtgactatttgagagttgaatggacatctgccactaagaacaatgaaggccattacaggcaattcgaggttggtttcagaaaaacagttatgtatgggcaggccacatacatatatgagtaagtactacccagaagagtccagaacaaaacgaaaattttgtgtaatcattccacagaatttaaacaacctgcatttaattgtttacaacaggtacaatttcatccctccaccagcttcttgccctgagagtagacactggccatagagcccagaccaggtaactggtaaagttgagagttaggcagacacccagagagacagtccttgggcacaggagagcacaaagaatgttcccaaactcgtgcagtttgctaaatactttgcccactcagcctttcagtgaaccctagagctgggccaaccagtgtggatactgaatgctggttctgaataagcaagatatggcctgggttaggacagggcctgatgccaagtaacacatttacatggacaggccaggggaatcagtaggatttgatgcttcgagggtactttgggagtacatctgtattagattactgctcccgggtgcttgctggctttcacatcttgggtacatggacaggccaggggaatcagtaggatttgatgcttcgagggtactttgggagtacatctgtattagattactgctcccgggtgcttgctggctttcacatcttgggtacatggacaggccagggcaatcagtargatttgatgcttcragggtactytgggagtacatctgtattagattactgctcccgggtgcttgctggctttcacrtcttgggtacatggacaggccagggsaatcagtaggatttgatgcttcgagggtactttgggagtacatctgtattagattactgctcccgggtgcttgctggctttcacatcttgggtacatggacaggccagggcaatcagtaggatttgatgcttcgagggtactytgggagtacatctgtatyagattactgctcccgggtgcttgctggctttcacatcttgggtacatggacaggccagggcaatcagtaggatttgatgcttcgagggtactttgggagtacatctgtattagattactgctcccgggtgcttgctggctttcacatcttgggttcatgracaggccaggggaatcagtaggatttgatgcttcgagggtactttgggagtacatctgtattagattactgctccygggtgcttgctggctttcacgtcttgggggtgtggagcttacacatgttttctattcttaaaactcagttcctattgaagtgatgaccaaagtgattttgtttagcttttaagaatacatggctatgctctgtgaaggtcctacatccactcttgcccatctccagaatgatattttaaaaagcaaatttggtcatattatgtaaaacccttccatggcttttcatgcctttaggattaactttcatttttaacatggcttaaggggccctccctgcatggtcagcctgccctttctccaacaccttgctaggctaacagctccctcgggtccagcgtaaaggtcacttattagccttccttggctccaaccacattaggttcccctgtcactgtccctcttgtaatcccagctgcttttcagtggggcacatgccatacttgtggttttgtttttcatctgccgtgagttcagcactgtgcctgtcttattcaccaccacatccccagcccccagctcagttccaggcagccaacaggcactgggatattggaataaatgaattatgaagcacagttgactgtcagtgtctaatgtactaaaacttctctaayacaaaaagtaggaggaaaaattcttccttttccctaaatcatcagatactcatatgtaaccaacatttgtcacatgcatttacttttatgcaaagagcaattctagatgctgtggggcagaaatgagaccaagactggaggcttgtcctctggaacctcacagtcttagtgtaagttacacacagtctgaggagaggagcccagaaggcttcacagctaattcctcctggaaaatscagctaactgatgagatgtggaagtgtsagcgggatcacaggcttaaacgtctgccctgtgagggtgggctttcgagaacgcaggacagacagctgtaaagtcatccaagcttgaactgcaatagcatraaccagtacacattcctaaaatgcttaaataagatataatttgaatatagaaagtactgtgcacaaattccattctwctggttgtaagtgcctattcttaygatatytgtgagcaaaaatcactgaagaagatataactcagttttctttacatattstgatgccttacgggggagcaaaaactgaatcgatgttgtccaatagaaataggatgcaagccacatatgtaattttgaattttctagaaaccacattatacaagtaaagagaaagatgaaattgtctttaataatatattttatttaacccattatagccaaaatattaaccactattaaaaattattgagatattctatgttttttttcatactctggatttcggtctgtattttatacttacagcacatttcaatttggactagccacatttcaggtgctcagcagcccgctgtggccagtggtgcccgtaatagacggtacagcactagatagtttgcctttctgttcgatatatgtttcatgtttacctccttggttttatgttttatcagtgggtttttcttttcaatagagaaatggattcttgatttagaattaggatatatttaggctctggattttttaaaaaaaattctgaaagtctgtttcatgacacttgaatggaattgtagacagttggactgtggaccttttccagacttagcatccttgttatgagagaggccttttcagtttgcactgagaagttactcttaccctgatgtgataatctaatacaaatttccaaactgcttacataaaaagcagcttgaatgtgaaaaaygttgtacacagtaggggtttgtttctctatggaaatgcttttcccttgaatgcctatatggtctagatttttccagcatttctgagatttgggtatcaaattggggtcattcgatgtctatttagaattttttaataatttcaaatctcatttgtgaaatattgcctgtggaaataaaagctagctgtattagtttcaaaatgtaccattagtccctggaaagatactctattaaaattagtgtacttcttttcccacaggctgtgctcttaatcatgtccttccaaagatgaataaatacagtgattatatttggtgactgtggaactgaaaatgaatacatgtattacttggcattcatgtagacaaatccttggtctcacaacacactgaatttactgttttttcctggaggacaggatagcttgtattcatctttgcatcttttagagtccttagcattatgcctggtacattgtttgctctcagtatgtctggtgaataggtgtatgaatgaatatatccatccttcacttaaagaataagggatgtgtgctgagtctagtagccagagcttttccatttccacatcctggcaatgaaaaataatcaaaatgcataaaggacagattacaaaagcagttgtgaggaaaatgttgttaagcttcaarggaatagggtatttcaaggataaatatattaagaaagaaaacttaagtcaggtgatgggtgatataattcatatactaatgtattgaaaggctggagggtttctacttctacatctttggggaaaatattgaaaataggttcctgaaatatgtgagacactgtaagtgatttagacttttaagtcagctagaactggtggaataatgatattctttacttgtgtgtctaaacaatgaatgctaaagccagatcttgcttaaaagattcttaatcagggctgggcacagtagctcacgcctataatcccagcactttgggaggccgaggtgggcggatcacgagatcaggggatagagaccatcctggctaacacagtgaaactctgtctctactaaaaatacaaaaaagtagctgctsttggtggtgggcacctgtaatcccagctacttgggaggctgaggcaggagaatggcatgaacctgggaggcggagcttgcagtgagccaggatcatgccactgcactgcagcctgggcgacagagcgggactctgtctcaaaaaaaaaaaaaaaaaaaaacaccagattcttaatcataacaaatatagtatacatttaaaatgcatgtgtacatgtatattgagaattaagttaatggcacctcacgtgaatagtccctaaatactataaataaataccatacctaaatcctcagcatggcctttaagatccagcatgtggtggcccctgtgctttctgtctctcctagttccttctccctcttgttcactctgtggcctttagtttcttcaattcctcaagttctttgctgtatcaggagtttgtagcggctgtttccccttctcctggtagaatatgggccctcatctgccccttcttcgacaactgtcttctcaccatccctcctgtctcagcttatgtatctcgactctgagtggtgtcttctgagggccaagtcgaaatcatttctactccagttttatattttcatgctacctttatatcacatgagttcccctcaacaaatctcttgagaagttcctcacttagaataaaattgaaagcacttatgtgggttacaaagtcctgaggatctgagctcattccttatgttcctggctgtctccatctcgctccttctgagctagccttcctcaaacacacaggcactattgttcatggggcctggccagcccctttgcttcaatcacttcctctccatgtcttctcaaagccttcgctggggtctctgctcaaatgtcacctaatttgtgcagctttcctgaccatcttgtttaaaacatcagcccttctaacttcctaagccttttcttgttttacttttcttcagagcatttagcaccacttcagatgtacatttacttgttaaagtgttgcttgtcactgctaccgaaatgcagtgacgcagtgacttgagcacaggattgtttgtacactgcaaagagcccaattctattcttttattgcacttttcataatatttactttatgcaacttatgatttgttcactatactgcctttttccattattactctcctattttacattcttcacatagcagccagttccatccattaaagatgtaattcacatcttgtcactcctctgcttgtaactctccactggcttccattgcactgagaattatcctcagacttgttcctgcctcggggtctttgcacaggtgtttcttctgcctggaacactcttctccagctcctgttaatgtctgctgctcctcatcactccaccttcagtcagatgccgtctccctgtacagtcctttcctgccccsacccctattgaaaatagtttctcctcatccctctcatacctccttatattatttcctatcaacatttggaattatcttctaatttatctttttgtttattgttttcacatcactcccatttctcatatagaacgtaatctccagaagggtagaatcttgtctgtcttatttactattcgtaataatggaagtagtgccctcagtaaatatttattgaatgaatgctgttcatctcttccagtatattgtaaacatagtcattgaagacaaggactatgtctcttttactcctttatatatacccagttcctagcacagagtttggtgctagcgattgattaatttgcttaatgaatgaatcaaatcaygtgaagcatmyataagctccatcttacgggagtagctaacttttcaggtaagtgtcgtggtctgcagactttyacagatcagtatcagagctgttctctgtgtaatayctatttggtgtcatgtacaattagtatatttcacaattgctttgggaaaagtgtggatgtgcatactgtcatgtataaaatcactgggctgaagctattaatagacatttgtgtttatatacatagataatagttgtatctatttttgaatgagaaaactgaagctgcaaggtgattagcaatttgcccgaastatacaacagaacagccagaatctttattcagatattactatctccaaggcacattctgttttcaaaacaaaatgtcttatgctacaaagtcttaaactacaaagatacctccaggcttggtawgtgtggcaagtgtactctagggtgacttgtacaggttcacacccttatataatcccttcccgttgggtgtagatggaacctgtgacttgctgctaaccaataaatatggcaaaggtaatggaatcaactactcaccactcccttgatagtgattacattatatggccaaatcgatggtgcatcactcccatgaccaagtcacattatgtgagacagtcttagcagactaatacgagagrcattcccttccttgtctagaagaagcacactgccatgttatgacagcccaaggagaggaccacatgtcaaggaactgggggtrgtctctagaacctaagggtggccactggccaacagccagcgggaagccagagctctcaatcacactgccacagagaagtgaacagcccggactcaggaagacagcaacccacgtgagcctggatgcagacttctcccctctctggcctccacatggcaaagcagtctgactctacattgtttgcagcctggcgagaccctgagcataggactcaatttaggcatgcccagacttacttgcagaaactgtgaggtaatgtgtgttgtttgaagccactgagtttgtggtactttgttattctatgtagaaaactaatacagtgtggctgttcccagccagagctcctatttcaagcatacaactgtctgctggggccatcaggctatttgccctgtggctttaggctccttggataccttacattgaagtaggaggtagattgggaacacctgtcactgtcttttcagcttaagatgaggkctcctgaaccccccagggagtataggtcagtccagttccaccaaagactgaagatatctttgtgttttgaaacatgatakcaaagaacacttggcacagtgcctgacacttagtagggactcaagaaatattatgcaccttcctttcctggggtactgcagctcaacctagggcatctcagatgctaacccagcagttcctccctgggcaaggtctttagaaatcccactgcaggacccttcttacaataaggatatattatttaccaccaccctctatttgctctgaaaacctgagaaagcaaaggctgatgatgttagtacactgagggttgtgtatttttcagatttcacaaactgttttatgcccctgagggggacagttgcctgctttgccagggcactstgtgagacctgtgttggcaccttgcagcacccartcttgaggtgggagatgtttgctgccccatgtcacaagttcttagggctgctgactgtgtactacagcacagggtcttaatatccctccctgctgtttcctacttgaggcataagagagctttgtcaccttggagagaggtgttmtataaataccattatttgggttgagagtagcacgatccagtgctagggttgtctatttgtgtaagtcagtaggcaaatcttcctcttcccttttctcagtgtcttctaatagttaactacaaaagaaamaacatagatgtgagtatatttacctaagttctcattacagtataactctttctgtcatttygtaattgttartgtgcaaaacagcagagcacattggtatcagtgcagagagcatcagagggccacgtttcagacttgtagatgctctgagacttcacctaagaaaaccaggccataatatgcaataatcacatgttgccaaaatgaaatgcatgctaagatgctatttattacataaattttgttggaagtattaagccccaaatcttatttagtgtgatttgaggatttatactcatcttacaattgtaatctctatattagacttcacaaatttagttaaaataatttagaatkaatttttcttatttttcatagtaaaacatgcataacatgaaattatcttaactatttttaagtatacatttcactggtattaaatacattcataatgttgcrtaatcaccaccaccatccatctccataactctttttgtcttgtaaaagtaaaactctatccccattaagtaataactccccctttcctacttcagccgctggctaccaccattctactttctggctctatgattttaattattctaatcacttcatgtaagtggaatcacatagcatttgtcttttttgtgacggctttatttcacttggcataatgtcccaaggtttacttatgtaatagtgtatataagaattgccttcctttttaaggctgaatagtattcygttgtgtgtaaatagtgcaatttttatrtagattcacctgttgatagacaactgagttgctttcacattttagctattgtgaataatgcttctatgaccatgagtatacaaatatcactctgaarctctgctttcaattattttgggtagatatccagaaatggaattgctggaacttaagggaattctattttttatttctgaggtaccactgtgctctcttccacagcattttactttctcaccaacagtgcacaagggttcgagttactctacatccttgctaacrcttgttattttctgkttttttgatgtttaccatccttatgagtgtgaggtggtatctcattgtagttttgatttgtaatgacctaatgattagtgaagttaaccacctttttatgtgctttttagccatttgtatgtcttctttggggaaatgtcaattcaagccttcgctcatttattaatccagttgtttgggttttttgttgcgttttaggagttctgtacatatcagatatgatttacaaatattttcccccattctgtgggttgcctttttactcagtttmtagtgtcttttgatgcacacaatttcttaactttcgtgaagtccaattgtgtaattttttttgttgttgcrtatgcstttggtatcatatccaggaattcattgccacatccagtgtcatgaagcttttgcctgtgttttcttctaagagttctagagttttagatcttacagctagctctttaatgtatttggagttaatttttgtatatagtattagaaaaaggtccaaattcatttttttgcatatagatccatttttcccagcaccattggttgaaaagactattatttctcgtgagtggtcttggtacctttgtcaaaaatcatttgaccgtgtatgcaagagtttatttctgggccctctgctctgttcccttggcctacatgtctgtctttatgacagtaccacactgtattaccatagctttgtagtgagttttcaaatcaggaggtgtgagtcttctagctttgtttttttaagattctttttgctatttggagtcccttgagattccatatgaattttagggtgggatttccatttctacaaaaaatgttactgagactttgatagggattgcattgaatctttagattgctttgaataatgttgrcatcttaataatattaagtcttcgagttcatgaacatgggatgtatttccatttatatatgtcttttaaaatttctttcagcagtgtttggtagttttcattgttgaagtcttttacctccttggttaaattaattcctgagtattktattctttttgatactattgtmaatggaattaaccttttaatttccttttcagattgttcrttgtcagtgtatagaaatgcarctgatttttgtgtgttgactttgtgtcctgctactttgttgaattcatttattagttctgacagctttttgtgggaaatctttagagatttctatatgtaagatcatgtcatctgaaaatagataattttacttgtttacatccaatttggattcctttttcttaccaaattgccctggccagaactttcagtactgtgttgaatagatgtggtcacagtgggcatcattgtctcgttactgatcttagagtaaaagctttcagtctttcaccatttagtatgatgttcattgtgaggttttcatatatgacttgtaccatgttgaggtaatttcttcctattcctagcttattgtttttatcatgaaaaggtgttgaacttagtcaacacttattcctgcatcaattgagatgatcgtgtgtgtggtttttttttttactctattttgttaatgtgaggtattagatggacccatttttgtatattgaaccatatgcttgtatttcaggaacaaataccacttggtcatggggtataatttttaaaatatgctgttgawtttgctttgctagcattttgttgagaattttcacaacaatgatcgtaagagatattggtctgtagttgtcttgtagtgtctttrtctggctttgctatcaagataatgctgtcctcatagaatgagcaggaaattttccttcttcaattttttggaaaagtttgaggagagttggtgttagttcttcaaatatttggtaraagtcactggtgaagccatcagatcctaggcttgtttttgttgggagatttttgattactgattcaatcttcttactaatgataggtctgttcagattttctatttctttgtgagttagtcttggtaggttttgtgtttctaagagtttgtccatttcatttaggttatacagttcattgttgtgcagttgttcatagtactyttaataatcttrtttacttgtgtagatcagaatgaatatccccactttttatttctgattttagtaatttgtgtcttttctctctgtttttttctagttcagctagctaaatgtttgtcaattttgttgatcttttccaagaacaaacttttaattttttccatcaattaaagacatccttggctcttgataggtgatgaaggggcaagtgtatttttagctgttggttgccatttcaacgaaatagccgtcaactgtaattttctccaaaagtgggaaaayagagaaaaaaactaacatttttctgtacttcattttccatctgtaaaatggagaaacaaaacccatctgttgtgttttgcaaggctggatgatgtgtacgcattatatatgtagtagataacttctgaaattatagttataggatgaaatctggttatggtcttcagtttttcaggtatttcagggctctttctaagtttctggaccagatagtagcaattaatgaatactactacaaattattcggcatttgtcctgctcaagatctctgctcctttgggtaatgaggcttggtttctataagacagatagggatgacaaaggaattaggtcactaaaagcagtgaaagacttcagaaaccatgtttcatgtctttggtcttccctgatggatgctaaagccattaggtttcccccaacagtcagaacayaaagatgtgacttggagtactgtggccacctgttctgcccaagtgcatcagctgtgttcatcaactcacaccaagggtgggggttggattctcttcttccctgttgtgatagacagatgccctgtcattatgtttttatgtgaaatttcacagtgaaagaaggaagccactcttgagaatacagcaatttaaatcaggttgtaatttttaaaaagtgatttacaaaaggtctttcccaaaatactgccatcataatcatctagggtggggagaaaaatagggtgcggagggcagaatcacccctcatccttgctcttccagcagggaacactcattttcacacccytgtgcctctgcagccccaccctttgttgaggtttgtgctgggcatgtacgttccacagagwctgctggtttccagtgtgacagaaatctcatttgtgataaaccttgattttgaattgtagtaaatgaaactttaaaaaaagcagacattaaaactccctgtttttttccctaggaaaaggagcattccatcttctggcatcactgtccttgggactaaacccccttagaaaacaccgcttttgcctagccctcagaggcttggtcccctgacattttacacttttccagaaaaagaatctcaggggctttcctacaaatgtctgtcacaacctcaacaacctcacaacctcaagtctgtcctattttagagacacacacacaaaaatgctrtaaaggaagtattaatacttgtttagagagattatcaggaacattgtacttaacagtgagaaatctgaataatgtgtatatgagtgtgttatgttattctttgtactttgcattttcaaaatgtcccatctttttttttttttttaagccaagaagtaygataatacttacctggccaccacagatgagaattgaagtgcaataaaacttgccacaakctgggaggaaccagcagtgtgctgctacaggcttaacaaccatctttctggaagaaaaaccttgatttgtagcatgagccagtttctgtgtctcacatggccattttcaagctaccagtgtgacatcactgaactgtgacttggaaaaagaggctcacacttggctcccctgagcagtgctggcctaactccagcacaccactggattgaactgccaagaaagagtagctcccacggatagggaggaagcaaatgctctgtaaatacctgtagacagaggcagggagacctttgtagaatggagagtgttagggaccttcctcttctttatttsggaaaatcttagattacatattcattggttgatctcatgcttgtgtgcttatggaaataaagcatttagtcagtaaaatattgttacccaaggactcaataaccatgcagtcaataaactgtatatatttttagaggcttctttcaaacataactttttaagatgactttattcaaaaagagtaaacccaggtggaatatttataaagataaaagcttcagaaatccatgtgaaatgaaaattatgtaataattggtttgctcacaaatatagtaattcagatagttttaaaaaattactttgatttaaagtttgttaaaataatcaagtttaaaaagaaagtatatgggttgagtgatatccctcccaaattcatttcattttcccccggaacctcaraatttgatctatgtcagctcaggctgccataacaaaatatcataaataatagaaatttattttcttgcagttctggaggttatatagtccaagatcaagttgcttgaccatgttttaatttctgatgagggctctcttcctggctggtagttagacgccttctcactatgtcctcatgtaaccttttcgtggtgcatgtgtgtggagggagagagattgttctctctcttcctctcttataaggttaccaatcctactggattaggactttgacctcctgacttcctttaattacttcctaaaagcactatctcaaaatacaattacattgggtaytggggyttcagcatatgaatttggggaggacaaatagcagtcttcttaccttttttacattcatcacttaccaactctattcctttagcgtaggttgggctctcatccctatctttagttttatactagaggcagactagatatttatagcmraacccaccaactctaagaactttcctcttgtccatgacaatctgggagtgccatatttatacatttcagtatacctcttggttaacatacttccataacacaatttaccatactggtcatagcctccattttattgaatagttccataagtgccaggcacggtgctggatactctaaaacatcatttgtaatcctcacaataaacccagcaaggtagctttgattttctccattctgtagatgaagaaatccattcatttttttcagttatcttccacgtttactctaaggcagttctgagccctgggcatgtatgagtgaatgaggcaggcaaagcccctgccctcatggagcctatactctggaaggatgagactgatagagaataatacctaatgtcagatgtgatcagtgcagtgaattaaaatgaagagtaagagggggagagagtgaccgggtccaggaagttctcatgtatatgagaacaataaagtgccatgttggctgggggaggtcagagaggcaagagcagataggaccttgtcaccattgttgggactttgattcctaccctgaatgacgtgggaacacattaaagtgctttggggagaagagtgatgtgatctaaattacactaaataggactgtccttactcttctattgagagtagattatagggggcaagcgtggaagcagggaggccagcaggagcttattttaataatccaggctgtagatggtagtagcttagaccagagtgagaaacagtctgatcctagatgtgttttgaatgtagagctgaccgaatttgctgactaattgcatattaggcaagagagacatcaaagataactatgaagtctagtgcctgagcaagtggaagaatgaatggagttgtattcattaatattgagagtactataggaggagcaggtttgggatgatgatggaaaatctggagtttagtttgaatatgttaagtttgagaggcctacacatcctagtacagtcaagtaggtattagaatgccttagtctgtaatacagtgtaaagggctagcctgcagagatacatgagaatcatcagcttgccaactcaaggaggtgatacaattggccagacctgataagaggtgggacttcagggcccaggcttgcttgcttatatccccaaggccccttggacacatgcttggtggcctaacccactggatagtccaaatcatcaagatagagatggggtccttaaatctatggttttaaaatgttttctgagtaattctgatatgcatcaggttgaccaccactagtaaaagcctttagacaaggattttgttttttgragacttaggggtttccatctgaaactttgagtcccacaggaaatttgayggaatgggaaagagaatgggtttgggagtggctcagacctgagcctgaatccaatcttttcctgttagtaactatgagarctcggataggctttccaggctctctgaggttccatatcctttctttatagatgcagcccatccctctttctgcaaataggagtaattgaaccaaacccacagagttgtgaagattaagrtaaattgtttgtataaagctcctggcttagagtagacaccaattaaaagctaatctcacctgccacatataaaaccactggaagaaaactgttcttgaattttgtttcatcttcatttgggggcaattatcttctgcttctttctgttatctaatggcctagccttcaagatttcagatgttgtcagataagttggttttctttaccccccaccaccatcctttgagcccaagaccgatttgcttggttgtctgctatacaaccacatggrtattgttagactttgtgtttctgcagttgaagtacttacacacttccactctaaaatcttctctttgtcctgtgttctttatctcacatttgtatcatcacctcccacgttttcagtctagagacgaacacagtggttctcaaccttggctgcacattagaatcgcctttgggattttaaaaactgccgtgtccagaccacatgccaaaccaattacatcagaatgtttaggagtgaaatttctgaatttgttattgatctgtaacatacaaaaagtacaacacatatatcataagtatattgctcaatgaactattataaacttctgtttaaaggtacatggttcaagaaactgaacattgtcaacatcccaaaacctccttccacagatcctagctgcccttacctttaatactatacatttttatctgtcttgtaactgaaatatgatcatagaacatgtattcttttgatctggcttattttgttcatctttctatttgtcctacttctttcattctcattgctctgtagaattcccttgtgagaacatagcacagtttacttgtccattttctccactgatgagcatttaggtgtttgcattttctagatattttgaatagcacagttttttttttwaattttttttttattatactctaagttttagggtacatgtgcacattgtgcaggttagttacatatgtatacatgtgccatgctggtgcgctgcacccactaacgtgtcatctagcattaggtatatctcccaatgctatccctcccccctcccccgaccccaccatagtccccagagtgtgatattccccttcctgtgtccatgtgatctcattgttcaattcccacctatgagtgagaatatgcggtgtttggttttttgttcttgcgatagtttactgagaatgatggtttccaatttcatccatgtccctacaaaggacatgaactcatcattttttatggctgcatagtattccatggtgtatatgtgccacattttcttaatccagtctatcattgttggacatttgggttggttccaagtctttgctattgtgaatagtgccgcaataaacatacgtgtgcatgtgtctttatagcagcatgatttatagtcctttgggtatatacccagtaatgggatggctgggtcaaatggtatttctagttctagatccctgaggaatcgccacactgacttccacaatggttcaactagtttacagtcccaccaacagtgtaaaagtgttcctatttctccacatcctctccagcacctgttgtttcctgactttttaatgattgccattctaactggtgtgagaggatatctcatagtggttttgatttgcatttctctgatggccagtgatgatgagcattttttcatgtgttttttggctgcataaatgtcttcttttgagaagtgtctgttcatgtccttcgcccactttttgatggggttgtttgtttttttcttgtaaatttgtttgagttcattgtagattctggatattagccctttgtcagatgagtaggttgcgaaaattttctcccatgttgtaggttgcctgttcactctgatggtagtttcttttgctgtgcagaagctcttgagtttaattagatcccatttgtcaattttggcttttgttgccattgctttgtacatgtctgttatgcatgtacacatttctgatggatatacacctagaagtggagttactgggttgcagggtatgtgtctattcagctttagtaaacactaccaaattgttgtccagaattttctaccaatttatcctcctaccagcagtatttgagagttctggttgttccaaactctgaacacttgatctatctctgttttgtatactttactcagattctccaggtacctagaatggcctttcccaggtctctccctttacggttcactctttcagaaagcccagctsgagcatcatctgttcattagccttcccagccttactctttcaggtggaatttgttactgtgtcttctgcagtgtaaatattaatacattacagcctcacccacactctgcctcacascagtgagtgagcactctgactctccacctggataataagctttttaagagcagaggctgcacctcacttctttcagagtccccctagacatagcacttgcacattataggtgcttcatgaatatttcttttgctcactttatcacagagaaaatcttttaaaaatagatttttggtaaatgactrtattcaaccaggcagtgaaacttcacatttcttctgtatagggaatgcataattgtttccagtgtaacctccttattgattttaatcaatttaatcttttttaaactccttggtgtgggactcgtgatttggtgtaggactcatgatttagcttgggaactctctttttcggggaaaataagagccttttttctgattctgtgasagcacgtgatcactttttgtcatcctcacatagagcagattttcatggcataatttaagaaggaagtgcttccaaagagccagattcctaagggaagattggagtgaatgatggtaaaccatatagctttttagcctacctgagaagtggaactgtactcttctgtactttacgaaatggagtcaggagaaatgaaaagactcagtggtagccttggaatccttaacatttaattagtgtgaaggaaaagcaggcctggtgccaaggagacctgctctcaaaccatcctatgagaccacagagtgagtggtgtgatcagattgtatcagcagcctctagtgccattccaaagcacagtgggcggtcatggtacttctgaacaggaaagctttacctaagggtttgaaaaaatgatgtatacagaagcattttataaaaaattaaartgtttaaatgaagtaattcagtacacagtggggaagagcaaggaaaaactggaagccacaggcacctctgcatctttctgtcaccctctctaacgcacgccagccttcatagtattagggctgctgcttcaacttcacctcccaaatcttgcgcaacctcactttggaccaattctgatttttgtccatggaaacacgcaaggaagggactctgggcagtgcagttctctgtgcaaccaagttgtcagtagagcattccagaacacacacacagacaggggagcctggaaggaggaaagaaagaatattttccccagtatccagtgcctgttgtgttgtctgtgctggtttttgctgtttatcattgaacactgataacagtcttacaaatgagagatttctcagggattcacagctaactagcaagatttatagcctggatttttagctatgtctgtatgtgctcaaagctaatgttcattttaatggactctgctgttttccatggaaagcaagacctagtggttttcctgtttgtttgtttggattaggaaataaaaactaagatttagcagaagtactgagtttacagcatcctcagctagttgccacactagataagtagctgtaggacagaccaggcagtgactcacatggacactgcttttaggtcagaggaaaataactcaggcagggctagcagagcttccattttattctcagcagagcttagatctccctttggctgttcccagaattagaaagctcgtcagggatgctacagattatgctttagagttgggagttaagactgagcctcaactgcccccatttgtcttccttaaaagacagcataaattttaaggtcaaaaaagaaactactcattttagcagaggacaaaacagtggagcccttttgggaataggtcagccttttatggtcatcctaattttgcttcctgctgttttaattcacccaatacatttccttctgggaatcacctagaagtagattcatgggtttgaaggagaggagttaggtatgtttagaagagaagggacacagatctctaagggcacatacaacttggtaaagcaatccaggttgagagtatataataggaatttgagtgctttaaatttgtattttccaggctcactctcagtttcttaaagtactgcttcaaacaatcatttaaagataattatgttaacatttaaagatggttaatttggaggtctgatgatatttttaataacacagaagtttcattaacccaagattcttaatatgtaataaatttgtgaatgaacttaaaagctagtctcttcagatatgtgaattartaggctttttttaatcatttgaagtagataagctagtagaaaatggctttcttcctccttcttatgaaaatatagaacatatccaagatactcttagtaaaagaataaagctcttcataattgaacaacattcaaaatgatgtgtttgaaaatcagccacagtgtattaaactgtttagaattacttacctggagacagcccttaatagagccaagatataagcacttaccacatccagcttttataaaaggaatgcatccttaaatgtaaaatggcctgaataggatttgtagggattaactcatgtgtggtttcattactctgtttctcctttccttctattcattctgtgtgttttaggtgttgtttattttatttgcactgttttcattttattcgtgctgtcattcttcagtgtccccctagtaccatgatatcagccatgataatatttatcatacttgttgccactgtttatcttactcctcactatattgtgagcaccttgagggctgggactgtgtccttcctggatctcagatatgactcactgcagaaaataatgatattgttcccttaaaaatgattctgtggcattttctctttttaaaaaagagacaggctcttgctgtgtcacccagagtggagtggcaccatcatagctcactaccgcctcaaactcctggccttgagcaatctttccacgtcagcttccctagtaattgagactacaggtgggcaccaccatgccctgctaacttttaaatttttctgtagaaatggggtcttgctatgttgccttgctggtctcaaactcctggcctcaaatgatcctcctgctttgggcaccaaaggtgctgggattataggcataagccaccacacttagcctgcattttctatttttcaaacttaacatatgatcccttttatatgaaaaagcaaataagaaatgaattttatattttttccagtcaccaccagcctttacatgtgctgttagcctaactgctacatactgtttggatctaaacttaaagatacttccctccaggaatcctttgcgatgcccctccccaactgatgaggacagtgccgcatatctgggactctcctcaatcccccatcaaggcacttggcatatttacttcactctaattaattttaaaatagactctaccctcagttcattataaactttgtgaaagcagggaccataattgtcgtgctcattgtaatatccctgggacagggttgcaggatgtgctctcctgataacttttctcatctctattcaatgcctctaagactcaaagtttaaataaaagccttgtgaaataaatgtcaagattgtcagccactgaatgctggaagtaccttaagctgtgattctatctggggtttccattgaagatgggatttggggtatagtcctaggttaatgtgtaatcccaactctaattttgaacctgaggaacctaggtatcctagcatcaattaagtcataggctttaacaatttttttaataaagctgtttttgccactaacactggaattggtttctaggcaacttcttttataaaaacaaaaacaaagaaagagaaattgaaatgttctctttgaggcacaaaactaattttctctagttatgtgctggagaagtgattaagtcttttaaatgaacacagtatttttgctcttcatgggtctgtttaccatcagaatcttagttgagaaatgattttgaaaatagttctgtttcatacatggtataagtgaaacaaggcataaggcccactctgcaggaatttaccattggttccttattttaatccttagactcctagaattgaactataaaactagaataaaatttagagatcatcacataattcgagagtttgtaaaaagctctccatggaagcacccagctccacagagtcactgcaggggccaccacagtgaagggaggatggggaagggcacacagtgatagaatttgagcgtgtaatcctgcttcatccagaacagwrttgctgtaattcattttaagatcttaagggaaagggagagtttagtgctttaaaaaagtggttgataagactgactgacggagagaacactggagcgtactgaaggtacacttatcagtagctgagctactttgtaggctgctctgagacctgatcctccatccagccctatttccgcagtgtcacattgcctactctgaaagcttgttctctcttcaccttcagcttccagagctaagctcagcatgatcaacaccatgtcaaaaatccgtggccaggagaaggggccaggctatcctcaggcagaggcgctgctggcagaggccatgctcaaatttggaagagagcttggagatgattgcaactttggtaacaagtgcttcctcacattgtaattctttcatttgtccatggggattttggtgctggtaagaaattctgtagggaatcggtcaaatcattttatattttgrttttcagttttagatcctacacacatgggccaaaaatttgttttcagaattatttcatccgctctaatgtgatttatcttacaagttttsttcccaccccccccactataagacctcagtctttacaacagctttggttgacatatccagatgcctccttggcactttctattgggtgtttctggcagtcattgagtattgaagcagagtgagcaggcacagtcagcatgattcaaagccctccctgcctcatggcctttttcatagatctttgctcacttgtatatggtacctagttctactgcccaaggtgagacatgatttattccttcaccctgtctcccccaaaactcagctaccacacccaacatcttctattttcacccccttgtgatgtgggatctccttcctggttgaacccggctatttctggtacttgcttctgctaatagatttgccttaagctagtcccacattagggaaagctggtacttacaagagagggcagggagcttcctaaattgcttcttaaaggaaaaagtaactgttccattcttgatgagaggtatttaccctcttagggggcattgagtstgttgcctggagtgaactgaagatacctattctctcttgtctgttgtctttagaagacaagtggtaatcctttgggttttcatctgtgaagggccctgttattgcgagtgcatttcatctttattctgtaacatgaaagagctttattctctcctaggcccagcacttggtgaggtcggggaggccatgcgggaactgtcggaggtcaaagactctttggacatagaagtgaagcagaacttcattgaccctcttcagaatcttcatgacaaagatcttagggaaattcaagtatgtacaatgagtcttctggaaagtgggcagttgaaatcatacagatgcagatgccttttttcttyagaaaacatttttttagcttaccmtgtgtgttgtcagctctgggcacrttaattacaaaacaacccagtaagacaaaatgagagaaaccagaaatgtgatacttttcagcctgttatgactgtgccactcatgagggctgtctctggcttctctrtgtttgattttcatattgaatagtttttttcagactttttctccagaggataatatacttttcctgagaatacacagttttgttaattattctatggtttgctgggctgatttcacccactaaaatgttagttgtactagttgttagcttaaataaatagttattctatcactgcataagcacatatttttatttttttccaagtctagaaattagatggatgttatgtgtttttatattaatattttcataatggttgttaggattgaggaagaataccaactagccactttytaaaacatgtagagcagttgagctgtttataataaagttcatatgtctttgagtgtggaatgtttgctcacttttttttatctaacaaatatttgttgagcttttttgaaactttgttgggtgtaaaatggattgccataacttgaactagggcctcctcctccttattctagcttaaatctcctttagcagtaccatttgctcaagattatagagttagtaagtgacagactgaccctaaatccaaaatagaactctgactccaatgctgtaccctatagctcaaatgtttaaaaaagaaagttycttccaaatgagcatttagtttttggatcagggcatggactgaggggcgggggatgcagtgtgagggaaggtttagaatattattcttcctcctttccttttcatttttttaactactccctactttgttttcatttcctttcattctgctccatacatactagtaacaagggaaaatccaggattttccttcatccattagtagtgaaagactagctatcggggaaaaacaatactttttagctttggaaaactactttgctacctggtcactagagatgatgggtggagcctgggcagccatctaccaggtatggtgcaaggaggggattgaagctcagcatggagcattagatataatcccttggwaggtcccttccaagtgagattttgttcttgagttcaattatatgtcaagtgggaggcttaaactaaatcactggatttagtttctctggtgacagctgcatcagtcagctggggcaagtgttaagatgtagattcctaggcccccaccctagatatcgattcaagagctcaggaatccatattgtgatgagcaacttacgtgattctaacagactggatgatttgaaaagcaagactgccatttctatctcacttaatttcaaggaaagwgtttttcctctggcttctcatgagataccatttctcttgaagacagggcctgtggggcctgtgagtgtgtcctttcattgtgtgtagggcatgtgcattccttctctgtttctgtcatgggctgcaaaggcttagtccagcttggctttggcctgacaaggccagaaaataaagggcactgatatttcctataatttatcttttattcttaattatttttaaagatattcccccatatttagcctttgaaagcactggccccattgatgcatgtttctttatttctctggtggcgttgtattttaaaacttagcctatcttaatttggaagttaatggacgtgatggagaagtgagctcaaataagccttttccataagccctttcaaagcctattcctgcccttgacttttgcagcatcatctaaagaagttggagggtcgacgcctggattttgattataagaagaaacgacaaggcaagattccggatgaagagcttcgtcaagctctagagaaatttgatgagtctaaggaaattgctgagtcaagcatgttcaatctcttggagatggatgtaagtgactcctgtggttttcaatttaatcttatcatcraggcacaacattaatatgttaarggccataacccttaaaagcattaatrtctgattacactatgtgataagaacttcagtagatagttatttattttaaataattgtcagtcataaagtagactgagaaatagaaaagtttcttctgcattcctgtagtttaactagattctcgactgctaatgaatcttaaagtacagatgctccttaacttatgatggggttaaagtcttgaatatatcatgtaatttatcgaataatgcattaaaagtaaaaaacagaatggttgtaaggrtacttgaggtatggtttctactgagcacatatcaattttgcaccatcataaagcctacaaatcgtaaagtcagggaccatctctcttaycaatagtgggaagataaaggatatttctgaggatctatgtataactcaatagaggcctgagaactcagttgtggagcagggggcatcagtagtactggtgcaagtcccagagtccaaaggccagaaagcctagagctgtgacatccaaagacaggagcgtatgggtgtcccttcgctagaagagagagagaacaaacttgcctttcctctgctttttattctatctgggtcctgagctgagtgggtggtctccacccccatagggaagggcagctcttcctttgtttagtctactaagtgaatgccagtctcctctggaaacaccctaacagacacacccagaaataatgctttaccagctatctggggatcccttaatctagtcaagttgtcacctaaaattaaccatcacattgcctacttgccttactcctgactgtggcaggggaagtgtgttgaacatatccagactttcctaccacctggagacagtgtaggtttttgtttatgtaaaacaacttgtgtccacctaactcctcgagaggaatactgtgtgcatgaggggtgctccaaatcacagtgctccttccctgcaacacagcacccctccccatccccaaattcatgggacaacactgcttctgttgacttggaggctgctacccagctggatcataatgtgaaacataaaatcaagagaaatcaagcttagaatattagagcaagaatgaactcaagatgtcacttgatttaacccttttacattacagatgaggctcagagagcacagaagattttctgtcataccatgtcgcctctccgggtacattatgtgagatattgtcacatttttattaacagtaccgatattaacagcatgaaaagtataaggaacaaagagtcctttggccagtgtaccttcttttctatagaataaaagaagtcaaatcccagatacaagattgtagctaagcatgagactctttagagctatatggtcttcctgagggttacccatgttgcttctcctcatggtactgatacgcatgattctaagcataaggatgctttcttttatccttgatggatttgaaacctgcagaactatctatcttagttggcttatcacacagtcatcagcaccaccaaccaggggctgtgtgttgagggcagccctggtgtatgtatgaaacagtagtggctgtttagggatggtaacgtgtaaaactaaggcatgattttcccatcaatctgcagattgaacaagtgagccagctctctgcacttgtgcaagctcagctggagtaccacaagcaggcagtccagatcctgcagcaagtcacggtcagactggaagaaaggtattctacagttccctgcatttcacatttgcattttattgctataaaatgatgtataaagaaatggaaatcatagaatacatttggagacaaacgtctgccaaaattccgcttatcctacagaggcgccttgtggattgttttgattttgttttttcttgtgctttgttttacgttgttctgttgaatctaattttctgcttatgagagatcgatacttggattatattttggctgccacaggtggaacaccaggatgctactgctgataatggatgccatttgctgagcagttattccatgtgggtactggatacatatcatcatcaatcttataacagccctgtaacctaagtgtttttagcctcgactaacagatgagtaaactgaggctaagagaggtgaagtaactagcccagggtcactcagtggtgcaagtggagttcacagccagccataacctgtgtgagaggctgtttcttttcacatcttgtgtttctctgaatggcggtcaagtcctctgccatcagagagagctactttcacctcattagatgtacctcacagcagggctgtagtagtaggaaactaccgtgtgaatgtggctccgtggagttgtggggcacagcctgtttggctatataccagtggccctatgttataatatgtgttattttaatttagccagattaaacaggatgattttgctgaacatgtatacctcaaagggtcacctcagcaagcttttttcttaggccacatggccagattagactctcacagctgatcacatggctgcctgcgtgaagaagacaccaatcatacgattccacacctgttttcgttgttttccctcaggctgatctcatttcagtattttctttgattcatggtttaattgagcattttccttcggcgcagccttatggaaatttatgtaatgctgaagcctccagaaaggttttaaaaccatatacttcaaagatactaaagaaatactatgtgtctttgtaatgtctcttgagcatgaagggagccctttcctttttttcctctgaaatatgttcaaagtcagtatcattctacagttaccataccctaaaccctcgccctcccttgcatatctcttacatactttgtttattgaataactgaaactttggaaaatatttaggggtatgtagaagacaattattagccatacctttccaatttccttttgtcttccctctttcctttcctcctccctatatttcaaactgctcattcttctaagagcacacagtatatttcctccttccctctgtccaaaccttctcatgttctgaatagaatagctccctttcacattttcatctggaaacagctcctgtgtatcttttagttctctccttaaacctcctccagcttccttatggagagatagactccttcccaccttcacccacaaccacacccctgtgttcctgtggcactttgtagatatctctgacagtgcttactaaaatttatagtaatcagttgtttgtgttctgtctcccttacagaccataatctgtttgtgtcttttttaaaattgaaaaaattgtgggtacataggtgtatatatttatgagatacatgaggtgttttgatagaggcatgcaatgcataataatcatatcatggagaatggggtatgcatcccctcaagcatttatcctttgtgtacaagaactgtgttttaattcatttttgtgttcctggtacctagcacagtgcgtatttggataaaggactctgaataaatgagagaggaagtgagggattgagagagagaatgaagacagtgaggacatggccccataaagggacatcaccaaaatctcagacatatacatacaagaaaactaagggtccttttttgatttcccacacttcatcatggtagcatggtgggtgacccaagcatttcctgaatctttatatttgcttttcattttacttcttaactggttacataacctttccaccacttttctttttactgcagaataagacaggcttcatctcagcctagaagggaatatcaacctaaaccacgaatgagcctggagtttccaactggagacagtactcagcccaatgggggtctctcccacacaggcactcccaaaccttcaggtaagagctgaaactgcagatcctattgcatagcccttggcatatccattggcactcttccagaaattttaggaatagtccaatctggctgcataggaaatatgcagtaatacatttcttatggagtcagttgtcaggtagaaactctgttaaaggaatccttttgtctttttttcatttaccttttctttccttccttctcattcttctctataaaactttctttgtatatcccattttctctgtcaatcatcagcacacacgaacacattttgttttgaccctcctttgtggtcgtaaatcgcctttccttgtcagtttgrtctgcgagtgtcatcttttctcctgcgtgttcgctctgaatccagcctgtatgacagtgaatgcccctggacagtgtgtccccatatgcattcgcatataacccacagacagcaagcggctccagaaatgtgctgatgagctggatttcttgagtcacagaagcatatggttaaatatatttgyagaagawgatattttgaaactcgacacttgctgggttttcyttcccatgcctcacctctgatcactttatcatgctgtggcactggggttgatataataaaagctagatgacattttatctcaggaatatcgatgcataccaaatagagcatyctttaccttgtcacacttgctctccactcctacacgcagattacacaacagcctgtgctggagacattttcaacctccacatttgcttgtttgaagtgggaactgtcttatactggatgtggatgttagagataggtagctttcttttatttttcctgtatccccagtgcttgatgttctactgtagaaaactttttataagatgctctcaggagacttactaagaaaaaaagygaggtctgagccggcaggtggtgctctctgtcctttgcgctcagcacttcagggcatgacataagcagctgtggctcctggagctggccaccaggactagtcacagaaattgtgtatagctatgcttctccctgtctgaaaaccaaccatatatttcacttttcatctggagactcagtaatttgcttctttctctaaataaaaaaataaattacattgtttcctttccagccacctagatggcatgggaactgtgtgcacttgtctgagtctgtatctacatgtgtatgtatgtagtattaatacagcgggtcatttggaatagatccctcttaagatatgatttcatccttcattattttactcaaggtggrgtacattatttttgtatgccatagctccagtgcactgcatatatttatgtatgcaacagtttaccttaccaagtataaattacaaaattttttacataatctcatttagtagcyacagtagtaatgtgaagtaagtcctactgttacatccaatttcagacagtgaaactgagagcgaagtaccatgtgcaaggtcacagaaagtaaaaacttgaactcagtgttttatattattccgttttcaccacattacagcagttttccagaggctggggttatcattttaaagagtgataaccgaactgttacttaaaagcattctccatgtaattcaccatactttttcagatatgcaaaggttttaaagtgctcagatgagagaattcttgccatgctgtgttattarcctacatcattatattcttcttaagtcattgtccctcctatttctgggcattatcacgamggcaaactataatgaactgtgttgtatgtatcacaagaatagatgtgactgtttttcatactggaaacagaaacaggaatatgcagcaacttccaaaggtccgagaaagcttctgaggattggtagagggcaagatgcccagtgcagtggacactaaggtccagtagcaagaagaagcttcaacaggaagaggaatgagggaggaaagacggggagcagcaagccaggtgggtacagcaggcagcagattctgtgagttaaataccccttatccttttgtgttcttctcttctctcctgctcttactcccaggtgtccaaatggatcagccctgctgccgagctctgtacgactttgaacctgaaaatgaaggggagttgggatttaaagagggcgatatcatcacactcactaaccaaattgatgagaactggtatgaggggatgctgcatggccattcaggcttcttccccatcaattatgtggaaattctggttgccctgccccattaggatgttatgctggctggctcgcctcctcttgacccagatagttacggttaaccactgctttggcaatgctgcttataacacatcccaagtgcaggccgcagtggtccacgtcatccagccccaccaagtgactttggttgacttgtgggctcccacaggagtcatggtgatggatgatatcctcttagcctggtgggcrtggcatgtgctttttaaaacatcatctgagaccagccagtagtcacagaactgctgtttacacagttctcaggaggctgtggtttcttagaatatgaccatgagccatttcacagaaaaaccatcccaccgaagatattgtctatcaccccaggggccatctgaaggtctctttgcatttctccatgcaaagaggagaaagcttttgctttcacactgtcccttcccaaatatgtgagtcatggaattgtcaaagtaagccttccctcaccagcaaattgtctcctgatctgaatgaatttgtctcttaatgcatccatagaaaagtgttaattgtgggttcaaagcattctctgcaaataggcatctcagctcctcacacttatggctatttctgacgtatagccagttttcttccctccttgctattaaagccasagcggtaattccaaattatttttcagtaagacagttaatcagcattattgtgagagggactgaaaagaaattctccattatgaggaattgggaagaaatctggtatccaagcttaaatttcttgctatacagaaactatgtatgtatttaggctatttctgaagggcacagggaagggggaacaaatatcttcacttcagttttatttgtgaattacatgtttcatgaatccatttggcacagagacacaaggaagaaaacactagtaaccawctttccactagttcatakactgagaaacagtaaatacctttcctttccacttttaccctgtgttctttgaacatcatttgtgcagattctgccctcaatgaggaccaaataaagatgatttttgtgcttagcagtttaaggtatatggctgcatatgcaaaactctttcccaattcagtcgctacttttacttctgccctttctatccatcgtcttcattttgtgtgtacagtgctgtgtgtaagcttatcagtgtgtttttttatttgtatcagtcatgaaagtcctgttaggtatccagagttctatttatctagctgtacagactctttcagaggtttaacgtgctgcttccgatgtgccacctgcagtagtggatcatgtggagtgaaaggcaaatcttactgcttaatgtataaactctcaccacaggaagcatcgctgtttccaataaatattgctgaagacagaaccaaaggctctgctccttcattttgtgtcagttctttgggtctaacamtgggtggatgggggctggtttcagtctccattgctttctcatgcagccaaacaagacctggctccaacttcatatctacctctttacacgtaggaaaagtttcagcagcaaggaagtagctagcctggacattgggaccttcctggtaaccccaggaaggaggagaatttgggagagaagaaagtaaggagaattaggtctcatagatgttaaatgatatattgttaaaagtggtatcatctgaagaatataatgttaggaaggggaaataaaatatatcccttcgagtagcctcttattttctttcgtaattgaagataaagaaatagacatggaaaaatagtttgatcgaaagtcactattaggccaggtgcagtggctcacacctgtaatcccagcactttgagaggccagtgcaggtggatcaactgaggtcaggagttcgagaccagcctggccaacatggaaaaatctcgtctctgctaaaaatacaaaaatcagctgggcatggtggtgcatgcctgtagtctcagctactcagaagactgaggcacgagaatcacttgaacctgggaggcagaggttgcagtaagccgagatcacgccacagcactccagcctagggtgacagagtaagatgctgcctccaaaaaaaaaaaaaaaaaaaaaaaaaggccagtattattttctcttgatgtatatgtttggggtgtgagtgggaataggggagcagcaaggcacacaaaatgtgtattttctgagttcccaggaaaataaacatgttctttgtgtattaggggccatttctattattttgtgctgaggccaatagtccagattttctaatctaacatgaatagttgtaattaaatatactaagtttctgttagtccattttcatactgctatgaagaaatacccgagactgggtaatttataaaggaagaggtttaatggactcgcagttccacttggctggggaggcctcacaatcatggtggaaggtgaaggaggaacaaatgtacgtcttatatggtgacaggcaagagagcatgtgcagggaaattgccttttatgaaaccatcagatctcatgagacttattcactatcacgagaacagcatgggaaaacccacccccatgattcaattaccaattacctcccacctggtccctcccacaacatgtggggattatgggaactacaattgaagatgagatttgtgtggagacacagccaaacgatatcaaagttctatatgtgaactagtctaacgtgaaaatatttttttctagctgtatgagttctagagtattacagatcagttctctaaagcaattttaagaaataccaatgatattgtgactatagaaaatcataaagaatccaaagataaactattagaaaaatcagtgaatttaataggatcactagatatgaggaatatacaaaaatctatttctatatatcaatagcaatcagaaaaaatgtaatttaaaaaaatgtcattcacaaaggcatcagaaatcaaaaccagccgggcccggtggctcacgcctgtaatcccagcacttttggaggccgaggcgggtggatcacgaggtcaggagatcgagatcatcctcgctaacacagtgaaaccctatctgtactaaaaatacaaaaaattagccgggtgtggtggcgagtgcctgcagttgcagctactcaggaggctgaggtaggagaatggcctgaacccaggaggcggagcttgcaatgagccaagatcacgccactacactccagcctgggtgacagagcgagactccgtctcaaaaaaaaaaaaaaaaatcaaaaccatagatacaaatctaacaagattgtacctgatctctgcatagaaaattatggaacatatttgagaaagcaattgaaagatattctgtgtttttagattggaaaactcagtcttgtaaaggtatcattttcctccaaatctagctgtttattaagtgcgatttcaaccagaaatcttaggaagtttgtttccatgtgttcgagaactgacaagttcaacttttaagcctgtcataaaatttttgtggaaaagaaaaaagatgttttttctcaaagaagaacaaagttggaggactctttctagatataaaacattaaaaagttacagtaattaaggtagtatggttttgatacaaagatagcagaatagattgtatatacagaatagcgagtccagaaagagacatagatgcattcgaccatatttgaaggaaaagcattccattatgtttaatgtgatgcactcatatcaactgaacctttttaatatcagttccataaccccaaagtgaaaacagcaagactttgtgccaaatacagtaatctcactatgagtcaatgtcacatgaaacaagtgtcatgaccacagattccaggaagaacttactcttgatttaaggaagagttttggagaccattactaatgcactcaccagatacaggactgtttgaattctttatttttattgaggtatagttaataccttagtacaaaaccttatgtatggaaattactcagtggaccaccactagaagttgaacttgccagaaaacacttgttcttccaagtcaaatcattgaaacaaactgcctaaagtggaaacagaagcagaattaaactgaactaaaatgattaataaattcagtggggcaatggtttcgcttctttttctaataggtctactaggtttaataggtcttaaagagaaaactcaaggagtatagttattttcacgtagtttctctttgccataaatcagtagacaataagaatgatatgacctagaatggaagtttccctggggctgtgtatagtacacaacatacattctggaacgtgccaagtcctgttctgcatacattatttaggaaattgagattagcccaactctccattttcaagatagcttctagtgttctggatgaaaccgttaatatgtgggcacttttattttctttcactgagatcccaggaaacagtatgtgggcacttttaaagcctgtgtttcattagccagattaagaactactgctaaacatgcagactgccttccatcccacggagatggggaagtgatgaaggagggacgttatgctgaagaaggaggcagacagctgccattagaactctgggtggtggttcgtggaagagacttagagtgctgcaaggccataccagcaatttctaggcccagcttttggggactagttatgagccccttggttaaaggggctgtcaaggaaaagaacaaagctattttttaaggacccattgaatgctaactgcttacagtcaggcagttgaatgttactctgctatcatgtatgcctaagtgatggcagccttccacttaagggcaggagacaactgtgattcttgacagcaggggagcaggctgtcagctttgggagcaaaagaatgaagcacagcatctcactaccactttcttgaaaaggaaactgaatatgatgatttgctagtttggggaaaggccaaagaatccatttttaaatagctctgtcagtgatttttatgtgcatcccttatcaaaacgtctgcctccaggacacgtggagataagaaatcaagaacctagagtttcttaagcttacctgataataagagtcacctggagataactacaaattggatttccaggttctcattacagctgctcagaatcagaactgcccatagaggggcccctagcaagtggtatttaccattgaaagatttaggagaaactctacagggcatctaaaactgatatgtgctttatcacctgggtattgttaaaacatgcctggcctccatctccagatgttctcgttcagaatgtctggagtggggcccgagaatgtgcatttctaacaagctccatagagatgttgccagtccctggaccacacttgaagtagtgctgctctaccaaataaacttaggaagagccagctcttggccctgcctttggtgttgagaatgaccagaaaacagacatattcagtcattttcctcaactgaagtgttctttgggctcacacactgaataaaactttggtggagaatgatggcttagggaaatccaggcattttttacagaccccagaagtcccacttgagttgtgccccggtagcctcttaaacatgcccttgagggtcagcatcaggttttttagcaagcttcccaagcaactctcccattcctgcaagtctggggagctcttgtgtgtataaaaactttttaaataagtagccaactgctcactgactttcttacctactggttttgctctgagacatttgcatttattgattgatccagtaacttcaatgcatgtttccactcagagtgatcttgcaaattcaggacatcctgtgtttttccaactttgctgacgacattaaagatgcgctagatttgagtctgtgctgacttggaattcccacttctttcctggtcattcgtttacgctttgctttccgcttcccctcttgcgagggaatcagagagatatgtctgcagttagccccatgttcctcagatgggctgctcttagagctcttgcttttcttgtttagatcagtgggtcacaccctgcagttcataccagaaccctgagggatacgtgctaagatgcggatttctggggctgacaccgacgttctgattccattttctagaacagggccaggatccacatgggtgacaggcatcctgccccaccccatggttcttacagaggcagcgttcaaagccacactctgaagaacccgccttcaaatttgggaattctttgatttgtgagtgcagtggaagaagaccatttaagagatggcttggcaaccaagaaggggatatgagggaccagcttcctctcacattgcaatacaagtgcttcccatgaaaagagaaagttaacagtattgcagaatgcacaggttaatccctgacattaacagtgacacacacttctctcttggtttttcttttctggaatgaaaaaagatctgaatttattatgtatgaaatagggatgaagaaggaaggtggttcgagtctgaggaaacatagacttactgacttcacatacccaatcatcaaaattttggtgccatctaattatgtattgtcttttatgttctttttaaattcttgttcttttatttttcccaaagtattttcgtgggacctagattgccctctactggcctgccccaaaattaatcagttgccaatctgaccaattttcctggtggttatatagtcatcatatacataagctgcatttaaggtctttctttctcacatagcatgctgcttaaactattgctcctttaataagttagtcatttttagcaagtattggtgtcaaagtgatatccagtaaatagtatgtgatctttgggaaaagaaccaaattcttgttcttctaataaaaagcgtgcttgtggatcagctggcatagttacccagtgactgtcagttttactagggctgcatgtttgccctataggaattacccaaactccttgaactgcttgatgatctgcagtctcacctcagctttctgaaacagctgaaaaggtgtaggtcacagtatttcaccttggacatcagccctagaaaaatgccgtatctaaagacaatagtaaaagttatacagtataaacaacagtattcttatgagtaatgcttagagcagctttataaggtacaatttacctactataacattcacccatttgaaatgtacaggttaatggttttcggtaagtgtatagaaacatgcaaatagcaccaaactccagttttagaacatctccatcacacccaagagttgtgcccatttgcagtcgaccctgcttctacccccatcttcaggcagccactaattt

SEQ ID NO: 6862 - DNA, 546025 bp, Homo sapiens
  misc_feature (1)...(546025): n = A,T,C or G, or insertion/deletion polymorphism (see Tables 1-2)
ttgtttgttttgaatcagggaacactgagatcctggtgagaagtgtggacccctcttctctatcccctacctcctcccaagccataattctatctatagtctcagccaaatccctgacacccatacatggcccccagtttaggaatttctgttctagtatggatgttctttaaagaactaaaaatagaacttccattccatccagcaatgccactacttgataattatttgaaggaaaataaatcattatatgaaaaagacacatgcacacacatgtttatagcagcacaattcacaattgcaaagataaagaactaacctaagtgcccatcaaccaaagaaaatacggtgtatatatacaccatgaaatactactcaaccacaaaaactgacaaaataatgtcttttgcagcaacttggatggagctggaggccattattctaagtgaagtaactcaggaatggaaaaccaaatattgtatgttcttgcttgtaagtggaagctcagctatcaggatgcaaaggcataagaatgatataatggactctgggaacttgagggggaaggttgggagggaggtgagggatagaagactacatattgggtgtagtgtacactgcttgggtgacaggtgcactaaaatctcagaaatcaccactaaagaattgatccacgtaaccaaaaaccacctgtaccctcaaaactattaaaaaaattttaagaaagtatttctgttgtaaagctcatgcattttgcctatgtgaaatcccattaggttttgctgtccaaggtgaatcattctttgatagatcaggaggttgaagacttcggttctgttgataaatttgactcttactgctatgacttggataagtttttaactactctaaacttaagttttttcatctataaaatgatgataataaataactgtcctataggataattgcaggatgaatataaaacaacatataagcaaggaaattgcaaatttcagactagaagaacttagcccaaggtccatggacaagggatgagcttcagagcatcagcaaatgccctgatattttcagcaaaatgtgggtttgtgccacctgtgtgtttttcatcagaagtttatgacctcaagaaagtaagaataagtgcttctagcatggactttatgatatcattgttttgcttatttcccaattctaaactacatttcagataggaagagctgttaatttactgacttccaggttagagaggcattaatatgtacttggtgtgcaaaggatcctcagtgaactcagcttaatgaattaactatgatttcactaattaactagctaatgaattaactattagagaatgtgtacccatgtatctgcatagtcatactctgctactttgtagctgatatggtctgaatgtgtgtctcctccaaatctcatgttaacatgtgatccctagtgttggaggtggggcctagtgggaggtattggatcatggaggtggatccctcacgaatggcttagagccatttccttggtgatgagtgagttcttgctctgttagttcatgcgatatctggtggtttaagagtctgggaccgctactctctcttgttccctctctcttgctcccactcttgccatgtgatatactggctccccgtttgctttctaccacaagtgtaagcttcctaagacctcactaggagcagaggccagcatcatgcttcctgtacagtctgtagaactgtgacccaaaataagcctcttttattgataaattacccagtctcaggtattcctttatagcaatgtaaatggactaacaccgttagtgataacatatagttcacaaatagactaatggatgtagatagctatgctatatttaccagtagaatctatattattttaagtaaataaatagattacctgggctaacattcttacttcattaacgaaaataaacaaattggtcttctcagtgtctgttatctgtactggtttcctttcttcaaagggatatcatgaagataaataaagatatagctattaaaatgtttgaaatttcagggaaaattgcaatgtaatgaggatgatgatgaggattagctaattagagttattgtttattgagtatctactaagtaccagactctgttctaggcatttaatacactttgtgtttaattttcaaaacaacatttaaagataggtattattgccctcattttataggtaaagaaacctgagacttaggttaagtaatagatccaagttcacaaagctagtaaatgtaaagctggaattttaataaaagtctgtttgactctacagtctgttattttttttctacagttaatatagcagaaaatatatttgtgactcttaataaggcataacccagccctataaaatgaatttttcttattttcctattgcatttgaaaattgtaatagtcagtctactaactttaaaaaacttaggatgtacctaaaactcaatttaacctttatattaaagttaagaaatgcccttgaaaggtttcaggcagggggatgatatgatcagattagtgtctttggaagtttgctctggctgtagggttgagtgggttgctttggatgtgactgggggcaaggaggccaagagagaggcttttttaacaatagcaatggggttggagagaagtgaatggccttgatgactatttagaggatagcctggataaatcttgttcattgactggatatgggaggtcaggatggttagaaatcaagacagacacccagatttttgggtgaggccttacatcctttctggtattaggatagggggcaggttattagggagagatttataggtgaaaatgacaagtgcttctgggacatactgggtttgaggtgtttgtgaagatgttacaatgacctttgggaatcggttttgaagtttaagagcatgatctggacgacaaacttagttttggaagtcagcatcatattggtggttaagttaagccataaaagtagatgaaattgctcgaggagggtatgtagagtgagaagtgaagagaatttaggcaagaatcctccagaacaccaagatttaagagacaaatagaaggggtagctagagaggtgtggtactgtgttgtcacagaagactgtttcaagatggaagggatgactctaaatatttaccccaaagagaatacatttattcacataaagacctgtacatgaatgtttatagcagttttatttcataattgccataaactgaaaacaacaaatattcctcaagtggtgaatggatagacacattgtggtgcatctgtacaattgaaagctgtacttatcaatgaaaaggacctacctacctatatacacaacatggatggatctcaaaagcatttgcaatgtgaaagaaattgaacatgaaaggctacatactgtctgattccatttatatgatattctagaagaagcaaaatcatgagaacagagatgagaccagtggttgccagaggctggagttaggaggagtggattgactatgaagggacttaaaagaactgtttgggggtgatggtcatgtaatatattgactatggtggtagttacatgattgcataatgtatctaaactcataggcctgtacacctacaaagggtgaattccactgcctataaattatacctgaataaacctgacttcaagtaaaaaaatcaaaaacaaaagggagctgttaaaatgttcaacacagctttaaaatgacataagaagaggactgagacatatccatttggcattggggactttacagggagcagtggcagyggcatgggggaggcagaagccagaacgctaagcattgaggagaatggcaaagattactggttgtctgtcccccataccaattttccccttcttacatgggaatggaggtctcaacttttggataggctcatgactatgcagagtaaagacttctttgtctactctccctggaaactgaatgtagccatgtgactgaattctggccaaggagatctaagtgtcctgaggcagcttctgggagcctttcttaagaggcatcaggcgtgcttcctttacctacttttctttcctctttccacatttatgttggctggaatgcagacataagggctagagccagagcagccaacttggaccatgaaacaattttaggaagggagaccacatatgatagagcaatgttttgtaggagcctggatctctttgctctttcaggagttgagctgataaactggcccaggacagcttatctctgaacttttaagacacaaaagcacatctttttcctgtttaagcctcttaattattcacacatgaacttaatcctatatgcaactggaaagggacatggactgggggagggttttatgatctccgaattcacatagaatttctctgtgaagggaaacctggagttgatacagaatttccttccacaaaacagctctttgaatcttcactgggtttgactttgcatctcactctcctgaggaaaacgaggagcagtgaatccactgagaacattttgcacggttctcttcccagccccttgacatgtggagcagtctcccatctagagccaccatacagagttgactggcaggaaagccctagccctgtggcttgcatatctgagccctctcccctttcaaccccagtccctcaggaaggctttccctgaacacctacctaggcacatccacttcccttttattctccatcaaagcatttttttaaaaaaacacgtctttattaagacataattcatagaccacaaaattcacccagagtgtataattcaatagctttcagtatgttcagttgcacaatcatcaccaaaaattaattctagaacattcatcacagcatctaattacttaatttttatagcaatattttcagcctgtgacgatatgtttatttttgtctttatctgtgctttgcctttctactttaacccgtgagctcctgcagggcagggactgtgatggctatgcttatgcttggtgctgcgttttcagcacctggcagacaccgactcacagagggacccggctgcaagatagaagaaaagcctgaagctgtcccatctactctgtattgtagcaggtgcaggacacctggatgacaaccaggtccctgctctggaaaccgttaggagtagaggattctcagagggggtggaggcagggtgtgcgtactccaggtggcttattaccgcggggccggggccgtggtaatttgggaaaccatagtcaatatagctattgttttcaaatagcagactagggaaactgaccctggacaatgtcttcctggcaggcgggaacacgcagaatttggagtgaaacggaaaggggcatggggtcgccaaggtggtgaaacgccgcattaaggcgcttcaagatagctggagttttgcttgggaaactcagagggatctcgcccggccggcacaatggcgtttctgaacccatgcccagcccactgggggcagtccttgctgcttgcagaggccagacgcttcttgcaacttctaagcggcgagagctgccaccttgccaatgactcaaccgtttgcctatgccctctgggctgtgccaccagccgcagccgccctgctcccccacccacccttctccccaggctccgcgccgcgccgccagtcccaggggagccgccggcgcacctggcgcctagggcgcacggcactgcgcgctggtgggcacctcacccgacgccagctgccagcgcgctccctccccgaaaccctgaagtggggtgtcttgtctagcgcccagcgaacaacattatccaattgcttcccgttttattcgcaggctgggagctgagagagcctgagcattcactttcaaccctccaggggaggagggggtgcgggtggggaggggagacggctcccagctccacctcgcgcgcggcgcggccagtgcactcggctccgggagaggcgagcagcgccggtgagccccgcagcagcgcacccggccgcggagccccgcgatggagtgagtatccccgagccgcgccgccagctgctctcctctcggcatgttgccatggtgaccgcggcggcaggcagatcccgctcgggtccgcgtccaggatgggtgtttaatttcagccccgtgtgtacgcctggtgtttctatagcagccgccgcggcggcaggaggcaaggggtgggagccccgggtggcgtggtttttgcggctgccccttggctagcagggcctggggggcgagtgaggggagtagatgatgttgctaaggacggaggcatattctaggctttcctatctctgccccaagcttccgcttatcggggagttggccgcaatagccatgacttccgattcctaaccatgtcagcattattggactgcagttaaaaaaagagggagggggtcactgcggatcggaagcaaacgcggttcagtgtgaagcgtgtaatggaaggatgagttagtgggtaatatgagccagggctgcaatgtcctggctactagaaaccatcagaagacccaaaagaattgatttgttcctggggtattggagaaataagacaaacatattggcggcagcccggagtggaattacaacgtttggcaccgtgaatacggcatggatgggtggggaagacaagagaggcattaaccagaaaagacattaaataaagggctccggttgtgggtctggtctaggattcctctcttctctgtgtttgcatccctacattgctttttggacactctctcgagctgctgccacagcaggaccactctgacaggcgacagccagccactccaaggaagggtcatttttggagccagctattagatcccgctcacttggtcagcttctcctcttccgttctcttcccacactactccttgacattgaggccgtctgaaatcatatttcaagttagagataaagtcatgttttcagacatcaggaccttcgtaccaaacccaagaaaccttagatgcagcctttatccctctgcgtatctgattgtgtagatgcaatttaatcctcagaaaggctgctaaagcagaagtgagagatggtgtagcattgtaggagtcacagtcatggatttcaggccccacctagcctgatactgctgttattgatttcctactccagcaattgaatgtctctgagcctcagtttccctatctctgcaatggaaacaaagatgttccttactcactttgaagcattattgagaggatcatgtaatatctgtatctcttccaaagggctttgtaaattgtaagatatgtacaaatttaaggaactagtgtcatgtttaagagctgggctctagagtcagattggctggtttgaggcttctgacactttgctgaatgatgttaatctccctgggcctcattttccccatctggaaaatgggaataataatagtaactatttcatgtactttttgtgaacattaaggaagttaatgatgtaaattgatacatacacatataaggttcttagaacagagcctggcataaaataagctcaataaatatcatctattatctatgaatattatctattattattaggttggtgcaacagtaattgcagtttttgccattactttcaacggcaaaaaccgcaaattactgttgcaccaacctaatactacagtctacagcatttattggggtttcggattggcaccaagctattcttcattttagacagggtctcactctgtcacccaggctggagtgcaatggcgctatcatggctcactgcagtattgacctcctgggctcaaacaatcctcccacctcagccttctgatgggactacaggcatgcacaaccatgcccagctaatttttaatttttcatacagacgggattgtcctatgttgctcaggctagtcttgaactcctgggctcaagcaatcctcctgccccggtcttgctgggattataggtgtgagccaccatgcccagtcttttttttttttttttaatttataaagaaatacatggtgtggtggttcatgactgcaatctcagtgctttgaggacagaggtggtaggaagtcttgatgagcccaggagtttgagaatgcgctgagctataattgcaccactgcactgggtgacagagcaaaacctcatctcaaaaaaagaaagaaaggaaggaaggaaggaagaagaaaaagagaaagaaagaaagagaaagaaagaaagaaagagggggagggagggagtgagggagggaaggaaggaaagaaagggaaagacaatgcctgaagggcaattgagagtaacataattcccaagataccactgttgatgtgagaactagcaagaagccacagcaggcttggatatacggaacagactcggcctgatgcacacttcattcttgttcctcactgtcattttcttagacatggagactgtcctttacaagagactgaacatagatctagtcctctcactgggtagcgctaaaggagagcctggtcatttgccagggcagcaactttcatctttatgctctcacatggataatctaatatttgatatgtttctcccagacttagcacttgggtgctcaataactggaacagcacacaggattggtaagtttacaaaggtcctcagctttttcccacattccctctgagtctcctggctaaggtttcctccaggtgtgctaagctcacacctggaactccttgtgaacaaagaccttcctcatcacattcttcttgctccacaggatccaaattactgcctcaattagcctccttctccctaatcaacttggcctcagctttcccattcccaagcaacattccaaagttctcacttcctggttaaccttcccaatttccaactctgttttctgccctacttcgtttgcttccttaatgtrttaggctgttcctgcattgttataaagaaatacctgagacagggtaatttatgaagaaaagagctttaattggctgatgattctgcaggctgtatagaagtgtggtacaggagtcagctcagcttccggtgaggcctcaggaagctttcagtcatggagaaaggtgaagcagaaggctggcaagttgtatggtgggagcaggagcaagagcaaggggtggcgggggtgtcacagactttaaacaaccagatctcaggggaactcactcactattgcgagtgaacaccaaggccccatccccaggattcacccccaggaccaaaacacttcccaccaggccccatgtacaacactggggattacatctcaacatgatacctggagggggacatccaatctacatcacttaatatagtgagctttttctttcttttttcccttttagaatatcatcttttcctgtccctccttgggtctcacaacatttcccttgtgccaaatactgcccctacccttcaatctaaacactccccaratttcatccccggtaggaaagcccactttgaatatgagtgaaatagggactccattccccttacttactgtaaccaacttatatttataaacatttattaaaagagggaattaaattcacttcttttatgttttaatttaaccaacaaaygtttgttgagattagcactggtcaacaaaacagtcatgattctctttgtctgatgagagatagatgttaaatcagtaaatatgtgtgtatactgattgaatttctcctcagaaaaggggtttttcttttctatcacattktcaggctgcaaattttctcaacttttatgctctgcttcccttataaaaccgaatgcctttaacagcacccaagtcacctcttgaatgctttgctgcttaggaatttcttccaccagatgccctaaatcatctctctcaagttcaaagttccacaaatctctagggcaagggaaaaatgctgccagtttctttgctaaaacataacaagagtcacctttgctccagttcccaacaaaattttcatttccatctgagacctcctcagcctggatttcattgtccatatcgttatcagcattttggtcaaggccattcagcaagtctctagggagttccgaactttcccacattttcctgtcttcttctgagccctccaaactgtttcaacctctgcctgttacccaattccaaagttggcttcacagttttgactattttttcagcaacacccaactctactggtaccaatgtactgtattagtctgttttcatgctgctgattaagacatacctgagactgggcaatttacaaaggaaagaggtttaatggtgaactcacagttccatgtggctggggaagcctcacaatcatggcagaaggcaaggaggagcaagtcacatcttatgtggagggcagcaggcaaaaagaaagcttgtgcagagaaacttcaattttaaaaaccaccagatctcatgagacccattcactatcatgagaccagcaagggaaaggcctgcccccatgattcaatcatctcccaccaggtgctttccaacacatgggaattgtgggagctacaagacgagatttgggtggggacacagagagaaaccatatcaccaaggtttccaatttaaaatgaaacctagtgaaaatgaggatacatagtcatttttttcacaagtattgttggttttagtaaaataagagcttcttagtttaagaaaaaaaaaaaaaccccagccataaaagagaatgaaatcatgtcctttacagcaatgtggatggagctggatgccattatcctaaatgagctaactcagaaacagaaaaccaaatattgcatgttctcatttataagtgagagctaaatgatgtgtacacatggacataaagatgaaaataatagatactgggaacctcaaaacagggaagggtgggaaggcacaagggttgaaaaattacctattgagtacagtgttcactatttgggtaatgggtacattagaagcccagtccccaccagtatacaatatacccatgtaacaaacttgcgcatgtactcacctgaatctaaaataaaataaaatttacaaaaggtctatcttggaaaagaagaaaagtctaatttccaccttaagaggctagaagagcaaactaaatccaaagcaagcagaaaaagaaataaaagaaagaaagaaaaatctaggtaataaacaagaaaagagggtactaactgattgaagttaaaatttttcttagtgacatgctctgtactggatgtgtagaacagagaagacctactggaaaaccagaaggtagggttggtgtcatgttctgtaccatgtcagtgttcttgtgtggtacatgaaacatcaggcaatggcaggtacttgctgccctcctgggtgggttgggtatgagatccatgtgtttgyaggaatgcactttaacacctgcagttattaatttgatgccacacctatagattttgcctcacacttctctggaatggtcttcaaaacagtatgggatccaaaaggcacaaagaacataacacgagaactctaagttgttgcgatccctgtaagccctggggctctgacaatgtgggtggcagccttggaccagaagtggcattccccatcaccagtcagatgcctgttatcacatggacttaggcttatagcatccagtggtgatcatgaaacatctgaagtttgattctgcaaatgaataaatctaggttcatgaaagaataagtgcagtagggacattaagttacagataacttaaggttcttaacatatgccttcattcattcatccagtaactcatttagttagcaaatatttattgaatactttctatgtatgaagcactgtgataggtacttgcgataaatggtgattaaaaacatcccttaccctgtcttcaaggagcttacggcttagtctatgtgtgactatggatactttgtgagtttgaactatttttcttgctgaatcagtcttctgatgacacaaaatgtggcatttcgtgtgctcagcatatggtgggcattaaacaaatgtgtttagaaatgtgtaagacttttagaagttaatttctatgatgaaagtaatgtatgctttttaaaacaattcaaatattacggaagtttatgaagtaaatatccccattttccattctctcactcatatctcagttcctagaggtgattaccatgaacgcttgggaaacctctttccagatattttccatgcaaacatcatagagttggaaacacttatatatatatataggtttaaatatttcttttacataaatgaaatcataccacatatgttgttctgcagcttgctttttccacttcatattatattctacatactttttcttatcaatgtatgtcagcctgtgtagctcagtggtaaagcacatgctttgaatatcaatatatacacatctacttcattcacttttataaaactgcttagtatttacttttggaatatcattaaccagttcttcatgatgaagagttagacttgtttccactttttgctactattttcaatgctacaatgaacatccttgtccacactgcaaataaatctgcatacaattttctagaaatgaaattgctgggtgagtgaatatgcacattgtgaattttgttagatattgcccaggtgcctccgaaagtattgtatccctttacattgccattcatcatgtttgagagcccctgtttccccaaatccttgacaaccctagccacattatatattcatatttgaatatttatgtttgactagtctaacttgatgtacatcatcactgtcagtggtcgtggtctgtgctcttgctctgtctacttgtcactttctcagagagccctagtaagccacaaggtgcaawtgttcagaagacagtgaaaatcacttacaaagacaaagcttaaaatatctcattgacttttaaaagtgatcaagtgattgttttacagttcatcaaatttagactttattgatagatttcttaccttaaagttgaggaaatgagcacatgtcacttagccccccttttaccatttgttgcagttatagtgtgatatagtttggctctgtgtccccacccaaatatcatctcaaactgtagtccccatgtgttcaggaagggacctggtaggaggtgactggattatggggatggtttcccccatgctgttctcatgatagtgagtgaattctcacaagatctgatagtttaaaagtggcagtttcccctgctctttctctctgtcctgctgccatgtaagacgtgcctgcttccccttccaccatgattgtaagtttcctgaggcctctccagccatgcagaactgtgagtcaataaaacctctttgtttacaaattatctagtctcaggtagtatctttataatagtgtgaaaatggactaatacttagtgttagttttatgttttcaaagtttttagcatttgcaaatttgaacataattctcttaattcattcaatcgacggattctttttgagtgcccttttcatcctaggcactgctccaagcactgagaatacagcagtaaattgtcaaagaggcaaaggagcttatattgtgttagaggagacagacaatacatatattacatatatactttgtcaggaagcaataaatgttaaaaaaattaagcacattaggagactggagagtgatgggagggttatttttgatagtgtcatcagggaacaggtttctgacttggtaagtttggatagagacttgaacaaggtgaggggatgagacatacagaagaaggaagagcagttgcaaaggtcctgaggcagggccatgctttgtgggctcagtgttagtcttggatctaaatgcagtcagaacaccaccagccctttcatcaatgacatcctcttttttgagcatcttataggttgatttagtgtttagttaaaagggtttgttttcaaacagggccaaagtgtattaaattctaaatgcctgttggttgtttctatgaacaaacaagttgaatgtgtataaaattatagaatcatgtttttagcccctcataattctccaagatgtcattccattgtgttytggcattgacccttgctctgggaaggtctgaggctagactatttcttctttgtagatggcttgcctactcccatccctcccactcctgcaatttttttttttggctttgatgctgatcaagttatttttaaacactgaaagtttggtaacttctctttgatatttcttactgtaagtcattgtgttgttgttttttttttctggaaaatggtagttcctttgttctgaagagtcatattttcctttatttttttgtaaagatattttccctgtggctttcaattgaagaatctatttgttctgttatctaccacagggacatctattacccattgctctccataactattaattctgaatttttctcatttttttcctgatgttcctatgagtttccttacatttaaaagtctgtcatgtagatagttgactctctttttaagcagcagtttctaagtagggctcacttctgaaatggttttatggttatcttcaatttattttctggcttggctagcacattttgcactttttaaaataaagagttcatgtatccaatttttttgaatgtatggagagtagtttatcagaaaattatctgtattttttgggctatttttctgaaatgtatttatctgccatttgctggtaactcatttttataaaaataataactctgcatatagaatctatgcatgttaatggctttgcatttattatccatttccaaatagaggtaattctatccaaacctactatttgcccaagaataggtagaggggatggagacagtgatttgggggagacattagctttggattggatattttgtctcataaaaaattcttacaactctgcaatatcttctgttcaaaaaagttgtgtagagagtgagcagatcattcagacagatcacatatcccagcttactgagtgtgtgtgagttgcgggagggtagacagatttttggtgctttaccactacttgatgacttggtttagcatttatgaagagagtggcagggcaaatcgactacaaaggtaattgctcttttccttctattttcctacatctcttgccttgagatgattcctccatgttaaggttttcagttttcgggttttgcagataataaacattaaggattcacacagtagtgccatcggtgtcactttctccatcagttcactctggtagggaaccagccccttcacacagatgtcccccacgttttgccagttctcaccaccaaacattgggcctttgtgtactctctccttacttagagagaaatttgaaagccagttaagatctgtagaggactatatcaccttttagggttgtccactgatttaataaaaattatactctgtttggcagataattcttatagcttgtgatttgagaattgtagctctttgctagtttcatagtagatcaatttattcatttatttatttgttttttagagatgaagacttgctctgtcacctaggctggagcatagtagcacaatcagagctcactgcagccttgaattcctgggctcaagagatcttcttgccgcagggcccaaagtagatgggactataggcatacaccatcatgcctggctaatttttaaattattttcatttttattagagataggctctcactaagttgtccaagttggtctcaaattcctggccttaagcaatcctcccacttcagcatcccaaagtgctgggattatagaggtgagccaccatacctagcctcacagtagacacaattttccttccaatttttccttcttttagttcatttcagcggctttgagggaagcacagagaagactttaccatatctttgagttaatgaatcaatgaatcttgtgtttctacgaaaataatattagtaactaccaaatgtcattgttattaacaaatctgttgttattatatatctttattctctctcaattccttaggaatgtgtatggcaaaaaaagagttacatgaatgagattgataaatagggtgcagtagaagtattttggaaagggnnnnnnnnnnnnnnnnnnnnnnnnnnnnnnnnnnnnnnnnnnnnnnnnnnnnnnnnnnnnnnnnnnnnnnnnnnnnnnnnnnnnnnnnnnnnnnnnnnnnnnnnnnnnnnnnnnnnnnnnnnnnnnnnnnnnnnnnnnnnnnnnnnnnnnnnnnnnnnnnnnnnnnnnnnnnnnnnnnnnnnnnnnnnnnnnnnnnnnnnnnnnnnnnnnnnnnnnnnnnnnnnnnnnnnnnnnnnnnnnnnnnnnnnnnnnnnnnnnnnnnnnnnnnnnnnnnnnnnnnnnnnnnnnnnnnnnnnnnnnnnnnnnnnnnnnnnnnnnnnnnnnnnnnnnnnnnnnnnnnnnnnnnnnnnnnnnnnnnnnnnnnnnnnnnnnnnnnnnnnnnnnnnnnnnnnnnnnnnnnnnnnnnnnnnnnnnnnnnnnnnnnnnnnnnnnnnnnnnnnnnnnnnnnnnnnnnnnnnnnnnnnnnnnnnnnnnnnnnnnnnnnnnnnnnnnnnnnnnnnnnnnnnnnnnnnnnnnnnnnnnnnnnnnnnnnnnnnnnnnnnnnnnnnnnnnnnnnnnnnnnnnnnnnnnnnnnnnnnnnnnnnnnnnnnnnnnnnnnnnnnnnnnnnnnnnnnnnnnnnnnnnnnnnnnnnnnnnnnnnnnnnnnnnnnnnnnnnnnnnnnnnnnnnnnnnnnnnnnnnnnnnnnnnnnnnnnnnnnnnnnnnnnnnnnnnnnnnnnnnnnnnnnnnnnnnnnnnnnnnnnnnnnnnnnnnnnnnnnnnnnnnnnnnnnnnnnnnnnnnnnnnnnnnnnnnnnnnnnnnnnnnnnnnnnnnnnnnnnnnnnnnnnnnnnnnnnnnnnnnnnnnnnnnnnnnnnnnnnnnnnnnnnnnnnnnnnnnnnnnnnnnnnnnnnnnnnnnnnnnnnnnnnnnnnnnnnnnnnnnnnnnnnnnnnnnnnnnnnnnnnnnnnnnnnnnnnnnnnnnnnnnnnnnnnnnnnnnnnnnnnnnnnnnnnnnnnnnnnnnnnnnnnnnnnnnnnnnnnnnnnnnnnnnnnnnnnnnnnnnnnnnnnnnnnnnnnnnnnnnnnnnnnnnnnnnnnnnnnnnnnnnnnnnnnnnnnnnnnnnnnnnnnnnnnnnnnnnnnnnnnnnnnnnnnnnnnnnnnnnnnnnnnnnnnnnnnnnnnnnnnnnnnnnnnnnnnnnnnnnnnnnnnnnnnnnnnnnnnnnnnnnnnnnnnnnnnnnnnnnnnnnnnnnnnnnnnnnnnnnnnnnnnnnnnnnnnnnnnnnnnnnnnnnnnnnnnnnnnnnnnnnnnnnnnnnnnnnnnnnnnnnnnnnnnnnnnnnnnnnnnnnnnnnnnnnnnnnnnnnnnnnnnnnnnnnnnnnnnnnnnnnnnnnnnnnnnnnnnnnnnnnnnnnnnnnnnnnnnnnnnnnnnnnnnnnnnnnnnnnnnnnnnnnnnnnnnnnnnnnnnnnnnnnnnnnnnnnnnnnnnnnnnnnnnnnnnnnnnnnnnnnnnnnnnnnnnnnnnnnnnnnnnnnnnnnnnnnnnnnnnnnnnnnnnnnnnnnnnnnnnnnnnnnnnnnnnnnnnnnnnnnnnnnnnnnnnnnnnnnnnnnnnnnnnnnnnnnnnnnnnnnnnnnnnnnnnnnnnnnnnnnnnnnnnnnnnnnnnnnnnnnnnnnnnnnnnnnnnnnnnnnnnnnnnnnnnnnnnnnnnnnnnnnnnnnnnnnnnnnnnnnnnnnnnnnnnnnnnnnnnnnnnnnnnnnnnnnnnnnnnnnnnnnnnnnnnnnnnnnnnnnnnnnntcggcaggctgaggcaggagaatcaggcagggaggtcgcagtgagccgagatggcagcagtaccgtccagctttggctcggcatgagagggagagggagacgggagagggagagggagacgggagagggagagggagacgggagagggagagggagacgggagagggagagggagagggagacgggagagggagagggagacgggagagggagagggagacgggagagggagacgggagcgtttagtcctggcagataattcttatagcttgtgatttgagaattgtagctctttgctagtttcatagtagatcaatttattcatttatttatttgttttttagagatgaagacttgctctgtcacctaggctggagcatagtagcacaatcagagctcactgcagccttgaattcctgggctcaagagatcttcttgccgcagggcccaaagtagatgggactataggcatacaccatcatgcctggctaatttttaaattattttcatttttattagagataggctctcactaagttgtccaagttggtctcaaattcctggccttaagcaatcctcccacttcagcatcccaaagtgctgggattatagaggtgagccaccatacctagcctcacagtagacacaattttccttccaatttttccttcttttagttcatttcagcggctttgagggaagcacagagaagactttaccatatctttgagttaatgaatcaatgaatcttgtgtttctacgaaaataatattagtaactaccaaatgtcattgttattaacaaatctgttgttattatatatctttattctctctcaattcttaggaatgtgtatggcaaaaaaagagttcatgaatgagattataaatactttgcagtagaagtattttggaaagggtgtatctggtgatgttctccatctcatccttcaaatccattttctacccttccctgcctatgtgcctcatgaggctgtgctttgtgccctgtgaggctgacctctatggactccctcagcttgcctctcttactctttgacttcctgttgagttggctcaatggaaggcaccagcaggagaaccatggatgagagaaaattgaggtcagtgtacggtttaatctatggtttcycttcctacagggcagtgggttggccagggcatctttcctcttctgaaggccacagcagcccttcctactgctacagctacagctctctcccactgctggtagccacttccttcctttgctcctctgggacttgatgtggcgatggctcccttatcactttgttagcccctgggtgcttcaccattgctgtgggttactgtcagctctgcctttgcctttgtaaagcagtctctttattaagattatttcaattatccagttggagtatgccatctgcttccagctgggatcctagctcacacagcatgtgaggatagaagcactgaaagtcttatgagaacccttcttattgccgggatggaatctggtgatttctgtttgttcatacattctggtcattggacctcaaggttccaatatagggaagagatattgagtgttgttatgtgcacactcaaatatttaagaaggagacactcctattccacagatatcaaagtgctcatttacttcccactgaaagatgtcattttcttatatataacttataataaaaattccccaaatttgatgccttagagggaagaccaatctcagttatgagtaggcttaatcaaaattttattttatttaaagaaatgaaatctcatttctcttcattataggaaggaacattcctggtcgaaattctgtttttgtaaataggtctttatagtatttgatgtgctatttaaaaatgtgataatttaacctattaatagtacataaatggatgctacctaaattactgccaagtcaattaagtctataccatcatgtgtaatctttttcacagatagtacaaaagcataaaatatagtgtaatgaaaatgtgtgtttcacaagttctgaataaatgggttataaattaaatatatcacaatccactgacttttatatagtattttgatatagtttggatatttgtcctcccacccagatctcatgttgaaatgtgatccccagtgttggcagtggggcctagtgagaagtgtttgagtcatgagggtggatccctcatgaatggcttggtaccttccctgaagtaataaattagctcatgcaagagctgactgtttaacagagcctggcacctcctcccctctctcttgccatgtgacactcctgctccccttcaccttctgccgtgagtggaagcttcctgaggcctcaccagaagcagatgctggtgttatgcttcttgaacagtctgcagaactgtgagccaaataaatctgttttccttataaattacctagtctccagtatttcttyatagcaatgcaaaaacagactaatacatatctcatacttgaaaagtcagttgttgtttagactgcttgccctacttttaatacttcaatttctctgtcaatcatgtttatttattaattcattcaactcataattattaagtacctggtatgtgccagacacttttatgggtatctgtggtacaaataggagtaagacattgtctttgccttcataggggtcacaatctaatgagaaacatagttggtcaggtaattataataaaacatggcaagtgtttattcaaaggaaaggtttgatggaatactatctgtcagaggcacatagccttggggcaggagcctaaatgaattttaggagtccagggattctaagatgaggtcaaaatccaagcctatttcatagcccttgaaattaatttagcataaaaaaatctttaatgtttggactagtcatcttacaactggttaagtcatttacttaaaaaattagcaacccaaatcctgtattaaaactagtttgaataaccgacttaaccttcaactcttttagtttgcactatgactaatgctgcctccgtgatcatgggtgaggcagcattgtggagaatgcctgcccccttgaggaatcagaaactcagctttcagatgatggtgcaaagtgggatcacaaacaaaatgaaacaaaaaacaaagaacaaaaaggaaacaacacaaaaaccaaaacagaacaaacaaaacgatatgaagatttggtgggcactgctaaaccctttgtagatacttggttttagtcacgtttgctgagatcacatcgaaagcctctgaacctctgaaaggcattaaaagttgtcccactgcacctatgagccatccagagaaacgttaaataagttggtccagaaacmcttttgaagtcctccatcctttcaatacttttcttacttctttgcttctgagcgggaggtgcagcatttaaaatcaaagacattaataataaggtctcatttcctaagacagcatctttcccactgcaatgtgcatatgaatcatttggggtcatgttgaaaagcagatcctgattctgtagatagggggtgtagttggggggttcctgtgttcccaacaagcttcccaggaggtgatgctgatgctgctggtctgcagaccacactctgagtagcaacattctcagtgcaaatatagagcacagggctttatataacacaagatgtgggtgtggggttcctcatccttttacatttcccatcctaagacaatctcatagtaggcgagtctgatgatgaattggagttcaacaatctgtgtgtggaacaagtaaacacacagagcaaaacctggctcttcattttaattggcacaacttagcagttacatgtggataggcaaagtctctattttttgggaaatcagaatggggtaggggttagccaataagtgtatatgagatagataaatgcaatcttatcttttaaaatatgatttgaaaattttgtggtcataaataatttatatcctaaaaatattcttctttggtcagtcctttaatattttaaaagtagtgaatctaattgtttatggcctcatgtggctgtaagccataatatcttggtataaatctctagttatgattatatggatataatatgaatatgatgtgttaggcccaagaagctcgtggtattccattttctgaacaagatcaataaactctgggatccttactattaaaagcaagggaaaagcaacttgttttgtaaaagataattcaaacatgttagtaagttgtgttttcatttatgtgagatgagaattatctccaaaactctttcattgtaatgggagctaagctttataaagacaatgcatatttgttaattagactgcacagaacaaggttcagttatggattcttgattgcttggtaaaatgatggctcttcaaacctaattacatttgggtgagctaaagcacagttctgaaggactcaatatgttcactcccagccttcatcagctgtacaatttgctttcctgttagttttactttagatcttgaaattaaaagcattttgttatatcaggatggtgtgtctatgacttcagtgcaagtagaggaggagtgttctaccctggaataacacaaattagaggtgcctgtatgtatgtgtatggtgtgtgtgtgtgtgtgtgtgtgtgtgtgtgtgtrtatgtattaaacttcatgctttttaaagcctccttctaaaatgccatctttcagatgtgcctatctgtgtcttattttggtagtttttcttttctttccccattcaaccgtctcttgggaattagaaaaggattcctaagatcaaaatccccaattttctggaaaagctttggcacttgttactctctccccacattttcctgcttcctaagattggtcaagggcaggggccgggcgcggtggctcacgcctgtaatcccagcactttgggaggccgaggcaggtggatcacgaggtcaggagattgagaccatcctggctgatggtctcagggtttcaccatgtctctactaaaagtacaaaaaaattagccgggtgtggtggcgggcgcctgtagtcccagctactcgggaggctgaggcaggagaatggcatgaacctgggaggtggagcttgcaccgcgtgagccgagatcggccactgcactccaggctgggcgacagagcgagactcggtctcaaaaaaaaaaaaaaaaaagattgctcaagggcagccataggccctctgggtgacaaggaacagagatttatatagtccatcttacaaaatatggataaagggtctctttctctctatatatatgtattttgtgtgtgtggtaaaatatacatagcataaaatttaccattgtaaccatttataagtgcataattcagtggcattaagtacattaaccatgttgtgcaatcatcaccatttccagaactttttcatcatcccagactgaaactctctacccataaaacatcatctccctattctccccaccccctaccccccattctacttttggtttctgtgaaactgcctactctaggtgccccatatatgtagaatcaaacactatttattcttttgtgtctggataatttcactttgtgtaatgctttgaaggtttatccctgttgtagcctgtgtcaaaattttattcctttttaaggctgaataatattccattgtatggctataccacgttttattattcattcatctattgatggacatttgggttgtttcccccttttgggtatcatgaatagtgctgccatgaacactggtgtacaagtatgtgtttgagctttatattcttttgggcataagggttaatagatatttattgaaagcctattatgagccagtacagtattttctagaagttgaggctattgaggaaatggacagcatcccagcccttgtataaacacaagaatgataaataagcaattctagataccaataaaatcctaccagaaaaagaaaatttaaaaatgggttagagtatctgacgttggggcaaaaagtgggtatgggcaacctcatgtaacataggaggaaggagagctccaggcaaaaggaatggccagtgcgaagcctgagctagaaagggcgccatggtggtggaaggggctcgagggtggtgactgggggagatgctgggggagaagaggtcagaggctaggtcagccagaccttctaggccacttaggtccaggtgtcacaaggctcaaagtttatgcaactttgaaggcccttgcagaggaagaataaaaacatatcttccttttgcaaactttacaaaaacatgcccatcccttgaaaacacattactaggtcccttccagagttttcaggggctccaagtgaggggccgtggctcttaagcttcagtgggtccacagtgatctgtctctgagtgctgtagcaagagtctggcttttgtttagatgatgaaaggaaactattgggggattttaagcagaggagttacacaatctgatatgtagtttaacaagatggttatggttgttgtgtgaagaacgggctgtagagggcaaagaggaattaggggatgagaggaggctggagacctgttgcaggtgagaactgaagggtgtgattgatggctgtgccagtccggatggtgagaagtggtcggatttcacaacagtctctgaggagagaattcaaaattggtactgctaatgatggcataatagacaaacacactgtgatattgatgaggaggattcttcctttcctttcatcttagcctcctcaagcctctggtctcaccattatattgtagcaatattgtcaatcatttgagtttaggagctaagaggtccctcccaactatattgaagctgtatgatgttcaccttggctacagtcaacacttatttctcaaatgaagttacattgccttgtggctaaaagctttgacactgaaaaatgtattctctgtaaaagagatgtcagtgtatcatattaaaggtcagagatgccccagggtcagaatctctgtggtcctagccaaacattttgtaagaaaaaaattctcaaccactgtgagattgtttcagattcaggagcaaagcaaccatttgtcatttgcaatttatgatattttgcttcttcaggcaccagcctgatggcctttcatctggaccatgaaatatcatgactgattggttttttgaggagggagaatgttcacacttttcaaaccagcacatctgggggctaagaaggaagctttgcttgggaggaatcagccagttgtttagtgtggtggctttatgttttctgagaacaaaagcaatatggtatttgtgtgtgtgtgtgtgtgtgtgtgtgtgtgtgtgtgtgtaaaatcaatggagggtcttgggagcaggggagacagagggagagaaatacagcggaagagaggatgacagagagagagagacagacagacagagacagaaagaacatacccatactgtgtaaacacatttctaggaaacagaaacggaaagacaggttgattgccttgagggagcgagttggtatagttaaatgatagggtttgggggtttgaatcctcagagaagctcaggtagaggcaatgatagttgggtgtttgctgatgagcagaaggctaggtaactgagtgctagaacctaagctctccctgctcatagcagtttttctttgggtctcaggatgtcaggcaagaagtgaggatggctgggagctagggagtggcatgtcatccctggggagatgagaaagggtcagacttggtgtaagttttggagattgagctcacagatttgtgtgtgtttgtgtgtgtgtgtgtgtgtgtgtgtgtgtgtgtgtgtgtcaggttgtatgtatattgtggcaaaaagagaggactcacagaggaggccaaagtattttggcttgagcagtaggtaaatgatgtgcaatttgctcaaatagggaacccttgtttgggggtgggaaagtaagatttggtttgggagcgtgttaagtttgaaatgcttattagacattcagatggaaatgctgagagggtggttggctgtatgagtcttgtgttcagggaggttcaggagttcaactggggaatcgttagtccatggatggtgtttaaggccatgggatgaatgatatcactttggtattgagtgtaggtagtatagacagagacaagattcaagttgataggcagaagtttctagtattctgtaatcaggttttcattccctgtatcaatatagccaattttataaatatcccttctgacctctccaaaaatcttataaagatataaagataaataaataatatgttcatgtctcaagggaatttaggaataatgagtttagcacatgagtgtccgtacataataaaaaactcttagcaaactagaaatagaagaaagttattttattagttcacttacatactgctgataaagacatacctgagactgggtaatttataaagtaaaagaggtttaatggactcacaattgcacayggctgaggaggcctcacaatcatggtggagggcaaaaggcacatcttacatggcagcaagcaagagggagaattagagccaagtgaaagggatttccccttgaaaaaccatcagttcgtgtgagactttaatatggttgctagatacatgatgaatataaaaaatcaatttcatttcaacagtcccataataagtagaaaatctaatttttaagaaaaaatacaatttcaataataacaaaatccgaaaagtacttataaataaatatagcacaaacttgcaggacctttatgtgaaaaaataaagtttagtacatttacagattgtttaactccatgtatctctacagaaggttgcctttgagagtaaataaagcaaatatcttccaagcaaacatgaactatgaatggaaaagatattaatgctcaatctttcatcattatgtccacctccaaatacatatttcatatcctaaaaatggtaaaaatgctatgtaatgggatttttttgtgtgagaaggagggattgcttcagagaataggttaaaccaaactaagcagaatttttaaacagcttttttgagagatgatttaaataccacacaatgaatccatttataaagtgtactgttcaatggcttttagtggtgtatccacaaagttgcccataaagtccatccacaaagccatgttgcccaggcatccttcatcaaaatcaattttagaacacttttttaagcccaagaatcccccctactcccttacccaccccctcccaataccctatctttccagccttaggcagtcactaatctactttctatctatatagatttttaaattctggacatttcgtataaatggaataacacaatacgtggtcctttgtgactggcttcttccacttagcataatgttttcaaggtccttctacaccatagtatattatcagtattccaggtcttttattgctgagtaatatttcaatgtatagtagaattttataaacatttaacactttgcaaagatgtgagtcagctctaagtaaaatgatgtatccataattataaattagattgttttctaactaaaattcatattgctccactaaaaaactttttatagaaaattcagataaaatgcttacacaaagcatacaactgtgcattaatacaaatacaataagtgcacttcgaaaaaactttttatttatttttttgagacagagtcttgctcagttgcccaggctggagtgcagtggtgtgatcatggtttacttcaccctttacctctcaggctcaagtgattcccctccctcagtatcccaagtagctggaactacaggcatgcactactgcactcagctaattttttgtagagatggtggtctcgccatgttgcccaggctggtctcaaactcctgggctcaaggagtcctcccatgttggccttccaaaatgctgggattataggtataagctactgcacctgrcccaaaaacaactctttcagaaaaatgtgtggcttcttgagatacaaaccctagcaaagtatcttttttaaaattattattatactttaagttctagggtacatgtgcacaacgtgcaggtttgatacataggtatacatgtgccatgttggtttgctgcacccatcaactcatcatttacattaggtatttctcctaatgctatccctccccaacccccccaactcccgacaggccctggtgtgtgatattccccacccagtgtccaagtaatctcattgttcagttcccacctgtgagtgagaacatgctgtgtttggttttctgtccttgtgatagtttgctgagaatgatgctttccagcttcatccattttcctgcaaaggacatgaactcatccttttttatggctgcatagtattccatggtgtatatgtgccacattttcttaatccagtctatcattgatggacatttgggttgtttccaagtcttttctattgtgaatagtgccgcaataaatatacgtgtgcatgtgtctttatagtagcatgatttatgatccttgtcaaatggtaattctagttctagatccttgaggaaaccccacactgtcttccacaatggttgaaataatttacactcccatcaacagtgtaaaagcattcctatttctccatatcctctccagcatctgttgtttcctgactttttaatgattgccattctaactggcatgagatggtatctcattgtggttttgatttgcatttctctgatgaccagtgatgatgagcattttttcatgggtctgttggctgcatagatgtcttcctttgagaagtgtctattcatataccttgcccactttttgatagggttgtttttttcttgtaaacttgtttgagttctttgtagattctggatattagccctttgtcagatgggtagattgcaaaaattttctcccattctgtaggttgcctgttcattctgatggttgtttcttttgccatgcagaagctctttagtttaattagatcccatttgtctgttttggcttttgttgccattgtttttggtgctttagacatgaagtccttgcccatgcctatgtcctgaatggtattgcctaggttttcttctagggttttcatggttttaggtctaccatttaagtctttaatccatcttgaattaatttttgtgtaaggtgtaaggaagggatccagtttcagctttatacatttgactagccagttttcccagcaccatttatttaatagggaatcctttccccatttcttgtttttgtcaggtttgtcaaagatcagatggttgtagatgtgtggtgttatttctgaggcctctgttcttttacattggtctttatatctgttttggtaccagtaccatgctgttttggttactgcagccttgtagtatagtttgaagtcaggtagcgtgatgcctccagctttgtgctttttgcttaggattgtcttggcaatgtgggctcttttttggttccatatgaactttaaagtagtttttcccaattctgtgaagaaagtcattggtagcttgatggggatggcattttgaatctataaattactttgggcagcaaggcgattttcaagatattgatttttcctgtccatgagcatggaatattcttccatttgtttgtgtcctgttttattttgttgagcagtggtttgtaattctccttgaagaggtccttcacatcccttgtaagttggattcctaggtattttattctctttgaagcaattgtgaatgggagttcactcatgatttgkctctctgtttgtctgttaatggtgtataagaatgcttgtgwtttttgcacattgattttgtatcctgagactttgctgaagttgcttatcagcttaaggagattttgggctgagatgatggggttttctaaatatacaatcatgtcatctgcaaacagggacaatttgacttcctcttttmctaattgaataccctttatttctttctcctgcctgattgccctggccagaacttccaacactatgttgaataggagtggtgagagagggcatccctgtcttgtgccagttttcaaagggaatgcttccagtttttgcccattcaatatgatattggctgtggatttgtcacaaatagctcttattattttgaaatatgttccatcagtaccttgttttttgagagtttttagcctgaagsgctgttgaattttgtcaaaggccttttctgcatctattgagataatcatgtggtttttgtctttggttctgtttatgtgatggattacgtttattgatttgtgtatattgaaccagctttgcatcccagggatgaagycmacttgatcatggtggataagctttttgatgtgctgctggatttggtttgccagtattttattgaggatttttgcatcgatgttcatcagggatattggtctaaaattctcttttttttgttgtgtctctgccaggttttgatatcaggatgatgttggcctcataaaatgagttagggaggagtccctctttttctattgattggaatagtttcagaaggaatggtaccagctcctctttgtatctctggtagaattcagctgtgaatctgtctggtcctggactttttttggttggtaggctattaattattgcctcaatttcagagcctgttattggtctattcaaagattcagcttcttcctggtttagtcttgggagggtgtattgyccaggaatttatccatttcttctagattttcaagtttatttgcgtagaggtgtttatagtattctctgatgatagcttstatttttgtgggattggtgctgatatcccctttatcatttttttattgcatctatttgattcttctctccttgtatttgattcttctctcctttcttctttattagtttggctagcggtctaccaattttgttgatcttttcaaaaacaagcttccggattcattgattttttgaaaggttttttgtgtctctatctctttcagttctgctctgatcttagttatttcttgccttctgctagcttttgaatgtgtttgcttgcttctctagttcttttaattgtgatgttagggtgttgattttagatctttcctgctttctcttgtgggcatttagtgctataaatttccctctacacactgctttaaatgtgtcccagagattctggtrcactgtgtctttgttctcattggtttcaaagaacttctttatttctgccttcactttcttatttacccagtagtcattcaggagcaagttgttcagtttccatgtagttgtgtggttttgagtgagtttcttaatcctgagttctaatttgattgcactgtggtctgacagacagtttgttgtgatttctgttcttttacatttgctgaggagggctttacttctaattatgtggtcaattttataataagtgtgatgtggtgctaagaagaatgtatattctgttgatttggggtggagagttctgtagatgtctattaggtctgcttgttgcagagctgagttcaggtcctggatatccttgttaaccttccatctcattgatctgtctgatattgacagtggggtgttatagtctcccattattattgtgtgggagtctaagtctctttgtargtctctaaggacttgctttatgactctgggtgctgctgtattgggtgcatatctatttaggatagttaggtcttcttgttgaattgatccctttaccattatgtaatggccttctttgtctcttttgatctttgttggtttaaagtctgttttatcagagactaggattgcaacccctgccttttttttgtttttcatttgcttggtagatcttcctccatccgtttattttgagcctgtgtgtgtctttgcacgtgagatgggtgtcctgaatacaacacactgatgggtcttgactctttctccaatttgccagtctgtgtcttttaattggggcatttagcccatttacatttaatgttaatattgttatgtgtgtatttgattctgtcattatgatatttgctggttattttgcccattaattgatgcagtttcttcatagcattgatggtctttacagttttgcctgtttttgcggtggctggtaccggttgtttctttccatgtttagtgcctccttcaggagctcttgtaaggcaggcctggtggtgacaaaatctctcagcatttgcttctctgtaaaggattttatttctcattcacttttgaagcttggtttgactggatatgaaattctgggttgaaaattcttttctttaagaatgttgaatattggtccccactctcttctggcttgtagagtttctgctaagagatctgctgttagtctgatgggcttccctttgtgkgtaactcaacctttctctctggctgcccttaacactttttccttcatttcaaccttggtgaatctgacaattatgtgtgttggggttgctcttcttgaggagtatctttgtggtgttctctgtatttcctgaatttgagtgttggcctgccttgctatgttggggaagttctcctggataataccctgaagagtgttttacaacttggttccattctccccatcactttctggtacaccaatcaaatgtagtttggtcttttcacatagtcccrtatttcttggaagctttgtttgttcctttttgctcttttttctctaactttatcacttcatttcattaatttgatcttcagtcactgataccctttcttccacttgattgaatcggctattgaagcttgtgcatgtgtcacaaagttctcgtgccaaggttttcagctccatcaggtcatttaagttcttctctacagtgtttgttctagttagtcgttcatctaatcttttttcaaagtttttggcttccttgcgatgggttcgaacctcctcctttagctctgagaagtttgttattaccgaccttctgaagcctccttctgtcaactcgtcaaagtcattctccgtccatctttgttccattgctggcaagtacccgcgctcctttggaggagaagaggcgttctgatttttagaattttcagcttttctcctctggtttctacccatcttgttggttttatctacctttggtctttgatattggtgacctacagatggggttttggtgtagatgacctttttgttgatgttgatgctattcctttctgtttgttagttttccttctaacagtcaggtcctttagatgcaggtctgttggagtttgctagagttgcactccggacactgtttgcctgggtatcgccagcggaggctgcagaacagcaaatattgctgcctgatccttcctctggaagctttgtcccagaggggcagccgcctatatgaggtgtctgtttacccctactgggaggtgtctcccagttaggctacgtggcggtcagggacccacttgaggaggcagtctgtccgttgttggagctcaaatgctgtgctgggagaaccactgctctcttcagagctgtcagactgggacgtttaagtctgcagaagttgtctgctgccttttgttcagctatgccctgcccacagaggtggagtctagagacagtaggccttgttgagctgcagtgggctccacccagttcgagcttccctgctgctttgtttacctactcaagcctcagcaatggcggatgcccctcccccagccaggctgctgtctcacagatcatctcagactgctgcgctagcagtgagcaaggctccatgggtgtggraggtgcacagccaggtacgggagagaatcaccttgtctgccggttgctaagaccttgggaacagcacagtatttgggcgggagtgtcctgtttttccaggtagtctgtcatggcttcccttggctaggaaagggaaatcccctgactccttgagcttccctggtgaggtgatgccctgccctgcttcggctcaccctctgtgggctgcatccactctccaaccagccccagtgagatgaaccaggtacctcagttggaaatgcagaaatcacccatcttctgcattgatcatgctaggagctgcagatcggagctgttcctattyggccatcttggaaagccctcacaaagtatctttttaaatgcagttggaggtcttttgtgcctctttttgatgaatctcaatttggaaaaacaactcttaaatgctttctgtatttttcattaaatggaagggtataggaagggtataggcccaggtgaatgaatgaaaatgctcttatactgttattttacacagaaaccagagatgatatcacaaccagttaagcttatttcacatttgttgattgtagaaaatttcacttctctcccactctcagttctggtgggctgactccatgctttatgccgttgctcttggttctaaatgtccaggctcccacttgcaatttggatttgccattacaggtgtctgctccttatgggtctggcacccttgttagcagaagccttgggagtcagcagaaggctcccaatgaataaccaagctggattaccagaggaaaaaaacatagcaaaagctggacaaaggtggtgayccagagaagaatcaggcataagagccagcccaccaaagaagcacaacaggaacaaagcagttagatgtgttctgtgtgtgcaggcgacagaagcaagcaacagaaaccagctctgcataacttgtgcagaaaataaatgtttagaaaggatgttggggacctaacagcccccttcctaacagaaggaagtggtgaacatcagtctttggaaaagacagaagcgaaggcaactgyaggcatctaagtaccaggattcagtggacagttcttcaaggacccacagctggaatgaacaacctccaaccatgctcgtattctgagccactcaattgaagattcataggccctcctctggaatcagagggagagtggaggagagagagaaataggagaacaaggaaaatgtaagctatgttgctggaagaaaagagaatgatgacagatagataaaaagaacagctatcccctaaaggaagacacagacaccaccctactgacacccagagatgacctgaacgagtacctagctgtaggctaggccaagatgtttttcaaaaattacttttggatttttttctaatacagaaagacaggacagacctaggcccgaagatctacaccagaggtcatggttcaataattttattctaaaagcaaaacgaaggaaacaaacaagcaagaccttttaaacgaatgtaacccagctgggcgtggtggctcacgcctgtaatcccagcactttgggaggtcaaggcaggtgtatcacttgaggtcaggagttcgagaccagcctggccaacatggtgaaaccccatctctactaaaaaaaatacaaaaataagctgggcatggtggcacacacctgtaatcccagttactcaggaggctgaggtgagagaatcacttgacactgggaggcagaggttgcagtgagccaagatgttgccactgcactccagcctgggcattggagtgagaccctgtctcacacaaatagcaacaacaacaataaggtaaatataaccagaagcctatagctcaggataggttagttgtaaaatataaacaaatgaggtaatatgcatggaattattgggaatacctttgaaaatgatggctttggttttaaagtaattgagctacatatccctctgccaacaactagagagaaaagatggaaactcactactaatctgtttataaaactgtcatttgcatatagaggaaaacttaatttgctgtttctttctagcaggagggcttacaattagctcatcccaaagagaaaggaacaaaacacattcttgttttatcccactggaaaatatcatgctctctgttagaagcctgtcaaagcataactcagacttttagtcagagcacagctgaagcttaatcatatgtattgggagattaattatgtatagattgtgtgtctgggcaaaggcaaagcagagtgcaggatacataaaaggaaaatccattgtctggggcacatagagtctgtctgtctctgtcttttttttatttggtctgtgggcaaactgattagccaaccaacactatcaagaaggtatatgattagggaaggcagttttagttatatgagggcttccagagagtgttgtgatttcaggttggagggtatacgatgttatttgtctgctctctttccattggtgcctccaccttggttagacaaggtctgcaccattttctgattgtgtcttaagacctgtccctagaccttgactttccaggtagcactaaggtgcagattccatgtgatcatcaacagctgggacctatcttgatactctcaaagcttaggtcatcactgattttcattcctaaaattctatggggtggaaaagtataaaccagagatcatgggtaatatcattgcctcaagtctgcttagcactggaatggaagatttggcttgcaatcgatgaagaaaactcacctatactttagggacgtagaggtaagcttaaacacaggtctacatttgtggagggtaaaagaactgcccttttcactattaagtaggattttagttgtaggtttttcataggtactctgtatcatcttcagaatgttctcatttattcctagtttcctgaaagtgttttttttgtttttcctttttttttcaatgaatacatgttacatttgtcatatacttttttctagatctaatgagacaatcacatggattccctttgctaatattctgtcaggcttctttatctatgttcgtgaacaaatattgttgtaattttttttcttataatgcctctatcaaattttggttcagagttatgttggcmtcataaaactagctggaatggggtgtcttcctcttttattttctgaaagagtttaggttgaagtgctattgtttcttccttaaatgtttgatagaaatcactagtgaaatgatctggattgaatttttcttggttgaaaggtttctaattacaaattcaatttatktaatagatatagaactactcagatatttatatttctttttgtattctttcaataagtcgcatttttcaggaaatttttggtaatatcatctactttttaaaatttattgacataaagttttcataatgtcctcttaatctttttaatgtgcataggaatctatactgatgccccctttcattcctgatatttgttttgtttcttttctattaattttaagagatttattaactattccaaagtaccaacttttgtttttattgacttttttattgtttatctttcattttcattcttttttttatttttcttctatgtattttgggtttaattttttctttagctagcatcttaaaaacttaggccattcaaacatctttttccttttctaatattaatatttcaagttatacatttccttttaagtacattagatgcatgccacaaattttgatttgttttattttagctgtcatttagcttgaaatattttatttttttaaaaaaacttttgatttcaggggtacatatgccagtttgttacataggtagacttgtgtcatgggagtttgttgtacagattatttcatcacccaggtattatgtctagtacccattagttgtttttcctgatcctctccctcctcttaccctctactatccaataggccccagtgcgtgttgttcccctctatgtgtccatgtgttctcatcatttagctcccacttataaatgagaacatgaggtatttggttgtctgttcctgtgttaatttgctatggataatggccttcagctccatccatgtccctgcaaatgacatgatcttgttcttttgtgtggctacataatatcccatggtgtatctgtaacacattttctttatccagtctaccattgatggatatttaggttgattccatttctttgctattgtgaatagtgctgaaatgaacatatgcatgcttatgtttttataatagaatgatttctattcctttgggcatatattcagtaatgggactgctgggtcaaatggtgtttctgtctttaggtctttgaggaattgccacactgtcttccacgatggttgaactaatttacacttccaccaacaatgtataaggattcctttttctccacaacctcaccagcatcttttattttttgactattttataatagccattctgaatggtgtgagatggtatctcattatgtttttgatttgcacttctctaataatcagtgatgttgagcctttttcatataattgttggccacatgtatgtcttcttttgaaaaatgtctgttcatgtcctttgcccacttcttaatggggttgtttggtttcttttcttgcaaatttgtttaagttccttatttatgctggatattagacctttgtcagatgcatagtatgcagaaatttctctgattctttaggttgtctgtttactttgttgatagtttcctttgctatgcagaagctctttaggtttaattagatcccacatgtcatttttttgcttttgttgtcttcatcataaaatctttgcctgtgcctatgtcctgaacatattgccaggttgtcttctagagtttttatagctttgggttttacatttgtctttaatccatcttgagttaatttctgtatatagtataagaaagggatcaagttttaatcttctgcatatggctggccagttatcctagcaccatttattgaatagagatttctttccttattgcttgttttgtcaggtttgttgaagaacggatagttgtaggtgtacagtcttattcttgggttctgtattctattccattggtctatgtgtctgtttttgtaccagtaccatgttgttttggttactgtagccctgtagcatagttcgaagtcaggtagtgtgatgcctacagctttgttctttttgcttatgattgccttggcatttttggttccatatgaattttaaaatagttttttttctagttctgtggagaatatcaatgatagtttaataggaataacattgaatcggtaaattgttttggacagtgtggctattttaatgatattgattcttcttatccatgagcatggaatatttttccacatgtttgcatcatctctgatttctttgagcagtgttttgtagttctccttgtagagatttttcacctttaacacagttagctgtattcctaggaattttattatttttgtggcaattgtgaatgggagtgcatttctgatttggctctcagcttgactgttgttggtgtataaaactgctagtgatttttgcacattgattttgtatcttgagattttgctgaagttgtttatcagcatcagcttcagaagctttttggctgagactatgtggttttctagctataggatcatgttgtctgcaaacagggatagttcaacttcctgtcttcctatatggatgctctttatttctttctcttgcctgattaccctgcagggacttccactactacattaaacaggaacggtgaaagagggcatccttgtcttgtgccggttttcaaggggaatgcttccagcttttgcccattcagtatgatattggctgtgggtttgtcatagatggctcttatgattttgagttgtgttccttcaatacctattttactgagagtttttaacgtggatcaatgttgaattttatcaaaagcctttctgtatctattgagataataatgcggtttttgtctttaattctgtttstgtgatgaatcacatttattaatttgcatatgttgaaccaaccttgcatcctagggataaatcctacttgattatgatggataagctttttgatgtgctgctggatttggattgccagtatcgtgttgaggatttttgcattgattttcatcaagaatattggcttaaagttttctttttttgttgttgtatctctgtcaaattttggtatcaggatgatgctggcctcatagaaagagttagggagaagtctctcctgctcattttttgggaatagttttagtagaagtggtaccagctattctttgtacatctggtagaatttggctatgaatccttctggtcctgggcttttttggttggtaggctgtttattactgcctcaatttcagagctcattattagtctgttcagggattccatttcttcccggatcagtcttaggagggtatatgtgtccaggaatttatccatttcttctacattttctagtataggtgcatagaggtgttcataatattctcttggtggtttgtatttctgtgaggtcagtgataatatcctccttggtgtttctgattgtgtttattaaatcttttctctcttctttattagtctagctagcagtctatctattaagtttttcaaaaaaccaactcctggatttgttgatcttttgaatgctttttgtgtacgtgtgtgtgtgtctcaatctctttcagttcagctctgatttttgttatttcttgtcttctgctagatttgggattcgtttgctcttacttctctagttcttttagttgtgatattaggttgttaacttgggatctctctaaatttttgatgtgggcatttaatgctataaatttcctcttaacaatgacttagctgtgtcccagagattctggcatgttgtatctttgttcccgttagtttcagagatcttgactactgccttaatttcattatttacccaaaagtcattcaggaggaggtgattcaatttccatgtaattgtatggttttgagtaaatttcttggttttgatttcaaatttgattgctctgtagtctgagagactgttacgatttcagttgtattgcatttgctgaggagtgttttactttttatgtgactgattttagagtatgtgccacgtggcaatgagaggaatatatattctgttgtttttggttgaagagttctgtagatgtctgtcatttccatttaatcgagtgctgagtttggatcctgagtatttttgttaattttctgtcttgatgatcagtctaatattgtcagtggggtgttaatagtctcctactattattgtgtggggacctaagtctctttgtagggctctaagaacttgcttcataaatctgagtgctcttgtgttgggtgaatatatatttaaaatagttacattatcttgttgaattgaaccctttaccattatgtaatgcccttctttgtcttttttgacctttgttggtttaaagtctgttttgtcaggaactaggattgcaacccctgcttttttctgtttttcattcacttggtagatttttctccatacctttattttgagtctatgtttgtcatttcatgtgaggtgagtctcttgaagacagaataccaatgggtctttcattttgataatttcttttgacctgtgtttgagttcagtggtgtttttcttctgtactgtccagtctgctgttaatttcattcaatgaatttttggttccagatactttagctttctgttctaggatttcttttttgtttttttgttagatttcatatctttcctaagttttcttatctttttattcatcatatccatatatgcctatagattccttgacatacttaatataggtattctaaagtccttatttgctaatttcaatatctgagtcatctgtaagtctgtttcagtttactatttttttctttgtggctacaggtcacattttccttctttatatgtttagtgatttttaattatatgcygtacattaaaaataatatattgaggagacctgggatttatcttcctctgaagactgttgaactttcaggcagttaagttactggtggcctcccttaactttgtggagggttgattttgggctttgttagactgtcctaaactgatgttgctcttaggcttagggtatactttcttctaatgtgtggaccttttgggggtttaatgggaagtccaaggtgttcaacaagtccctttatataggtaattggcaagaacatatgtaattatattatgggggagtcttgccacataggctactttctattccatttaggccctaggcttggcttgtttatttgttttaatcacatatgtttttaagaaacatttataagaatatgaataaaataaatattacctgaatagaggagatcccgcatcttaaaaatcaaatatagatagtccctgactgatgatggtttgacttataattttttttactttatgatggttcaaaagcaatactctttcagtagatatcatactacaagtacacatataaccactctgtttttcactttcagtataatactcaataaattacatgagatactcaacattttgttataaaatattctttgtgttagatgattttgcccaaatgtaggctaatgtaagtattctgagcatatttgaagtaagctagcctaagctatgatgcttgagaggttaggtgtattaagtgcatttttgacttacaatattttcacttatgatgggtttattgggatggaactctgatgtaagtaaaggagcgtctgtattttctgacccaaatagaaaacttatcatgttcaaatttggtgggtgaatgcaagcccactgctctttcaattgctttatgttttatttgtaatattttcaaacatcttaagcccattatctattaaaagacactaagatacttaaattttcttctgaaaatatgtgtatatctttctggctgttaattaccaattttggtgattattgataagctatatattggtaggctaaatgccaatctaatataataattggaaaagttctgagtaggcaaaagttgcctccatacttgtttggccatggttggcatacgtatttagttttttaatcatctctttttctttttactacatattaacaaaatgtctcctcattatgttagcagaatcctgcctattatttaggcacagagttattcagctgtaacattgcagtcaactaggtgtatttctactttagcatccctatcatcattgttttaattataacatttgttcttacaaagatgttcatacatttttgacaggaacattttcccatcagacttttcttagtccatactgtctccaattatgcctggacacaagtgggcattttgcgtacctcttctccagttgtgctagtcaacacttacctatgccttgtccccctttgatgactgtttacctttaccacatttatagaaatttttcaaatgatgatggaaaactgccacattaaatggtatcctaagagctcttaaagaatgctaaatttcttaataaaatatcgaaagataccaaaaacaaaaattttcaacatcccaaattgagacaaatgacctattgttaccttctagaargaattttcactaattatagtcaatggagttgggtagagaaaagtagtcagggtcttaaccatgctctgcttcaggaaaagagaacagcttcacattccttaaagaggtagagcaagagttcctcacttcctcacgctctgctccttcatctgtattattcaaaaaattgggcagctttatctctattcatttcaaggcatgtattctatgatcttgtattatactagaagaaaatagggaggaattattgtttgtccactgtaatcttggagtgtagctaatgagaaaagtagtccaggacgaggaaaagagagtagcgtagatggaggcaccttaatgaagatagggaacatgggatggaagagcaaatttggatgaaatatgattacttcagttttgtatatactgtgttttactgcaatcattgagacttgaggcacttcacattttatcatcgttgagacttttcatatagaatcaggtgaaattattggtaggaacttggccagttgaatagactttaaggtggaagtgatatggatttggaaaacatgtcatagttgaaaccatggatatagatgagaaaagagaaaagggcttgcataaatccccaagatgcaccaactttaaatttaggcaaaggaaaaggagcaggctgagttaaggagggacagaaagagagatggaaacaagtcaaagagagagtgatctctcagaatccaagggagaaaagtgtttcaagaaagaaggaatagatcacagtgtgaaatgcttcagattaagtaggtatgtaagttgtgtgtatgcattaagcaagtattaaataagagtaagtaagatgaatgctgggaagtgcttactgtaattgagtgttatttagtcattgattatctttggcaaaaacatttcagaggaatggtggaggtaggagagattcccatgagttgagtgcatgagagggccgaaataagggtcacaaaagtctttctagaaatttcacttttaaagtaaaataaggggcagtagctagaaggttatgcaggatcaagggaggtttttattgtttgtgagaaagacttgaatacatttatatttttgagggaaggaagcaaagagattgacaggagagagaataaacagcatgttcattctctgaacctagagaggaacaggtacatttattgacaaagagacaacttactctgtgattcacaggacccaacttagagatttttggatccttgagttctcaagtgaaattaggttggtgctagggctcatagagggctttaacgtaaagtttgacttggctatagaatttttgccataccaggttgggcgcggtggctcatgcctgtaatcccagcactttgggaggccgaggctggtggatcacctgagctcaggagttgaagaccagcctggccaacatggtgaaaccccgtctctactaaaaatacaaaactcagctaggcgcagtggcgggcacctgtaatccaagctactctggaagctgaggcaggagaatcacttgaacccaggaggcagaggttgcagtgagcagagatcgtgccactgcactccagcctgggtaacagagtgggactctgtctcaaaaaaaaaaaaaaaagaatttttgccataccaagaatggggttgacttsgtcctgcattttaagacagaggtttcttctgcctcaagcccctaacttcagcctgaaatcatcaacatccatcacagtagcggaacaacctagaaggaattgtttcattctgaaaagactttgaratgattaaaatatgcaatacaaatgggtgaaaagaaataggtgataaaatcaagacaaatgggaaattaagtttgggaatattaattaaagctgggcaaaattagtacccgataaactcatagtacactgttctgttcagctgttacagggagcctgcaaattgcctctaagcttgttagtggcctgagcaaggaggggggaaaacaattggttacaagattcagaatgtctaaatgacgaaaacaaactagtcattaaggaggccacacagcttttcttagtagtgaggcttgagagaagggttctttcatggatgttctgcatttccacaataaatacacaagcaggttttatagggattttcttacaatacccctcactgaaagtggacggcaacatgactgtccacatcactttttgtagaatgaagtgtcagcaagggccatgtaataggtactaaatacttaaaagattttgatcattttaatgggtcttattacttacactgaattgttcctcaaacaacatctgtccagtgttccactcttaattttcattttctttaaaactcctgagatgaagatgattcccatttcactttagaatggatttaaaaattgtctcaatttcaattgcctttctcattgtttaccatgctttatattcaaggtgagcgaagcaaagcacttgttactaggagataacagcgttgggtttcatttataatcgttaagattttcagatagatgctgttttggggggtgcatccttatctaggagaggtgatcaatgagcctttgctagtgcccagcagagacaaggtacagacagaggaaattaaaattctgggaagaggaaatcattgttagtcccaatgttatagtgttgttttcttttctttttttctggccggaggtaagccaaaatttaattacactcctgatggtttgggcttgataagtgtaatggatgataagtcataggtggctgaaaatcaatatgttttttcagcagataataacatgtttgctttggaatattttatctaagtgtgagatacaacgtgcaaaggctttcatattcctttgaggtgagagctctggaaaatgcaatagggcaaaggcaaactcacgtttagggcttagatatgccctggtagacccttgtctttgaataattattttagaaatcttcatgcaccaaaagctttgcctctggttactgggaacaaggtctttatgtgtctgaaactacattagctttctgcttatgctgcttctcatgagttttccagattatgtattgccaggctgtggctgtgcttcctgccgagaacaccaacttaaatgaaagtgtttttattttggagctgtaccagattagagggaaggtattctcagaaatagctgttgcagaagtgagaagagcaaagatttacaaagagacaagtggtatgagaacaagagcagtcaatgtgtagagcaagaagccatcagaagaacttggatctggttccttccctagccagatgactttgttctcttctgttccatggatatagaccttgtctttcaccaggtgggagtaaattgccacttcccttttaagaagagaacccatgtataccttagatcccaatcactgagttttgccatcgaaaactctgacttataatatgatgtktagaaagtaattgaacttctgggcttcagatgcctcttgagtatgatctagactaataatattgggtttttcttaccccaatgggagatgcagagctactcaargcatggaattctaaagctcaaaagtcatctggcttagtctagccccaggtatgtgagctcaggggtatgagctctccatcacaattggacctgygctaaaaaacaaaaacaaaaaaaccaaaactctcctcttctcccctagggtaaagaaacttctctggttgattattagactatcttattggtcttatgcaagtatatgctctttgttataagaaatatggttactggagctggaagtaagataatatagatagtatcctttagtttgacaagatgcttcatttattagctgtgtgacttggtaaattaccttgatcattctgaattgttcatctgtaaaatggaataataatcctacctctctagwttcatgcaaaaggagagagtttttcaactcatatgtgctaatgttactttatatttggttcacatttattctgggaactaaccacttttgatcaatgactcacatttgctttgtggtgcaccaagatatccaggtgcctctggctacatctggggctgtccagttaatttcttcccacctaggatatatatggtttggttttgattcaaatgatgcagattatgtttaaactcctttctctgaacgaagcccgggcacacaggcaggcaggcccagagatacgtacagatgggtccattttatctcatgggtggtcagagcagaacagtcacacgaggtgtatagatgagtgatgtctcacctgctcccaacacatggctgttccacagcaggtaacccaaagctcagctctgtctttggacattaactcaaagaaaggtctcaaatgtgtgttaagaattgagaatactaccctcagggcataagaggtcataaactttttctgtgccatggatctctttggcagtttggtggagcctatggactccttgaatcctataaaatgtctaggattacaatttttttaaagaaggaattatattgaaaatcattaaaatattttaaaaacaaatctgtgytattgtaaggcatgtattttttattcattaactaaatactaagccaaacagcaaatagaataactaatttaaaagctgtggtgtgcataatagttattttaacatatctacaaaaagyataatataatatgaaagtgtctgtggtttccgttggtgacaaggtcacaggtactgctaatcctcctgaggtttgttatctacaattgcaactgagagaaatgctaaaattccattcgagattaatgaaagtaaatatataattttttactatccaagttcatagattcccctggattccatcccaggtaaagatcccagagttagacaataaggaaaacagaagaaaaggtaagtataaggaaaatggaaagtcttatttttcaatgtaaagttatctgacagttaattatatttcaaacaaataacattaaatgtgttccagtttagtgattagcacagctttttacatagttttctctcaataaatatcttttgaagaaattaacaaaaacattgttttgcattgtaattctccatctacttgtctttttcttccactggtctatgagctcattgaggacacattaactgcccacacatcatttgtacagctttttaacatcctgttagataggaaagagagagctctcatgaatttctggtagaattctgttcaatagctgtaattggttatttattataagtcagagatataatgtcatttaatactcacaataagcttagaggtatacattattccaactcaacgatgcaattcaaatgttgttgaggrtttatgtgtggtaagccagggcaggcattgcactaagcacaatgtcacagtggggttgtagagatgaaaaggattcctgcctgcagataacatacaatccagtarggtggaaagacatggatatgcctaattatgagacaaggtaaacaagggcaggctgggggatcagcatgacaaaagacactagggcaggatggagttttcatttttacaatgggtttttcagagaaagctgaatggataggctgaaatttgaactgcagagcgaagtattttagacttattatatgggtagttcaaaaatatcactgtttccttcaaaccacataccaattgtatatctcattccaaatcactgtacactagatgataatgattttgtaggagcctctgagaagaccattatgaattttgatgttttcagattaagtttaatcagcacccctctccccatccctaatgtaagtgttgctcaargcattcaggtgactgggtttctcacaagaacagaagcatttaaatgccttctgttaccaacccaataatgctaacctgaagccctgctttgctgttggattcagtggttaagcatcatagtagtggttcctggtaatttttccaaatcaaaagtttaagagaattaataacatgtagtaatttgatccaactttattctcttggaccagtcaagaccaattaaggagccaccatccatgccatgcctctgtttatcctaatgagaagtgcrtggattgataatgaaggctggcagcttaatgtagctcaaaacataatttgtaaactctaatgaccagaatgttagccataagaatggtataaatggaactgcttctcagaatatattctgttttggtgtttctggatcactttgcttcattcactcaaggaaaaatattgccttgtacataatgcactaggtaatcatacagttgcatcttctactgaaaatgtttctctcagaatcatctgtttatgtacatatttgggttttgcatatgtaaagtcatgggatatttgagtagaaagggcttacaggctctctcatcaaattgtcttattttacagttaagattctgaggcccagagagaaaggacttraccaaggccatttgacgacttactactagacctgggatgggactcaggcccacacatttgttccacactgagtagtttttagggcacttgaccttttatttttttggagtaccttatgttgcacaataacatttttctctgtcaggtttccagaatcttctggcctagtgccattttgtattttgcaccaagtggagagataacgtcgttggcgaagcatcctttcctctcctttgacttcttgcctttatttctgaatatccttcttgcagtgggttgaatagtggccctccaaaaaacatacttatgtcctaatccctgaaacctgtgaacatgacattatttggaaaaagagtcttcgcagaggtaattattgtaatccccaatgttggaggtaggacctggtaggaggtgattggaccacgagggtggatttctcatgaatagtttagcaccatgtccttggtgctgttcttatgttagtgagtgagttctttcgagatctggttgtttaaaagtgtggcacctcccctccccgcttgctcctgctttcaccatgtgaagtgcctgctctttctttgccttccaccatgattgtaagtttcctgaggcctccccagaagccgagcagatgccactatgctttctgtacagcctgcagaatggtgagccaattaaacctcttttctttataaattacccaatttcaggtattyctgtataacatagcaagaatggattaatacagatcttgagatgagatcattcttgatttaatccaatgtcagrtatccttataagagaagtgcagagggagatttgagacacatgagagaaggtcatgtggaaatggaggcagagattggagttctcctgctacaagccaagggacagaaaggattgctaacctccaccagaagcagggagagaaggcaggaatagattcttcctcataacctccaaaaggaccaaacctgctgacacccagatttcagacttcggctttcagcactgtagagaatacatctttgctgttttaagtcatccagtgtgtggtgattagttacagcagccctaggaatcaaatatgcttcataagccattttccttgggccacactgaggactgggcactgtagaggccacgtgtgtgagcattgaggggagctgactcatgttcgtgttcttgctcccacaatgactagagctatgatgctggtaggttagattactgctctgtgactcaggtttttcaactataaaatggggatcattattggttatgataatgtgcattaattatacatgataatgtataatatacattatatagtgtatattggttatattataactgataatgatccccattttacagttgaaaaaaatgagataatgagataatgtatatctcataataagacagtgtatattaatgcttagcatgggtcctggaacacaccaaatgtttaacaatgtgagctgatattattataatgtcgccagcctcttttgcttgcttctttgcttgtagaaaggggattcataagcatttcctagcctgatgaatggcatatgtgctgttgcttgtggtgtggcaaactctgtgtaggaaggtagtcctttctgatacatgggctctgccctcctttctatcagtgggttctcatggccccaacacacccttggccctgatgaaccctccttgagaaactctcttcctgcagcatctagggcagtggtgctcatctctggctatgcgttggaaccacctgtggagtttctaatgcgctaatgcccgggccccactctagacccctctgaatcagagtgttttcaatagaacaggctcagtgaccacagggagaagggctcagctatggttcaggtaacacacctcattggagtttctaatctgagaaactgcrgggggcaggcaaggaaataggagctgtcacctagagcagaatttttctatccaaggtgaattaccaacttcaagaaaatttctaatccatcacagccaatatgttagtaaaatacaataaaaagttgactacacaaattctaccaagtacccgacaagtactcctcataaatgaattacttaaaaaacaaaatttaaaacacacacaaaataaaacctctttttgattattacattaaacagatataaatcattttgtcaaattgctgaaaagaggttaaacatatacttactatatgaactagcaattccattctaggtatttacctaagagaagtgaaaacatataagcatacaaagagttgcacatgaatgtccatggcagcttcattcttaagaatcctaaactggaaatgatcgaaatgtccatcagcaggtgagtagataagaaaactgtggcacatccgtacaataaaatgttactgaaccataaaaataaataaattactgatacacacaaaacatgaatgaatcttaaaggattatactaagtagagaaaccagatctcaaagattacagtctatatgatccatttatgtgcaattctagaagatacaaaattatagtgataaaaagcagattagtgattacctgagtctaaggggtggtcataggaatggagtgcaaagggacagaagggagtattttgtggtgatagaaatgttctgtatcttgaccatagtggaaatcccatgactgtgtatgtttatacacataccgtgtatgtcattgaactggacacttaaaatatatgaatttcattttatgcaaattataccttgaaaaagccgattttttacttgctgtaaaactttctaaatatacacagttatatgtcagagatattgtgagttcagttccagaccaccacgataaagtgactattgcaataaagcaagtcacacaagttttttttggtttcccagtgcatgtaaaatttatgtttacactatactatactaaagtagttatagtatactatactgtaactacactatactctaaagactatagtcttttaagtgtgcaatagaattctgtcatatatatatttacacacatatatataccttaatttaaaaaatactttattgctaaaaaatgtggacaattacttgaaccctcagtgaattatattttttttttggtggtagggtcttgccttgatgctgatggctactgactgatcaggatggtggttgccaaaggttggggtggctgtagcaatttcttaaaataagacaacaatgatgtttgctgcattgatggacttttcctttcatgaaagatttctctgtagcatgcaatgctgttcgatagtattttacacatagtaatttttttttcaaaattggtgtccatcttctcaaaccctgccttgtaaactaagtttatgtaatattctaaatcctttctgtgatttcaacaatgctcacagcatcttcaccaggagtagattccaaggaaccattttctttgcttatttgtaagaagcaactctctgtccattcaagtttgataatgagattgcagcaatttagttacatcttcagacttcacttctaatttgagttctcttgctatttcaaccacatctgcagttacttcctccactaaagtcttgaacttctcaaagtcatttacgagggttggaatcaacctcttccaaactcccattaacgttgatatcatgaatgttcttaatggcatctagaatgggtaatcctttccagaaggttttcaatttactttgaccagattaatcaaaggaatcattatctgtgacagttatagccttataaaacgtatttcttaaacaataagacttgaaagttgaaattactccttgatccatgggctgcagaatgcacattgtgttagcaggcatgaaaacaacatcaatctccttgtacatctccatcaaagtcttgggtgaccaggtgcattgtcaaggaacagtaatattttgacaggtgtcttcattctgagcagtagatcttaaaaatgggcttaaaatattcagtaaaccatgctgtaaacagcagatgtgctgccatccaggctttgttgttccatttatttatttatttatttattttatttttttacttttattttttagagcattaacctttgcaatttattttttttattatactttaagttttagggtacatgtacacaacatgcaggtttgttacatatgtatacatgtgccatgttggtgtgctgcacccactaactcctcatttaacattaggtatatctcctagtgctatccctcccccctccctccaccccacaacaggccccggtgtgtgatgttccccttcctgtgtccatgtgttctcattgttcaattcccacctatgagtgagaatatgcagtgtttggttttttgtccttgtgatagtttgctgagaatgatagtttccagcttcatccatgtccctacaaaggacatgaactcatcattttttatggctgcatagtattccatggtgtatatgtgccacattttcttaatccagtatatcattgttggtcatttaggctggttccaagtctttgctattgtgaatagtgccgatagaacacaggcagagtagattcgcataattcttaagagctctaggatttgggggatagtcaatgagcattagcctcaatttaaagtcaccagctatattagcccccaaaaagagagtcagcctgtcctttgaaatgttgaagtcatgcattgacttctcctctctagctgtgaaagtgctagataacctcttcttctaatagaaggctgttttgtccttatagtgaaaatctgttgtttagtgaagccaccttcattccttatcttagttagatcttctggattatttgctgaagcttctacaagagcacttgctactttgtcttgcacttttatgttatgcagagagcttctttcctcaaacctcatgaacgaacctctgctggcttccaacctttttcctgcagcttcctcacctttctcggccttcatagaattgaagacagttagagccttgatctggattaggctttggctaaagggaatgttgtggctggtttgaccactaaatctttcttgatatcagcaataagactgcttcactttcttattcatgcattcactggagtagcacttttaatttccttcaagagcgtttcctttgcattcacaacttggctaactgtttggcacaagaggcctagttttcagcctgtcttggctttcaacatgcctttctcactaagcttagttatttctagcttttgattcaaaatgagggatgttgtgactcttcctttcacttgaacacctagagaccattgtagggttattagttggcctgttttcaaaactgctgtgtctcaggaaatagagaggcttaaggagagggagagagacaaaggaatggttgatcagtggagcaatcagacaacacacagcattcattaagttcaccatcttacatgtgagtggtttgtagcaccccgaaacaattacgatggtaacatcaaagatcacggatcacagatcaccataacagatatgataatgatgaaaaagttgaaatattgcaagaatgaccaaaatgcgacatagagacacgaagtgtgcacaagctcttggaagaatggtgctgatagatttattcatcacagggttgctgcaaactttcaatttgtaaaaaatgtaatatttgggaagcacaatacaataaggtatgcctgtgttcttgatttctgtatgtatcttgttgcaaatgaacaataaatcatttgtaaacccatactggtctgtgaaccaaactttgagaagcattgaactagatgatggagcgcccatagggtggcattcagagccttgctctatcttgagtgtcttaggaggttattgtcaaggactttagtgcaagggccagcactgcagcctgatccctcagaatagccctgcaaagggtttgaaattgctgctcaggcccatatttggaaacaccaggttggatgtctgcttggctgcaaatacaatccaagaacagacatttaagccccacttgagttacgatgaggccatcagacctccagttttaagaagatatttaattttgacctccctgaaaaggggcagagagattaagcttgcagtatgagtagggatatactttatggaaagtagatgctaacaaataattataggttgaatgaaaggcaaataaatgcttgcttctaaaaagtacataatggtccaattcatcagcctgccaagaaattaggccctgtagagaagataatagaaggttgaaactctcaaaggagaggcaaattccgttgtaatctttttgatgccaaatgtatttttctgcaataatcgattatgtgagtttgagactccagttgttatcgtcatctgggaaagatcctgcagttcttccatacttcgccaccatcagtcagtaggaggattactgttttttcttcagggtggaggtaggctctgaaggatcacattcccataagagggctagtggtaataagaagaactaagcgagttcagtggttgactctgggtcttttaataacttctgatcttcaattttttcatctgtaaaatggaacaataccttcttttttcttttctttttttttttttttttagatggagtctggctctgtcacccaggctggagtgcaatggtgcsatctcagctcactgcaacctccgcctgctgggttcaagcgattctcctgcctcagcctcctgagtagatgggattacaggcgcccaccatgcccagctaatttttgtatttctggtagagactgggtttcaccaagttgatcaggctggtctcaaactcctgacctcaggtgatccacccgcctcggccacccaaagtgctgggattacaggcgtgagccactgctcctggccaaaaacaatamcttctttaaagccttgtagagatcccaacgtgagatgggtgtgatatatatttttaagagaacacaataaatagcactccattacttgcctgagttctgaacacattgagaaataggacaaaagaatcaatagatggaaaatgaaagtatcatcttcatggttaataaaggctaagatgagctcagtgtgagactcacatgaggctgtaaatcccagcctggggaggacctacctttccagtctcaggccacattggaccctgctgtggggacagagcctgtctctggaggagctgggtaaacttcacgttctctatgatctggccaacttccgagaggaagaggcaggattatgcatgttaaatttatgtcaccaagttcaccacccaactgaatgactcccaggggaggagtaagctagaagtggaatgaggccaggaatgtcatggagatagagagtcttccatacagaaagagacatcaagaatggggaagagttttttttttttttcctcttaaacaatcaggactaacccctaaacctgtgcttatccatggagtggttttccccctgccggaggggatcagtgggtcagcagggctgtcccattcccatcctcaggaggctgttccccataccagccactgctcaccagcacagcatcttgccttggtttatatacaagataatgcttgtagtttagttcacaatctagaaatatgtacttttaaaatttctaatagttggtatagatcttgaaagaaatcagctgtaggtaaatatatcttgataattatgaagttagaggaataaatctttttctttttaggatattggctaaaaagggaggttgagaattctctctttttctgtctctctccgtctctttcttgccttcctccaaaggcccatctgttctctgctccaaatttatgtctctcaatcccaaaaaatatagttggctttaaaactctttataattttgaaatggtcttctattttcctatagttgttatagcttaatactatgcaatcaggaagattgcctaatgctcataatttgtaatagatatgcaattgtaattgatcttggatacacatttatgatttttccctcttcaaactgaattcaaagataamattaacctagggtacatggagacctgggattaaatgttttgaagaactaagtatagctgaattagtatagcttacaagtatrtaaattataaagactctctccctttatgtgcacccagtacccttgggaactggttattaagttcggatcacatcctatacctttaaagatgaaacaagatctcaattttacgtgttttttgttctgtgacagcaattctgcttgtctgtgatatgtctcctaacttcagcatatgcacactggccacttctcagcatgaggaatggatgtatatgtttcagaacaaaagctgtaaaaatggatttttagtgccctgtaaagaagcctggaaaatcttgaaagaaacagaaggggggaagttgaaggggcagtggaagaatttgctattggcactaaatcagaggaggctaaaacataatcacagtataagatttgcaaatgttctctttcaaaagtgcttcgatctctgagaggtaccaatgttgcattactttgaattttacacacacacacacacacacacacacacacacacacatgcacacacagcttcatatatcctgcagtgaactgtaatctgtcagcacaatagctgggatggagtgagaatcagtatctgatttaacagtaaagtagaaaatttccttcctgtctttttctttcctctttgaatattctacctatgtttatttacaacatagcctcttggatctttgagagatagaggggaccttacttagaaagacagtctaatttcccagcaaatttaagaatgctctttctagcatttcaaattgtgatcttcctacctgtatttgaacaggtaggaaagggatgctcccaaatgctaaggacaatggtgttctttgtagatgctgctaacaattagaaaactcttatatcaaatttgacctttctctccccataatttctagtctgtggtcttcattcagtcttttggaagttaggaaccaaaaagactaaatttagtttcccccaacccctccttctcacaagactcttcgatgttggaagtaacctctcatattatggtaagcctgcccccacaccacccatgcttatattcaaatactgcccatagcgggaagtggcatttctaggggagaattaacatcttaatatcaattttccaatccagaaagacgatatatatatatatatatatatatatatatatatatatatatatatacacacacacacatatatatatatacacatatatatatatacacatatatatatatacatatatatctccatctcagtattcattagtttgcttcagtaatgcttttaatcattttaatgtgcaggtttgatataatttagttaaatttatctctaagtatttaaatttttttaaattttttaaaaatttttaaattgagatataattcacacatgataaaatttatccctgtaaagtatgtaagtcaatggtttttactatattcataaagttgtgcaaaaatcaccatttcatagttttaaaattttattgtaaatttcaatttccaattatttacatatagtatcatagttggtactacctagatatacaattgagttttgcattttgactttgtatcttgagaccttgctaaactcattaattagttctaataaggtttgggttttttttacattccataggattttctatacaatcatgtcatcattgaaaaatatagtcttaattattcttttcttatatctatcttttacttctttactttgtattattattaaacttccattaaaatggtgaatggcagtggtgagagcaagcatatttgcctcattcctgatcttaggagaaagcatttagtttttcaccattaggtatcatgtagctataggttttttatacatgccctttatgaaattgtagtttccttcaactcttagtttgctgagagttattttaataaatggatatttaattttgtcaaatggtttttctgcacctgttggtattactatatggttttccttttaaaatatgttaatatggtgaattacattagtaaattaatttgaaaatgttaaatgaaccttgcctttggggatgaacctcccttggtcatgatgtattatactttttctatattggtttatttgatttttaaaaaaatttaaaagttttgcatctatgtgcacaaggaatattgatctgtgatttctttcccttccccccacctccatctctcttttctctccttcctttccttcctttctttttcttctttcttttgctaaccatttaatggtggccttataaaataaacttgaaagtgttccctttctttctgttttctggaagatttgtgtagaattggcattgcactcctgtaaatgcttagtagaaattacctagagaaacatttggggcttgatatttctttgtgagaatgtttccaatgctgaactcaatttatttaatagatataggcctataggttatttatttatttatttcttgagtgagttttggtggtttatatctttaaaaaattgccaatttaatctttgtcaaatttgttgtcacaaagttttcttgcaattctctcattattctgtctgtaggatctctgagcagttttctttctttcactgctaatattggtaatttgtctgctcttttctgatcagtctacctagtgttttatcaattttgctgactttttcaaagaactgtaattgatttgctttattttttcttggttttttatttttccaatttctgatcttatctttattacttcctttcttccacttacattagatttaacttactttttaattctggtcccgtaaggtggaagattagataattgattttaaacttatcttctctaatattgatattctacrctataaattctctctagtcgttagtttagctgcctctcataattgtaacacactgtgttatcattttcattcagttttaaatattttccaaattcctttgtgattattttttgattcatgcattatttagaaatatgttgtttaatttttaaatatttgggactttttcagatattcttctaacattgatttctagttcaattccattgtggtaaaatttcagtccttaaacttattgatacttgttttatggtctagactatagtgtcttcgtaaatgtttcatgtatacttgaaatgaatatacattctacattctgccagttctgagtagtgtgttctttaccacaacaggtttcctttattcattccacatcacttataccaccatatgatatgatattatagatttatttctttacttggcttgttttctgctcccccaatctcccccttccccaccgtacaattggaatgtatactctgtgagggcaggagcttgactgttttgtttactccagtattctcagttcctgaatgattaaataaatgagtggatgaattcatgaacttttctcaaaacatcaagaaagtgtatatactagaagttatgtacaggctagaccatagggctcagatgagtactttaaaactttycctctttggttagaataaaaaatgtgaaaacttacatcatgtacatatttacctaaaaaatcagccattaagaaaaataatttgtatgtgtcacacacaattacttcttaaattcagaattcaagaaaatactaacccacttcatttgtcaaaatttatttatagaattaagaggggaaatataaacaacaaccactataaaatgtaatgtaaaatgatctcatttacattagcaacattaaagaaaatctagtgatacacttaacaaaaatgtttaagatctacatgaagaaatcttcaaaacactattaagagatagaaaagtttaaataaatgcttatttcttggaaaggaatactcaatattatcagctgtctattcatattatattaatctacaaagttaaaataatgccaaaataaatactaaaggtttctctggtgtatcaggaaaaagaaatctgccagagtagaaaggaagattctgaaaaagaagaccaagagtcagtggtaactggccctccatgtgttcaagtttataactgctgtaattcaaactctgtagtacagaatcagacttagacaatgaaaaagtcaatgaaaaagaaagggagtccagaaatacacccaaatacttataggaacttatgctatcccaaagacaccatttcattttagtgaagaaatgatgacttaattaatgcatggtattaggacaagtgagatgtcacctggaaaaaaaagtattttaaaaagttggattcctactttactccttataccacaataaattccagccagatcaaatatttaaatgtaaaaaataaagccataaatttcaagacaaaaataactgaataattttttataatcttggagactttggaaacatgacacaaaattgaaatgctattaaaaagaataacacttgactattaaaatgttttaaattgtcttataaaatgccataagcaaagtcaaaagcgacttaggctatagtgaatagtagctgcaaaaaacatgggaatgaagatgtctcttctataactgatttcgtttcttttggatgtattcccagcggtgggattgctgggtcatgtggcagttctatttttagttttttgagaaacctccatactgttttctatggtggctgtactactttacattcccaccaccatataagcatgctcctttctctgcatcctcatcagcattgtcattttttgtctttttgataatagtcattttaactgtggtgagagggtatcttactacggttttgatttgcgtttccctgatgattagtgttgttgaacatttttcatacacctgttggccatttgtatgtcttcttttgagtaatgtctattcaggttttcccacatgtccgtcaatgaatgaatgagtaaagaaaatgtgttatatggacgcaatggaatgttattccatataaaaaagaatgaaatactgtaattttcaacaacatgcatagaactggaggtcattatttaaagtgaaataagccaggcacagaaagacaaatattgcaagttctcactcatatgtgggagctaaaaccgtagatctcatggaggtagagagtagaacagtggttaccagaggttgacaagggtgggggtgatgaagagaggttggttaaggggtacaaacatacagttagaaggaataagttctagtgtttgataaaacactagggagactatagttcaccataatttattgtatatttccaaataactggaagagaagaattggaatgtttccaatacaaagatcggataaatatttgaagtagtagactcccagttatcctgatttgatcattacacattgcataaatgtatcaaaatatcaaatgtacccccaaaatatgtacaactatcacatatacatagaaaagtcactttgaaaaaaactgtgaatatttttgacaaagaaaggctaacatcattgatgtcatcaagagcactcatgtttcagcaagaaaaaaaagcccagtagccaaattttaaaagtgggcaaaggacacartcagttcattgaaatggaaataaaaatagctttraaacatattgaaaaatattcagaacttctcatagtaagagaaatgtgaattaaagttgcaacaagatgccatcttctgtctatcagattgacaaagattaaaaaatttagtagcatatgttttcagcaagggtgcgaggagacagaaactcatatgttttgggtcagaatgtaaattggagagcaatttggcaatatctatcagaattttaaagtttatagcttttgacctggttatttcgcttctagtcattgatcactcagtggtgttggtacacatatacaaagacatgtatctacaaggatatcagcattgcctgtccttacaaaattggaaaggacctaatatccaatgtggtgttccacctgcatccccttccctgggccagtgcatctgtctcccgccactgtgagtgttggctgctgacggctcacagctcacccttccccagagaattaccctcaactgaccaggaacttcctcacctggaagtagctgggaggttatccagacgaccatttctttgtatattggcaatatacaaagccaatatctattgtatattgtggtacaaaaactcaaaatgttttcctgctgccatgcatgctccagtgctccccatgggatcaggtttgacttgactaaaacctcatctttccttagcttcttccccagcctaacttttctctctggtttctatataagattctcttgaaagcacttctcgataaatcgctggcatgagagtctcccccttaggttgtgcttctagagaatctcacctaagacattcatcaacagggtactggttaaataaatgacagtattccatataatggagtaccacctagacattaagaagagagaagcaactattctctatatactgacatggaagtctcaaaatagagtgaaaaaagcaagttatagattaatatgaataatatattaccatttatgttaaaatggcaatttacaaatatagttgaatattcatagaatatctctttgtatagaatatctctgcataacagtgtttgcttgttgcagaggggaggccaattggggtctatgaaattagaaggaagaagatagagtgaattttgcactatatactttttctaccttttaaatattctactatgtaaataaattatctgttatattatttcaacagtggtaaaaaagcattagtattttcaaatagcttcagtgttttgaaacaaagcattagtagtatcaaatatcttcagtttaggataatatcatttatcagaaatatttcttctgcccttaggaataaattacatttaaaaaaattagcatgtcagtactctaaatgaaaaagtatgtttttgaagtccctagagggtgcaaaaaaactatctcattatctatatcttaagaattatctctgcaattctgttaattttcttagtaaacacttcccttatagataatggcattgcaacttccagctggccctttttaaatgatcacaaattgccatgtatctccatttaaatgaattgtgctttttgttaacctgagtttaattaccattcattttaccgcattaattatgatagatttcctgcctccttcatacctgtggccacatagacattgcaccattattagtgcttttggcatctggttacaaattatacacacacatctgctgtgaattgtggattacattaagaatcaaacatactggatttagggcttcaacacagaaagtgatgtcaatgcacagtcctgaaacatgagaccacacattgtctctgcctcatagaacagaggtcatgactatacaaaaaacctttttgcagctgagacatggttgaatatatttcatacatctctcactgtccatttcatgagaccagggtatataacagcccccagtggccttacccttcacctgcatgtgtgctacattttttttttttttttttttttgagacggagtttcgctyttgtcacccagcctggagtgcaatggcgtgatctcagcttgcagcaacctccgcctctcgggttcaagcgattcttgtgcctcagcctcctgagtagctgggattataggcgcatgccaccacgcctggctaatattttgtatttttagtagagacagagtttcggcatattggccaggctggtcttgaacccctgacctcaagtgatctgccagcctcrgtctctcaaagtattgggattataggcgtgagccaccacacccagccgggttgctaatctttgaggcaggcaacacacatccaaaatgctttaccctaccatctcccctccctgcctctcactcccgccacattggtatatccattcagagacggcacaggaaatgcagagtgggaaggctggtacgaatgctattgtggcagtggtggtcatttatttgttcacgtgttctttcattcaataagcatttaatgattcctgtgatgtgccgggcactgtgctaaaggaaaggacaagccatagtgaatatagtatctagccttgaggggtagagacttacttttgagagtcagagagtaagtaaatgtcttttcaatgtacaaaaaggagagggggaaamactgtgaaatttaatgctatatgcatgtataattatataagtaatttgactacataacatttcaaaattctgtgcacaagaaatagaagaaataaagttgaaaggctaaagatgacaacttgattgcagcacataggacatttttatgggcaagtcgtgcttaaaaataacagaacgacaaatgggcaaaaagaaaaatgggcaaagacacaaacagatgattcacaaagaatgatcacattaaatcaaacacaagataccattttcacccactgaactggcaaaatgttgtaactgtattaccttatgaagcaagaatgtagttgaaaagattcaacacagctgttagtagaattggtacctcttttctgatgcctgtctggtggacaatcaggcagtataaatcaaaagcttgaaactagttcttgccattggagtcataattccacttttcagaattttatattgagggaataatcagagatgtaaataaagatttttgtacaaggatgtttattgtagcattatttataattaggaaaaattgcaagcaatctattccaaaattagatgattaaatttgctgacaaaattataggccagaacattattccaccattaaaatccatattttcagagtaaaaatatgagaaagcacttaaagtatattattaagtgaagaaagcatgacaacacagtaagaacccaaatggacagacagagaagaggaagccaaaatattaagattgattattcagaggtgattgaataagaagtgatttttatttccattttttttcccctgtattttccaatatcaactgtcagcagccattacctttatttatttatttttttttttgagatggagtctcactctgtcgcccaggctggagtgcagtgggcatgatctcggctcactgcaacctccgcctcccgggttcaagcaattcttctgcctcagcctactgagtagctgggactacaggcatgtgccgccacacccggctaatttttgtatttttagtagagacagagtttcaccatgttggccaggatgatcttgatctcctgacctcgtaatctgcccacctcagcctcccagattgctgagattacaggcttgagccactgtgcctggcctactcttataatacattaaaatattgtaccaaatgggaaggaagagatataaataccaccaaattcattctgcacttgatgtggtttggctgtgtccccacccaaatctcatcttgaattgtagctcccataatccccacgtgtcatgggagggacgtggtggaaggtaattgaatcatgggggtgggtttttcctgtgctgctctcctgatactgaacaagtttcacaagatctgatggttttataaagggtagttcccctccacatactctcttgcctgctatcatgtaagacgtgactttgctcctccttcgccttccgccatgattttgaggcctccccagtcatgtggaactgtgagtccgttaaacatctttcctttataaattacccagtcttgagtatgtctttgttagctgcatgagaacagactaatacagcactcaatccaatattttaaatgattttttgctcaaactctttaatgatttcttatgtccttctgaatacaactgccccatgacatctcaaaattcctctcggatagattgcttgttcacaattacactttgttgtctcactggaaagcttgggctctttctaaaaacttactctaaaaagctcttggcatcctccccaaatatttatttgaaaatttttgctgggctgtgtctgtctcacctggagctctttggatgcttcatatccttttaatccaggaaagcagatgtattatttctctgttttctttttcaccactctcttatgttttcaaagtgttcattttaacaccaaataaaattagcctttcactggaaggtcaaacatgagtgtagctggcaaaaatgtactatgtcaataatatgactggaatcgtaacaataacaaagtatgggatattgcatatgataggcatggaaataaaagctgaaatgcaacattttgtagttggaaaagggaatattttaaagaatattttgtattaagtattaaattttaagagataatgtaaggttggggtatatatattatggatacagacaacaaaacaatctacaagataccacggttagaaaataaatccttgggcatgccaaggtaatttatagattcaatgccatccccatcaaactaccaatgactttcttcacagaattggaaaaaactactttaaagttcatatggaaccaaaaaagagcccacattgccaagtcaatcctaagccaaaagaacaaagctggaggcatcacactacctgacttcaaactatactacaaggctatagtaaccaaaacagcatggtactgataccaaaacagagatatagaccaatggaacagaacagagccctcagaaataataccacacatctgcaaccatttgatctttgacaaacctgacaaaaacaagaaatggggaaaggattacctatttaataaatgatgctgggaaaactggctagccatatgtagaaagctgaaactggatcccttccttacaccttatacaaaaattaattcaagatggattgaagacttaaatggtagacctaaaaccataaaaatcctagaagaaaacctaggcaataccattcagcacataggcatgggcaaggacttcatgtctaaaacaccaaaagcaatggcaacaaaagccaaaattgacaaatgggatctaattaaactaaagagcttctgcacggcaaaagaaactaccatcagagtgaacagtcaacctacagaatgggagaaaatttttgcaatctactcatctgacaaagggctaatatccagaatctacaatgaactcaaacaaatttacaagaaaaaaacaaccccatcaaaaagtgggcaaaggatatgaacagacacttctcaaaagaagacatttatgcagccaaaagacacacgaaaaaatgctcatcatcactggccatcagagaaatgcaaatcaaaaccacaatgagctaccatctcacaccagttagaatggcaatcattaaaaagtcaggaaacaacaggtgctggagaggatgtggagaaataggaacatttttacagtgttggtgggactgtaaactagttcaaccattgtgaaagtcagtgtggcgattcctcagggatctagaactagaaataccatttgacccagccatcccattactgggtatatacccaaaggattataaatcatgctgctataaagacatatgcacacgtatgttttattgtggcactattcacaatagcaaagacttggaaccaacccaaatgtccaacaatgatatactggattaagaaaatgtggcacatatacaccatggaatactatgctgccataaaaaaggatgagttcgtgtcctttgtagggacatggatgaagctggaagccatcattctcagcaaactattgcaaggacaaaaaaccaaacaccacatgttctcactcataggtgggaattgaacaatgagaacacatggacacaggaaggggaacatcacacaccggggcctgttgtgggggtgggggtaggggggagggatagcattaggagatatacctaatgttaaatgaggagttaatgggtgcagcacaccaacatagcacatgtatacatatgtaactaacatgtacctgcatgttgtgcacatgtgccctaaaacttaaggtataataataaaaaaaaaaaaagaaaataaatccttgggcatgatgatgtaacttttgttttttactttttcttttctttcttttttttttttgagacagagtctcacttggtcgcctaggctggagtgcagtgctgtgatcttggttcacggcaacctccgcttcccaggttcaagcgattttcctgccttagcctcccatgtagctgggagtacaggcacatgccaacaggcccagataatttttgtatttttagtagagatggggtttcaccaagttggccaggttgatcttgaactcctgacctcaagtgatctgcccgcctcggcctctcaaagtgctggaattataggcgtgagccactgtgcctggcctattttttaccatttctaaaagacatttcccatttggttgaattcagaaattcaaatatacatatatataacttggagttgtcttttgcaatattgctgatattcaggtcagtattcccagtaaaatgtattcagcatgatataacttaacataaaaatattttccaggctttatctgaagtgtgtagtttcagtttggtatgtatttctgttgtgactaaagagaaggatttttcttactatctaagttttctatatataagatcctagagtggttctcattcattcaaaatatatttattgcatacccagtatgtttctggcaatatgtttttatgataattctattatgtcctgaaaatgtcttacagtggtattttataatggcaaaatttttggcaagtttcacaagtatgtacttttttcaaaatagcttctttattcaatgccaaaaaaatagaaattggacaaatcatcttgtcaactttaatgactaatttggaatcaccgagaataactgcttatttatgaaaatcagaaataaacccattctctaaaagacagggggatggtgttagtgtgaaagatcctgcagtgtgattgtgtttcatgaacatatataaactttagatatatcagtttaatatttgttaatgatgggcaggtactgaggtaaaaaaattaacctacttgagaatatgttaactaatctacagaggacattagtttatgcagtccttggatataagaaaatttgtattattttatttcctgaaactatgttagactgaaggtcatacaaaaattaagaggtctttcatagtccagacccctggagaaggatccacttgccttcagtccacactggtcacttttgaaaggctccttggccaggttcttgtatcttggacctcactctgtgagccttgcagttttaggacagtggtgaggggacatctctgagagaatagatagatgagttcctggcactgggagcttgagatggagtatagagcagaaaaagcaggtactcaggggctgaaagaaagaacagaagatgcccttcttcaggccggatatttaccagctgggcaggtgggttggtgctcagagaagttctcaactatgaccatgaagtcagcagattcatacttcttccaaatttcccccctttttagcctgtaaagccacagctaagccagtgctggttctgaattacttccctatgcacgatgtgtaaatgattgaaatcagatgagccatagactgtaaattcacttgtataaatgtgtgaattattgacatggatccaattaaatggggaatggtagcaagaagtagtccttggtccttcattgtagggagaaaaagttttagarggaggatactgcagaatggagtttctgatggaaaatgtttccaccctcacagattttaaataactcttctttagggaggtcagtgaggctacagggagccagagggtggcccctgctgactgtttcaaggctgtccttcccctcttctcaggcctttcacctgttggtgtcatttcacatgcgtgataatcttcaaacccagctctgccaccatctaccttccccattgctgcccttctgccccaaaggatttgagaacaacataaaacaataaatactcagctccccatgagctgccattcacttcaacttggctctcaccagtgcttgacacatcttctctccatttctccctggcaggtctccaaaagggctgctttaaaccattcctctctccttagcccccagtcccacatgctgagagtcaagagaacatgtgtgagaacgtaggtgtgggcatcagatggaactcagcactcaccagctgcaggaccttggttgcatttcctaactacatctggaaaagaaagatgatcataactagaacttaacctttgaaggttttatgagcatgaaaagatgwctggaaagaacttagcccaccaggacagggctccrtgaatgtcatctgtgactgtgggtacccttccttcaaatgagtgaacaataccctcctcattgacttggaaaacaagtgcccctagcatgctccttcaactacttgatattaatttccacatataactcactctttccacttaatcgccttttccaaaatgtacctccacccctgtgttactggatgccattgtttgtgcctcaggctccttgttgttgtcattatcccaccttctctgggactttccttggcctttaggaaaactttatactttgaaacaagtgggctgaaattctgtcttctcttggatgacctggcaccatcgctactatgtgtcacttgtgtcccccacttcttcctgtgtcatctcctgtggttcagttcttagtgtttcagtctttgcttttgacccattcactccaagggcttccagaggatgttgaatgggacaaaatattgctatgtgacccacatttgagaagatccaatgacagttggatccaggcacctccctatgacttaccactgggaggcagaactacccagttaaggaaggtggtatttgtccttttccaaagatagcatagtggttaagtgcacagatatttggagtcagactacttgggtttgaatccagcctctgccacttactaactgtatgcttttagttgagtcacttaacctagttgaattatttaacttctctgtgcctctggtttctcatttgttaaatagagataataaaagtttcttactccataggtcaattgaattaactgaatccactattaagaacagcaattatgtcactataattccccaatcyttctgccctgccccaagtcccactaagggaggagagaagaaaagaaggaatgaaccatgcttgcctctaacttcaagtctccccagcaagggatcaaaatcgtgtagaagggaaggggaggggaagaggtgagatttcaatcacatttgagatagaaacatttaactggtttgaaattttaataccttttcaaaaaacatgcctggaaagctatgagatatgttcaagatgtaattatgaactaaaaaggctgtattgcagttttttagaaaaataaaaatgatttcatttaaattcaccaacttgattcctcagtaatactcataataatgatgatgatggtagctagctgaattcaggattttttttttgatattcactaccatggcaaactgtcaaacttaaaaaatcatttataactcatatccactacaatggatattatgaaagatacaaataataacaagtattggtaaggatgtagagaaacccaaatactcatacattactggtggggatataaagtggtgcagccactttggaaaaaagtttgactctttcacaaaatgctaaacatagagttacaatatgagctgggaattctactacctagatatatttccaggagaaatgcaaacatacgttcacacaaaaacttgtccacaaatgttcatagcagcattatccataattgccaaaaaagtagaaacaacacaaatgtctgtcaatggaaaaatagataaagaaaatttggtatgtccataaataaaatattgttttgccatgaaaagaatgacatatttatacatgctacaacctggatgcaccttaacaaacacgctaaatgaaagaagcaagtcacaaaacctatatactgtgtgatcccatttattttaaatgtccagaataagtaaatctagagaggcagaagttagattagtggtttcctagagctgagtgtgggctggggtgggaagtgactactaagggtattttgggtgataaaaatattctaaatttagattatggtggtggttgcacaattattttaatatgctaaaaaccattgactagtacactaagtgagtgagctttatagagtatgtaaaatttatatctcagtaagttattaagaatcagcttattattctccaagttttgaaaacagagtcacagtttccctgaccttgggctttaatctttacaataaataaccttagcctcctctctctgcatggcctctctttccacttggtgatggcagtggacatgtgtcatttttctggctgccagcatttgaatccatttccaagtttagagaactgcccccctaccaccaccatttatgagtcttggtggagtgcatcagccgcctcccattataaaatggaaaacgctggtacctgcttgctaaagtttagaggcccccaccctgccccagctttgaagtcaggcacttcaaatacaaagatacacttcagatacaaagaagtgaggacagtgggaaatccattctgatggcaggtgagcagtgacaacagccaacttggtttccagggacagcgtccgtgtccagtgccaggtagtgcaaggcatggccacactgtgctcagcaggagtgatctcaccacattgacttttggcttgattttgcctgtgactaaatgctacttagtcttctggtcctgcctgtttccaagcctgtttctttaactttcccactaattgtgtgagtttattaatagccttccgatcagttcctttccttccatgctcagtttctctgcttgctcctaagaatcctgtttgatacagtcagcaaggaaggataattttcaccccagtctccaggatctttctttagattctgtaagcatttacttatttagtgactactttgtgccatccaataaatgatctcataatcgcatagtggcaccgataccaatagctcccatttcacagatgaggaaacaggctcattgaaatgaatagcttgtagattcaaacccaggccaagcccagtgcctttcccataagatcttcatggccccttctccattttcactgacaccacatctcgctcattatttacagaacaaaaggtcccactcctctccctccctccactatctttcttctttaaatcgctgtgggcatcattgtcatatttcatcataagagtattgttgattcctttgtacaacagctgatgatgactccctactgtttaggtgatcagacctcaggaaggtatttcctgatcacatccaatgcctcctttgtctctggccacatcttttactaattctaaacaagcccatcacatgctacaagagtaagtcctgttttctcttagtctggctcaacttactatagacagcaggacctcaatcaatacccttaatctggaggctgactaaagacaaaatattgaattcactcttcatrttttcatcataaaccccaaattctatgacaatgatgattttggaaacaataaattaagcatcaagcatcatatggcaaaatctattggaatgtaatatttttggcaggaaatcatttcagagtggaaaatgtttgctaaatataaacactgcaaagccatgtgcaccgccaagactttattattagattctcagggatttttatttagaagctgaggaacttgcgaggctgtacaattcctggaatggaatttaggtttgctttctgaaatcaatccaggcaagcctttttgcacatgagcattcttagaaagtctttgaatgtctattcttactcacttctabgggtggcacaaaatccaaaaataaaattaccatgaggttctgcttgcttcctgctttagcgacactggaaatcctccagggatagctcatgtactttgtaagttctcctttgcctctctcattgccagcattgggtagttgaaacctagactcaggacaagatctgggatggtgtgaacgtcaggaaggctgtgcaggagaattcagaggactgggccacaactgctaagggtagacctggaatgcaagggcaattcacagagggttggtcagcagggatggggccagctatagtggtacttgagcctgtcaaggggctgagcagagaggcctggcctgactcctaccttgcactactcttctctcaaatgggaatactgggggaatccaaacagatcctggccattagcaggagagattgaagagaccacagcccacatcctggggcactgtagcatgttccttttattgctggatctggctgtaactttgggacctgactgtgacaccctgtgtagttatcttgtcaaatccccttgtaaggcccagcctagtgcttggatgcctgacacttgcatcttctttctgtatgcttcttcctgcctcccatgtgactttgtcaagatggctgtcactccatctttgttgctatgagctttgagcccctttggacaactcccctggatgctgcttgctcacctgggccactgcctgttgttcaggccatggctttccatcaacactatcttttaccgtctcttgccaagtcaagcctgtgccctcagggccagtcttccttcatacaactctgtgaacagacctaatttcagaccctgaccatgtgttgacttcaccaggctctactcctcagaggggtagcaggagctgaggaggctgtcaggggcccaggcatgggttaaaggctttggtagcatgaatagaaagaatgggtcagaagcccagactgatggacacaggcatcagggaatgcaccaaggagaccagggcttcattggctcacaggtccctgtgctaaagaggaaagcacatccacagttaaaaaaagctgctcttccttcaggtgtatacaacctgtagcgatttgaatgttggccccaaaaggatatgtgcaagtcctaacccctactacctgtgaatatgatcttatttggaaaaaggatctttgcagatgtaattaaggatcttgagattgagatcatcgtggattacccagatgggccctaaatccaatgacaggtgtccttataagaagaaaagaaacagtgagaagaaggccatttgatgatggaagcagagattggagtggcgtaactacaagccaaggaatgccaagtattgctggcagctggcagaagctaggagaaaggcagggaacaaatgcttcctcagagcctatagaaggacccaatcgtgccaacaccttaggacttctggcctccagaactgtgagaggataaatttctgttgtttttggtcagtttgtggtaatttgttaaagcagactttggaaagtaatgcacagccccagaaggagacatggctttttgggtagagcacaggctaactttcagcccttcctgcccagcagtctggtttctttgtgcaaggcacaaactacaccacaatttatcaaggctctgatggagactgagaaaccagagcccaaatccacagaaagaattaaaggagtcagcatttggtaacaggaaaagaatgaactctataggcagatggaagcctgggattctgacactgtcgcaagttagtatgatgttgagcatcagtttttttcacctgcaagacggggtgggaagggaagtagcacttgttgatcaccttttgggaatgatgattcccttgaattcactggatggctctcaggattggatgacagagtacagtgcttggtttccygtctgtcctcaacagatatttatttcctgtcccctcctctcctcaccttgggtaactggtattagtgttgcaggagcaataaggatacttgaactctgctacaactttgcttaagctcagaaatgtttggagcctcttgaaattgcagccaatggtgtctgccattggctccatgggccttgcagggagaatgaagttgatataccttctggaaaagaaagagcagggaaaaagcaggagctacagtttataaattctgtttctccaacgtggccacaatttgaaatctacactgcatgtttattctgtttgtagcactacatgcatgcaaaactggttgaagacagtttccatgatgaacacaagcattataattgccatgttgatctccataggaattcaagtggaaaaaaggttctttattccaggatgcccatatttggacattgttgcccttgccagacaagagggaatgaccttgttcttaatttaaaaaaaaaatggaaaggtggtggtagtagcctggtagtagccttggttaaaagattatgggttcacacttttctaccaagtggaatctgtctggctattctgaagcatagagacattctatgtcttctgaacataaacaggagagtttgttgaaatacaatattaatatgcactactgagaagattttgatggttcataaaaccctcatgaatcatggatgagagagttactggagtctcacagatcaattaattagatgtacaaagtgtatacatttttcatttgattatattttggtgttgtgttatagatatttggtagataaagtgaatccaagtatttatttaaaaaactacttcaagacgacattggagggtggttagtgagtctgagttgaaggattatgagggccccaaggctggtcctgagtgtgctggttaaaggggtgcacaggcacctgacrtaacagagctgggagtccagcaactaacaggagagagaaaaggtggcatccttctccctgtgaaagtcgccttaagaaagcttaggctccacttatggcacagagagctaaacatacatcagcttttccctccagggaaatccttcggggtactctgaacacatttctgttggattaacagggcccttagtgagatggtgttaggctgtccagcgactgggatcttccatttctttcagagcaggagacagcaaaatcatggcttttgttatctatctatatatacttattaatgaagacattccaaatgaatgatgacttcctgagctatccttgtggcatgtgcctgtccttgtgtgagtgcttgtgtgtgtgtgtgtgtgtgtgtgtgtgagcaactcacctaaaaagtaggctctagagtaggctytaaagagcttggctgtgccttttgaactgacagatacatatactttatagaactgtgaactttttcacccaataaaacaggggtaatacaagagtcttctaaatctttatgtttcatgtcagtattaccaggaattctgaggccgaagttcattgcttacagggtagttaaataaagatgttaaaggattagctaaaacattatccatgtattatcctagagtcagtggtaatatctactgacaaaagagaagattaacctcagagctttttgctaaacagcaagctgatgctcaagtcacgtttcaacatatttcttttgcaaggaggctcttttatctctatccaaggtgatactaatagacttatggaatacgttttcccggtctccagaagtgtgtcagctttccaatgacgtgttttttccaataattcaactcatcagattcatctggaaacagttgttttgatgccttctgtctttcatgtggtgccctaataaaggctgcagaaggaatatggtttgcagaaagattaaggtgacccaaagatgtattaatgccctgctgatgttcaaacaagccaatggctttttctttggaagtttaggtgttagtagaaggaggcacagaggcttggagttacagaatgtttggcccagaagagcttagagatcccatacccatctcacatttgggagccctctgtggctccccatttaggtggtctccagccatagtttctgcacattcagggcagagaaagctcactacttccccaaggcagtctatttccactgttagaccatgataacacaagaaaagtacttctgagctgagctgaagtgaaatatgcttatgcaacatttggtcctagtcctgctttctaaagcacaaagaataaatctctttcaccctgatgggccacacagtccagatgaatggatggagatattgggtttgactctgctccatcacttaagtagcagagcatgttagaatctctcaraatcttggctttctggtctcttagacgaagatcaggatccccatcacctgggccattgtggagtttgggccaaataatatattttaaccatctatcatggtacttggcacatggcaggcatttattgaatgctcccttcttccttcttcttgggagctcttcaaacacttggaggcagcaagtctattttcctttggttttctcttttcccagccttcatgctgcagatcaaaggaatggarctgaaartgggggctgggaaatatctaagtcagtgtctcctaaagtgtgggcatcaacaggtggtaagaaaggttatttttagatagcacatgcatgatcattttataatttaaatataaatctatctatctatttaaatgatatatttcatagctgtcctgtattatgtcagggaatactatttttctatatatgctagtgatataaagtctcctttaaaataaggttatttaagaataaaggcaaatcaagtacaacaaaagctgttattattaccttgttgaaaatcaaatgagtttccaagcaaatcaaagtctatttcaaaaatctcattagcaagcagatctgaagaaacgacatggtgtatgactccaactatgtgatattctggaaaaggcaaaactagaaagacagtaaaaagatcaatggttgccaggaacctggaaggaggaagggatgaataggcagagcacaggggatttttagggcagtgaaactactctgtatgatactgtaatggtggatatttttacatattacatttttcaaagcccatagaatgtacaacacaaagaataggtctagtaaactataagatattaatattagctcatcaactgtagcacatgtatcatactaatgcaagatattaataataggagaaacttgagggtatatggacactctttgtactttctgttcagtttttttgtaagcctaatactgcagaaagagtctattaattaaaaaaaattaattagctagacaactttccagcctgattgtttattcactgccatttctccatctgtctcagggacatttcatgtcaaaaaccaaattagtcacctttctctacagaagagtactgctatctagttacttccaattgttaacctctgagatcctcccaaccttagagaatattgtgctcctattcctccttaatttaccaccttaggttcattacgaaatctctctgtccctctactccctccctttactgtctctggaatcccaaaccttcacaatttccacaactattgccatggactgggagctctcatcactccaagcctgggctactctgattgcctcttggatggtcttcttatctttaatttctcctccattccaagatcatccatgaacagctgttaaaatcaggtttgaataccaatttcaccccattccttctttgcttgagaatttgcaaacctctgtttccaaccatccaagtgggtggaatggtcaaagacctggatattacctgtgcccaccaagtcaagacaaggacttggatgagcarctactagctgatccaacaaagataattaacaccgataattatgaccatgtattgaacaccagtagaggatgctgtggttcgtgcccaggatgaggttctcattccctcacccagyggctggcactctcaggtgagcccctctctaggaattgccctcacctgaaggcagccacctcccagggccagcacagacttgatgactggtggatgaggaggaataacggccccatctcctagccatgaagcaagatacttcagaagggtcagctgagcatgagagttcccatgggatgggctgcccctgttgtgactgcatcaaagtttagcttctccccaacttcctcacagcacttgcatcctactgtgccagccaataatctccctgtgcacaaatcccatctgggcatctgctttgtggagaataagccctgcaacagcatccaaagtcagttggactctgagtttgtgctatgtccactgatctacactatcttttgaaaacaggcataataatagctgtctgctgtcaaatactttctcggttccaggtgctctcctaggatattttatttatacaaattctaatcttcacatcaaccctgtgagataggcccgctttccagatgagaatacctaagaattagagaatttggaaatgtacaaaagtggtccagtcaaaaaggttttggggacttagggaaggccagtccgtggcacctgggaggcatgaaatacaagtgacttgacattgaattattcacttcagactcatttacttctccctgcccagggacagatcctaagaggggttaggagggctgggcagtcrttcaacgttccctgcttatctccgttcttcttcccagggatgcatccttattagctcttcttctgactacatgtgagcattccattccaatccagccgctcagcctgctgtccactccctgcagtgcaacccagcccagcccctgccttatgtgcgtgtcgtgttttgtcttctgaaatgctcattcctctgcccatgcccatcatgttcctttcagtttggttaaaaaaggatctccttctgaaaggactttctggtgctatttccagagagacaattcacctccccaagtacttaaacactcattgtagccccagttgttctagcctatttcatatccattagaggtcatgcttagaattcagaycatttcttcttcttctttcttttcttcttccttcttccttctttcttcttctttgttaagcaaatatactcttytctatgtgttaccacttctgtggtgcccgtgtgattttgaagtgtttttcgtatgccattagacctggtcttttctgccagattgactggaactggtagaacatttagcatctgcagctgggaaatcatagaagaaatgcctgaatgttttcctatgtgagtgattcttatctcagccaaagaagaagtaagattttaaatgagccaaaactgttccagaaggcaattctaggagtgagcattgtgtaaaaatctggaaaaataaaaagtttaattgtgacaactggggttttatgtggtaactctctcctctttatgtcgtgttatacccaagaaaatcttaatatctcttcctatatttataatattattgagggtcaaaattacatgatgaaggcgtaactgtgcatggttcctgtggccactgaatccagataaatagatagataaactctatgtccagaaccaaggagtctattttggttgtctattgtctggatccactcattaggctggagaagggttaccagataaaayacaggattcccagttacaagtgaatttccaataaacagcagtataaatgtcaagtatcacatgggctatacttatactgctgtttatctgaatttcaaacgtaaatgggcattctgtatttcacttgctaaatctggcatctgtaagctggcaggtacctggaaagactcctccttccaaggaggaaaccaggtcatgggtgaaggctttagtcagggatagggggaaggaatatttcttagtggcagccaagtaggtcaaagtaatgcatgttgtcccatcaaatgcctttctccctttgaaaaacagaagcaattacaggaagstgagcctaaccaatgatctgtgaaagtcggaggttgagacagaggtcccacaygtgtacatctagaaaaccagttgggtgatgtggttaggtttggcttttggttatgtggatatcctagcaatattatgagtaagtgaagaaaaatgaggttttggggaatcagaagggcagggctggcttgccagaaggactaactcctgatgggatgtctggttttcttaacatctagtattgaaagttacagggcaaatttggccttggtatgggcaagctatgcaattcaatgagatccaatgtggcaggctggttgtgggagaaaggcttggctcccacagacagcgctggcaagttagggttaagtgtcataactcttgacccagtaggggcctggagaacataaaaggtcatgatgaaagaagatgaaggctggagaagggagttaatgaggacaccagcttaaagctcttggactcctaggcttctcccaacactctaaggatccttctagggaagcctgtttaattctgggtctagcctaggggtggagttgaggcagttcatggcctatctgctttggtcaggctggctcagagtttaggaggtgggaggcccatgagatagaccaaacagtcaagatctgagtagctcacaggaagctagaggaacagctcccaaatcatcttcatttgtgccaggaaggtgtgtggggtagagagtaggcaatgtaccagacaccacatgaaggagtagcagaaacagttggagaggcaagactgattgaaacaggaaagtacaggccaaagaggcagatgagtcatcatataaagatagcactagacgccatagaaggtcttcttcttttgaaaagcagaaacaattatgaaaaggtgsggataggcttttgaaggttgtgtctgatctctggctaggctcacaagcccagcaggagcctgtcctacaaagcctttccctgaggagagcttgcaggttgggcagcctaagccctcgacagaaaagcacatgtttccatgaagtctgaagtctcaaatgattgcatttcatggagtttgccttgtgcaaagtcatagaaacaaatscaggtgcactgtgggcaccagagctaataaagaagagaatcttgtagacatgaaagagagaargtaagagagataaaaggagatatgtggaaagagagagagagaaagggaggccataaactttggtggtttttgcctttagtttcacttatgtaggcctttttgactaaaaattctgaagattagtgtttgctataccttcagttaccttatttttcgtttctttctttcttttttttaaattttgctgagacagggtctcattctgtcgcccaggctggagggcagtggcacgatcttggctcactgcagcctcaacttctcaggctcaagtgatcctcccacctctgcttcccgagtagctgagactgcaggtgcatgccaccatgcctgcctaatttttttgtatttgtagagatggggttttgccatgttttccaggctggtctccaactcctgagctcaagagatccacctgcctcggtctcccaaagtgctgggattaccatgcccggccccagttaccttctttttcaatatttaagttaggtattacacaaaaatgtttgcaatgtaattatcaacttctataaggcattccttacttgtttactttgcactaagttgatttatattacagtgttgagaagctcactgtctggatgtggactgtgctgggccctgaacacttgcttgtctaacttctttttttttaacatttaaaaaataagctttattttggagtaatactagatttgcagaagagttgcaaaggtagtacagagaagtctcatatgccccttgcctagtttccccattgttaacatcttaacaataccaagtatatttgtcacaactgagaaactggcttgtctaacttctaaatgtgcttctaaatgcccaggctttcaggagtggagaaatgccctactcaggttgatgttttttcttgctccgggagcctgaactttccacccttggctttggtatccatgtgtggtcccttttccaatggtgttttcctttcttatttgatttttgtatttatcatatctcgatttacattcccaaatgtaaaataaactatttcaaaatgattttttcgtacttctagagttgaaacagaggaaaaaaatgcattgttctggcaaggaaaaatatactaacaggagtaaaataaaaacagtcacttcatattcaaggccaaactctggaatttaatcatctcttataaaaaaataaacaatttttgaaaattacttaattcatcactgattgagcctggaaattagatatcgaggaacaaaaacaataaaactctgttagttagcatgaaaaggccaaagcatgtttagtctaagtgtttaggttaatagacaatcactgtgtgttcactctaaaataagagatcagttgtgaaagagggctctagtgagtgggttaggaaggtacaatacatgagagcactgggctgagagtctacttccagtttctcaggctaattctgctacaaatgctttgtatcctccaaggcaagcaactttatctcaagccctgatgtcttcacttgtaaataagagatagttagagataaagaagtggctcaagatttccccaaattctagattctgattccataacaaaatccaattccctaaacactcaggagtttaattgagtattattggatgattcacttggcagttaggatcttgctgtggaagagggtcaccagtatgaatattcactattgtgatgatgaaatgtataggtgagaattcatggatagttggaggatcaaacacaagatcaatgctttcaaatctgctttatgatgtggcatacatagaaatcaggggtaaacagatgaggatgcctagacctggggcatacttagattctctaaactattcccagttcctccatgggctcatacttagattccctaagctcttcctagatcctccaagggctgagaggattgatttcttaggtaacaacttataacccagtaatggcatagcctagcccaacagtcaggaagctcttgactatggaccagaatttgctctagaatggagagtgacatgtaacacaataaacatgatagctactaaagataacatgcctttatatttttattccttttttttttttgagatggagtctcactctgtcacccaggctagagtgcagtggcgtgatctccgctcaccacaacctctgcctcctgggttcaagtgattctcctgcctcagcctcctgagtagctgagcttacgggcacatgctactgcgcccagctaatttttgtaattttagtagagatggggtttcaccatgttggccaggctggtcttcaactccagacctcaggtcatctgcctgccttggcttcccaaagtgctgggattacaggcatgagctgctgtgcctggcctatattttcattctttagttcttgtaaaaaaaaaattcagaataaatgagagggaacagatgatgtgaagggggtggatagtaaatacagttggtgacacactgattctgagatacctctgaagcatctgaatgtagatattgagactattggtagatcctcagagctggaagtcatgagggaattgtgggctgcagagagttttggaagtcattagcctatatagatgagagttgaagccatggatgaggtttctctgaaagagagaaaatgagaagaagccaaggataaagctcaggggaacactaatatttaaggagctggcaaagagaaggagctagcaaaatctatagggttcatttacagctacttacacagtgatttaaagtcatttcatatgtgaaaaacataagaccaatggatatccacatatagatttgatttgtgttgtgtaaggatatacmcaaatgcaggcaaaggaacccacatgctgtggatttgttcactcattcactcattcacagtggatgcattgattctttcaatgaatgtttactgagcacttactgtgttcctggcattattctaaccactagggatagagcagtaagcmaaacaggttacgtcccttccctagcggagttttactatggcacataccaccacacacaccactaaatactttagagcttgctctccaagagggagagcagaatgtagacaggctctgtatttttacctctcaagaatcctgtgtcttcctaaaggattgcttgtcatcacaccaactcatagctttggccctggtgctgtatttgacttttattcacttaaaaggttaactggatggctgaattacaggattctagccaaagtgtgctccctagaggattcccagctaatcagtcagctgagctgagctgacgactgtcttccattcctaaggagctgggcatttgcaggctgagctcacactgtgaaggctcagcaagaccttgatctcccttcccaagtcatggctgagtgacagggagcagcaaaggtcatggttcaaatctgaggtggcagattctgaggacaaagcctgcagagatcgctttctattgggaactttctcattttaattccttgtcagaatattccaactccaggccttccaactccaaggaaactgaggcaaaaatctaccttctatcttgttatttcccccagattaatatttttcttaaaattttctcagataattagtagatcagagattttctttattttggggctggtatgttttgggttttcattggctaattagccaacttcatctctagaactttctgtttctatcaatatctatccaaggatgtctctaatctccctggttctttaacgtaattcccatgcatgaagccccccacacccgcttctttctccattgtctggttgagatctagtggaaagcctacatggcagtggagattggaaagtagtctttgggtgaaaatatgctccattatggctaaagtgttggctatgccagtccttttaattaatgaacttaaagtaaccttakactccttcctcttccatcatctgtcatacctaaataattatatatgaattagatttcttaaaatgctatatgtacatgcatgctttagcaagtaacttttaatgcatccctattacagactggaacccaaatttattagcctattctttgacctagtgatgagtgctttcaggatttatcttaccaatagagtcatacatgcaaaataacctatttgaaaaattatttattgtagcattatatgtaatagcaaaatacaggaagtgatttaactgtccatttattggggactgttaataaattatgattcatctctacagtggagtactatgcagctgttaaaaaggaaattatttatatactgatgataatgacctctaaactatactgtaaaatgaaaacagctaaaatttgtgaaaaaagaatacacacgcatacacacatgcatatccaatttcttgtaatatgcacttaatatccctggaagcatacataagaaacatcagtttcctcaggagtggagagttgggtaactgaggaataggagtgggaggggaacttttcactataatatgctatggggacttttgatttttgagccatgtaaattgttacagataaatatacaaataggagctaggcgagatgcctcacacctgtaatctcaacactttggtaggctgagataggcgggttgcctgaatccaggagctcaatactagcctgggcaacatggaaaatccccatctctacaaaaaatatgaaaattagccaggcgtggtggcatgcacccgtagacccagcttttcgtgaggctgaggtggggggatcacttgaacccaggaggttgaagccgtagtgagccttggttgcatcactgcactccagcctggtagacagagtgagaccctgtctcataaataaataaacaaacaaaaacactttaaattttaaaattcttcacctggcatttgaaagcccctcacaatctgcccttgattatattatcaggcatatttctagaatatcacattttcccttgcacaagccgtctgctytgcccaccaagcacctcctgcctcatgtgtgattccatttaggtcctttcaaagccaagttgccaggttctagttccaattctacccaactcgcgttttctggaaactccgcaaaaagcactgtgcctgcagctgcaggctatactctcaacttagccttttctcactttgtattccctgggcatgtaaaatttgttagggcaacatccttgatcttagacccttttgtggagggaaggaaaataaatggggtagaaagagctgacaaaagcttcaaacttcttcagtatctgcttaaaggcccatctccgctaggaaaccaggcctatccattcagccatggagatctcctcccctggctcctataagtctaattatgatgacccataccaccgcccagcaccgaccttatgtagccatacattgacatgtgtgatcatgctgtgtccccccaccaactcaatctatgtctttaccaaatatttaatgaacaccaccatgctaccatgttaccaggtagcaaaagatgaccragaccccattcctgctgacaatggaactcataggagaatcaaataacaattgtacttgaagaaattgtctctaagatagtgcgacatggaattgagacctctgtgctctgcatggaagacccgagagggctgctaaggggatactgtccttgacatgagtcatgaggatatatatgtatcacttttcaagtggaaacaagcggaaaaagaaaaaggcatttaacaagaaggtgtttcaggagaattccaactaattcagtatggctgaagtacacagcacctgcaaaaaagcaaaggtggtgagggtggatccataggcatgagctaaaacaaattcctcctgtgtgtaggctccttagcagcagagatttttgtgtgtttattgatggatcctgggtgctccatagtgcctggcacagaacaggtactaaatatatatttgttgtataggaaaacaaatcaatgttggaaatggattaataaatgtatgtcaggaccagaagtttggactttgacctaaagggttattgaaggactttagtcagctcaatggctaggtcatacgttcatttcagataagcacgtaatcaactggaaaacaaatgaaagtatataaaggggctcaatgtgaaggcttacagagaacacacagacatcatctctttatacatatatgtaatgtccaataataaaataaatagcaataaaaatttaaaacaccaagtaaaattaaaatgtgcaagatgtacatctttaaaaacaataaaacttaataaaagaataaaaagaagaagacttgactaaataaagggaaacatcatgttcttgggcaggaagtctcatattgtaaagatgtcacgcttccctaaagtaatatataaatgtaatacagtttcaattaaaatcccagtgaggttttgtggtacttgacgaatagcttttaaaattcatttatatgtacaggtgaatgaaaacggccaagaaaaacttgaaaaaccaataaaaatgagaaaggagcttgcttaaccagatcaaaagacaccaaataaatttatggtaactaaaacagtaaggtactagagcaggaacacagaaattgaacagagtcaagtatctaaaaacaaatcttgtgtatagttagcagtggtgatagctcacatttattgagagcttactatgtgcctggcatttttctaagcattttgtgttactcattttattctcataaaaccctctgaagggtgtcttgttattatccccattttatatatgacaaagcacacatagattatgctacatgcctatggtttcagagctggtgagtgacatccaggctgtctgactcaaaagccttcattttcaatcacaataaaatggtctttctgcaggtaaaaagcagaggcattcaaaacataagagacaaatttgactatataaatatttaaggcattgatcctgaaaaaaacagtgttaaatgaaaagcgaaaagctaggaaaatatttgcaaagtacgggaattcttacacatcaataaaatatgaacacctaaatagacaaagtaaacaatcattatgaacaagacaatttatacaagaagaaatgcaaatggccaataaacatataagatgctcaatctcaatggcaatcaaaaaaaagaaaattaaaatgagatgtcatttttctcccatcagaatgataagaattaaaggtaggagcctagggttggcaagaacatggtgggaacagtatcaagccaacaatattggagcttgaggtaaaaggaaaaatcaataatattgattctacctttatttcaaatgttgatattttgttcatcatggacttttcttgcatgaattttgatttaaaaatattgtatcaaaatatttgttttgattactgaggtttgtttatagcacgttaaattttgtgtccaaggaaaagtgcctcactcgtgtcatattagtcccaactctgcatggacagtctgcaaatataaatcaaaatgtttaggtatgcttagccactactagcacagcaattctttttctaggaatttaacctaaaggaataactcatcaagcacacagagataaaagtacagagatgctcgttatggtatgactcgtaagaaaaagttgtaaactatcattaagagattggttaaagtatgatatatttgtacgctagaatactatacaggcattaaaaatgatgtcatagaggtgtgcatatttaaaggaaaagatatccgtgttgcattaaagagtacataaaaaagcaagaatatgtacaatrtgtacaataattccaattatgcaacacacacatgtaactccaaaaaaagtcttaaaaagtaataagtttttattggagtgacatgaaaaagtagcaaaatggaatgtcacacttcacacagtctctcatcrtggcagctattttattttctctcacaaaactcccttttgctaacataccctcttacaattttttgacatatttcaatttccccatggtagcacrtagtgcctcatatgcctgcatttaatctgcccccatgttttcaattctatagctctgcccatcacccaggaggactagtacctttaacacattagccttctttcctacaaggcaggtgtaacagacatttatttttcttaggggaactccttggcttatgagtctgcctccctctatagaagccagactctttttattccagcctccctttccacttgagcatagacatatgacctgggctcagtcaatcagctgcccctgcccaagacttgcaatcagaagctagtgactgaaagcagcaggtgccatgtagaatccagtctggttgtggtggtggcagctgatgccttcagttttcagaagcagcaattgcagggytcccggtggaggcaaccagtgcccagcatctgccgggtcagcagagcaggctcctgtactgcgttcagtggtggggctgttgtgtttcctccagaccagctctgcagtatgactgggacttctctggccatgcagcctccacgcctgggttgctgaccattccagagattctgtgagtgacttcacattctttaacaaatctctttcctgcttaaattaaatgtttgctttccattgttttcaactaagaatcctcactaatacatagttatttttggtactgccatatatatgtgtgtatgtgtgtagaaatctgatttcaacacccattatagcttactctcccaaagaaaaacaagtgtataggttaaatcaagttgatatgcttagggaagcttcattcatctagaactgtatagtcaaatacaatagctactaggcatgcatggctattcaaatttaaattaattaaaagtaaataaaatttaaattcagtttctcagcaactctagccatatttcaagtgttgaaaacccacatgtggctatgggtaccaaaccggacagtgagatttagaacattttcattattgcagaaagttccattggacaggacaatctagagggatcttgagatttcaccagcccacctcactgaaccatcacagagagtgaaaaaccactttgggttacatgcattgcactatctaaccatatcgcagaaattttgtgtcaacagagaagtaaccttgctaactagattagagtgtgttttacttctctatttaaattatwcttgttttcttgctctctgcctcccagcctcccattctctttctttccttgccaggactttgaattttttcaggttacttggccatatgctttaagtcttcttgtgatagtatctgccccaccaactttacaggattgctgtgagccaataatataatttgggagggaattttatattcatgattggtctgaaatgagccctgatattagatgattctatgattcaagccatctgactttgagcaaatcactcaactttcctggattcctgtttcctcaccagtcaattgaagaagttgaataagataatttctaagttccattaacaacattaaaaaattatcttattttatatagagccccaaatactttatttatgatctcttcagcagagctgaggagttctgatgcaggtggccaatgatgaggcaggtagagatgacaataatcaagaatgagtcttttttcaggatttgatgggcactagcccattttactagaggcaaaatgaatataaaaggcagaacagcaaagtgaaagcttatactacaacctctttctctcaaatcactcaatggtcatatttttcatgcaccgtagttaatgtttaaatgttcagaagaaattgcaaatacgtgaagtttttaatctctttctttttgagatgcccagcttcatgcttggcaatgcattccttgctacgggaacacagtctacctgaaaatgattccattgttgttctaactaactatatgttcttctaaaaaatgtaaacacatatttcagaggtaacccctttagatcagtgccaggtccatcccagagaaaacctcttgggcctccgcaaagggctttctattcaggaattcaaatacacaygagagtgtcaacctgtctctcttgagtctcctccactacagtttctattaccagattaaaatgttaagctgaagcttcttgagaagcaagggtattctaggtgagaatgtgttcaagtcttgcagattggatagcttagaatatctttttagaactttctatcaggaaaatggacagtccttattgttattagggaattgtgttatgataacaacattcattaagcatttctacgtgttaagcactttatatgcattatagcattcccattttacagatgtagaaacagggatgcagagtggtttggcaactgccttgccttacatctcatagttaatcaatggtgtgaagttgagaggatttgaagcttggagctgctgcaaccatcttgctcctacttccaggtggaaagtgatcacaacacacagaaggaagaagtaaaagaagcgagctgagaaaaatctcatcctgatgcagcaagtgagccctaaaatcagttgtgcctgaagccagctctatccctgcacactgaagctttgacgaatcagtcccaacccttttcacttaagctttgggtgttagttcttctttaatatgtactctcgagaattttacttgatctaaacttgttttatttaatgttaccagtgaaaatatacataaccttatccaagggataagttttaattcaggagtgtgcagaaaaatagttcaaattttttttattgtggttgaatttaaaaccacaccacccccattgtggctcccataagctggctggacatggaggtttgtatgtcacactcaccccctatttcctcattcaggaacctaagccctgaattgcactggagaaataatttactgtggcattttactgaaacatcctgtggatattttaggtatttgcacagagaactttttgacctttgaataatatatgtgctgagaaaggtcttgggatattttaacaacatgttaaactgagatagtcctgatgagatttattttggtctctgttggctgctacgttttttcaaatcctgttggaatttttagtttctatgaggacatttccaagatttttttactgcagcatatttcatgctatttaatggtccctttatcaaagatgacaggcaggcagttgataagctctccagagagtgactcctcataaagcctttcctccgttaatgtgctaggtacattgccaccgactcccatggccacctgagcctccagtagtcccctccaacttgatgtgtcctaaagtgggtgctgggtacttaaaatgaatacacaattttctaacatttaaaaccgctgattaattctctgaaaacataagtgcaggtgatcacaggcataaactggccagtatagccaaaggcatcatgaggattggatcgcttccacaggcagtggacattagatgattctatgattctagccatctgactttgagcaaatcactcaactttcctcgattcctgtttcctcaccagttgattgaggaagcaaatattaattagattaattaattgaagaaataaatatgatcagactttccccaacagccccttggtagaggaggccagaagtaattctgtcagtgcggtatgacagactgcagcttaaacagaggattaattgaaggtgcatgcatttaaaccacaaggtgcatattctcccagaatgcaggatggttcctaggctagggtttggtatctttgaaggacctgtttaaatttctgtgcaagtaggctgccaggaaatacattcctgccccggaggacactttgtctcctacagaaaggaactagcattgtggaaatttgtgggtgagaatgcaataggttgattctaaattatgttaactggattttcttccaaattaataaaagagcatggactggacctgattgctcattgctgagttcctagaaatgatcacttgtttgcatacaacaagcgtgtactaattatttcttgagtgaacaaatgtgctaaagtggtgagcaaatgtcttgaggagacagaagttaccttgcaaaggagacttttggaactgrgtgttcaagaatgagtaggggctctcttgatgaaaggaaagaggagtaataggagaaaaagaattgtagtcaaggaaacagaatgcacaagggaatggagacatggatttcaagcttctagtaattcatagcaggaatctataaggaaaatcttgcacaaagttatgaatgacaaaccttcacaataaaagtgcaaacaaaatcccaattcataaatgtcttgctgtgaatattggtcagaagctggactttcgccaaaacataagcattatactaggtcaattacctttgtgaggtgatgaaacatttctagaagttggcagggtcctccgtgctggttttataggctattgcataatgtcaacttattctagaatgttgcctgaggctgcatcactgggattcaaggattggtcaggaacatacattaaccgtctgtgtttgataaagtgggaaattcttctacaattggtctttggctgattgctgtgtttttgccagtagtgtacttctgacagtttggatttggcttaagaaatctaagacaatttttagaaatcaatgtgtcttagaaaccattaaacacatttatctccttttataagtttaggatatgaataagaagagtccttaaggaatgataatcacccttttctcaggccaatgggatgtgttgcaaaagagaatggggataatctccaaagatgttaggctgctgggcacaccagagcatattccctactcaagcaagggtggagatgtctgcaatctttctaaccaacaacatatcttgaatagcgctcatttgccagtggraaaaaaaaaaggataacataacatcccttatactaattaacaaaccatctggtgcatatttagataactattcctgaagtgctttcctttgctttccaaccggggactgtcaaatgctaaccaaccatcctgaagcatgaattgtgtgaatttcttattaggaaatgcagatgktaaactaattacacctggagtgtatattgacgttaacttatatacatgtatacatacagacacccactgtctatgctgaactactctgaagtaattacagaggagattgtgtcttaattcctgattttttcctaatggttccatctctacctctactgccagcaaataatggaatcaataaggctgcatgaattaaccaacttatactggacatgattttgctcttttctgtgtcaaatgatgcagttgtcaaacttcttatagtagtttagttctcaacaaattcattcgttatcctgttgatctcatcttcctactcttctgaaaatgaagaaaagtaaactgaagaaaaaaactagtcatggctccaataccctaacacaatcaccttttgaatccagtaaaaagaatggtgaactagaatgtttaaactggagtgaaattgtaaattaaaatatgcttttctttgtatagtctgattgcctgattatcttttacctcagtggacattaggggtgagttatgttacatctaatttattaccaatgctattattattaatagtagtatttcttgactataaacaataatttataatttataagtaaatagtattatttatgaaatgctgaacattgtgaaaaattttgtaatataaactggaatagaataagcatgttatactcctacacatgttctcaggtgaggaaatgttgaagttagccatggtgcaggttaatattcatatgtgtggcatgtgcatcaggggagaagagagggtaagatctgtgtcttgttttggcctgagatgcttatgtatgagatgacattggctttgattctgctccagccacagagctggatggggactgtggatggtgccacaaataacgtcctggccagatttcagccaggtctgcgatttgagaagctgggtactttcgtgccttcagcaggagccactttggcaggaaggacaatgagacaggaagaccccaacgagacctgtcttcctcaaagcaaattcaaattacctgcgtcattatgtgcagggctggaaattgtgcaaagaccaatgtacagatcaatggaagtgaaagacattgcacgtaagaatagcattccttccacgtgtacctagctctgtggtttccccaaagctctcaggtatattgcctcagaaggctgggaaggtagtgtgctgtgatgggaatagcaccagctttggagtcaaacagtctgaaagctcagctgtgtcttcactgtgtccctgcatgttcattatttataataacatatccatgacaaggttcctgtgatgattaatgaggtatctttgggggaaaatagcttttatttataattgattgctgtcacctaagaatgggtggatgacagtagttggaagactttttgtttgtttattagattgatgggtggtgggcacgcaaggttagactagttaggaaagagctaaattgtttccactcattcattcaacacatggatatttgggatatagatgaacaaggcagacaaagaccctgatgatacggtgattaccttctagttggggaaagacagataataaagaaatagtcaaatagaaaaaccatataatgcgggtaatgatgagtgctatggagaaaaagaaagtcaggggaggggttagagaatggctgaaatggaaagggtagcagggagaaggtctccctttcaagatgctcagagaagtcctctttctgaggtggtggagcaagttgtgcaaaattcagtgttgaagagtgttcctggcagaggttgctgaggtataaagaccctgcagtgggcatggggtgggtatgtgtgacaaattccccagggagatcaagggatcaggagtagaatgaggcatgcatggtaagaartgagttctgagaggtagacaggacccagataatattgagaggctcaagttaggggttcagattatattctataggggctgggaagccattgaaatgatttgaaaagaatgattccattaatgtatataagaaaagggcagggatttagaggcctagaaggaagaatgaggaaactagaatgggaaatagagtaatttagatgcatcctggaaaggggttgagggaaaaatatatcccttaccttatcttcccactggcttggtcaaagagggtcgttggggagaagagaagtgacaaaagaacatttgttagattgttcaaagtatggtgtataatgagagctcttgcctctatctctgctacagaatcttcaagaaatctcacactggttaacaatactttagggtgagtagatcctgaatggtgagtgggaggaagtgttgtgtctggcttaatggctaggcagagtgagaacagaggctggaacacacgtggaaataccctggtgtggtacaaagcagagactcaagaagtgtgcctttccccttccgtagtccttacttcgttttcaatctgtgtgtagggccatctccttgtttatggaatgacattcaaccagcctgagttcctttcaaggctgtcagtttataaccctatggcctatggcttttatctcccagacaagggaactctctctaaatgtaatttttccctcaattttaatcacagcatttaatgtaatcatttrggggaatcaatctgaaaatcatcagggattcttttttctttttactgctaccacgaatagtgattgtgcaacagagttggggaaagacttttgtttttgatgttgcaatagcaggaaatagaaagttgctgctgtcagccacttggtcagagttacatttcttttgcaccacaaaagaagwcttgtaggagactggaatatggttccaggtaacccaactatacattcaatgatgaatgcaccactgcaaaggagaggtgtggccattgttgagtaatttgatgaaagaacaactaaaacagattctagatgatttaaccttgacttaaagtaagcccgagggggagaccataattataactaacttccatttttcttggcagagtctacagtccattttgttttcatttcatttaaagtattcccactactggattatctccattttagatcaataatcctcttcctccctttgcagtggctttaaatgttttaagaatttgtagtcattttttttttaagctatcctgaggaatcaatctagactatcacttaggaacaagaaatgcatcataactggcatcttgcagctagtataaagagagtaaattacaaattaaatattgaaactaacattgaactgtgctgatagatagccaataggcacatttgtcaatttaaatttaaatgaattacaattaaataatattaaaattcagtcctttatttgtcacatttcaggtgctcaaaacagccacatgtgtctagtgtctaccacattgatgtaatagatatggaatattttcctctttgcagacaattcaattggacagcctgatttaggaattttaatagttggagtcaagagaagagtcctttagagtgtataaagaggcaggagagtctcatcaaacagattccatgacattttaatttcattaaacatgacttcttcagcaacggatccatgtgttagaaccaattagctatcccaaaggaagaaaagtgaagataactttcccacaatttccaatgtgttagtattgcccagattgtaggttactttgcaaaatggccaaaagcatttgcagcacacggaaagagggtccctctgccaaataatcacgaggaccttcccctccctggagaaatagattgaaacctcttcccctccctggagaaatagatccaagcctctccactgccatcttgtcaracatatttacattgctcaactgacttgggaagaaaacaaatttccagtatgagactctctggtgggccaagctgtttctcaaggagcattgagaaataatagcaactccaaatattaccttgggcaagacaaggcaaatgatatccttaactttgttatccaagcatagttgaaagagtgtcttcttccagttctctgtgtctttgactctggctagaccctcagggcctggctactgccttgcatactagattcatgggtattttcctgaagctcctttgtagctcaagctgggcctgctctccagcaactcaaactcaagtagagcttttggcccaccatcttttatgatctcctagcactgtagggaaggacacactgtgtatatatgcacattcgcacacttgggatacatgctctctgaggggctctgggaggtcatgtttcaaaggcttcctgcatctggggagtctgggttaaaggcagtttcatgggacaaactctcagctcaaatcttgtcctgcagggagctatgagccctgagtccagtaactttaatcttcaatgctatggaattgggtagaaaaagactaaatgaaatgcctgtaatcacacagcaagttaattatggaatcaaaaaatgattttttggctgaaatgtctgttgcatgattaagaagtttcctcttttcattttgcactgctctttataaaggagctttatgtgcccagaggaaaagggaagatggtgtagatactgattttcacttaatagagttcccttgggatgtttgttagttttgtcccaggcattaatggtaggtctgccttcatgcaccttttcatcatgctgataggaggaagagaaacaaaaaagaatccttctttccctgctgcttaagactgtaacttgggtttgccttctgtttgtgtgcaacaggcttgggaagacaggccatctctctcgttctcagatgttaaggactgggaccaaatgagaagaagaaagccaagtaggcgtttctcccatggtagttatctttagtctatgctgaggtcatgtcccagcataagaaagttgcctgcttatgggcttggggccaaattcacactgattcttgaagtctggaaaatcaccaaccattccagcatctaggatcagacttcttcacaggcacaacgacggttaaaatcccctgtgtttttgtcttgcgtttgtatatttatatgtggaaaataggtcccggggaactagtcttgtacaaaaaagtgaattactataaatacatataatttgtgaatatatgcatgtacgtataaacacacactataaaagttttctgtagcgacaatgaacatgagagaaattgatcatttacatttaaattgaataaattgatgatttattggaagacatgttccaagaatggtctaggtgttatgaaagggcttaatcttccaaaccgaaagtgaattcagaccaccactcagtcactattggccaaacaatagtctaagcaagattagttattctttctttagttttagtagaaggccttgacgtagagccatttttgcttcatgactgaaaatatttgactgccattttctttttttacttttatttttatatattttaaaatttaatttatttttaagtttttatgtatttagggggtacaagtgcagatttcttaaatgtatctatcgcgtagtggtgacatctgggcttttagtgtacccatcacgtgaatagtgaacactgtacctaataacaggtgattgtcaaccctcaccccaaccttccactctcccgccatcccaccttttgtagtctccagtgtttattattctggtctgtatttgactgccattttctgaagcctggagaaaagcatctcttcccatgattacagctaacatgtggtgtgaatatgcaacccaagagcaattgacaggaaatagatagccttaaggaactgaatcactaccactgtcgccgtctcttttgtatattagccttggccatgctaatctttaacatcattgggaactagaaagcatttgaaaattgattataaggacagcatagtgtaagatgattttatcgctagggaggcatcatctaggaaagtctttgccaggaagcgttctttctcattctaaatcctaggaggcacaggaggaaagctagggatgagtgctctggatcataaggcaccaaagggatcctggaaacgctatgattacagtggcttccagagatgtggtaggaaaaatgtgagcaccagtggtcagcatgaccaacttacaggtccagcaaactgggtggcctgagtggtcatcacgatgggaaagacatgacccatggatctatttgttctgtgacagcacagttaggactgtgcagtcatgggaggtgactaacaaactcactgactccatggccatgtggccaagggtgaggttcagcttgattgtacaaagtgtcactcactctgctgagtgtgtatttggaagaagaggcaagtgaaatgttagagacagcagcagccactgtaaatggaaatgaagcatgccaggagacctgccacagatgaaaagaagcaagccaggcacacaagaaagaaaggttgaaggaaaacaggacaagggctggaactagggctttgctaattttagctaggtgcatctactgacctcatagtaacagtaattgacagtccaacaagaacaataactagttagcacacagtcaattagttatttttcatcctacattgtttagcaaatatgtaagtagttcactcatagggttccaaggcttgtgctttcaaagaaccaaattaaagaactctgttcaaacattattactaatcttaaaatgggcagttgccatccagtttgaaggttttattccaactgtgttttctcaaaaccatcataacatttgggtgttggaaacaaaagacattaggtggatggacaccaacctgactagcatggctttgatgccttggcatggaaaatctttattgagtcttccagatggcaagaggcacagacaatcattatatatttggcctctaaactgaaagtgttcctggtaccaatattggaaaaaaaagaagtggtactcatttactgagcaccaactatatataatctattgcacttgctatgaatttctttatatactcttatgtttccctcacagtrtatctgggaggtagaattactattcctctattaaagataaggaaacagtggtgtaaagtttcaagtgagatcttcaacccactttctcacagttgcccccagakcctgccgctgagaacttacartttggagaaasgacagctgccaccaggggcttactgattggtgtgctctttttgaagaatgaacagaagtaaaagtcatacagttaggaaaagagaataaaactgtctttattcatagaataatgattgtttaggtaggaaattaagaaatctacaaaaagttactagaacyaataagtgaatttagcaaggtctcaggataaaagatcaatataaaaacgtctatttctatacactagcaatggatgattgaaaaatgacatttaaaaacatttcacttacagaattcctggaaagcattaggatctgaatcatttatcattacggtagtcttctatccagaagaaaaagggagtcarcagagaagagttgctaggaaagtcaaatgtctacattttacttccaaagagttgagaatcctcagactctttacaccatgcccagagatactaaataatttgcccaaatccacacaactagtaagcccaaaaactgggatttgaattttggcatctttgattaaaaaaatstctagttttttccacagcgcccctgcaattaattaaagtgtttccctgtgtactgcaaatgtaccttatctrctctttattccaagagcccaaaggttcaaaaattgtttccgaactctcagaatttccatttggctcttggttggcattcaaagtccaatagtataataatgctgtctcatatttgaacaatatagtttattaaactttcccatgtattacctcatttggttctcacaataacttgtggataagaaatggttaaaattatctcaattttatagctgatgcrtagctagacccagatgaaaatctactttgaaaacatcaactcagaaagagcaccagactttgctgacatagacagggttttgttaattcaagtagttcattgacttagacaacatctaagcattgaaatttatttaagaaagtacaggttgttatattcatttacttaaaccagtactctaaggaagatggggaaacggaagtgtggcctcatgttttagagaatgccatcaattgtaaaaagaaataggaaactcatttttaatatgcctatttaaaaaaaatagatgtcatgactgaaggctttactcatccaaagctgaactattccttggtatataggtgtatagatcactgattcaaaacattcaagagttagaaagggatcttagaggtctcctagttgaacctgctctttcctagttgagggaacagaagctccaggattttcaatgattatttctggtcacaccactaattagtggcagaattggtcttggaatccaattagagccagactccaggccagttctatgatacaccccaagctcaggaatttcttcctcctctttttaatttctatgagacastttcaataataactttgaggtctctagttctgagtggccatgattttgtaatgcaagtgatgctagctcagaaactccatgcctggccctctctagacacccaagggaagggctgcagaacgtgggcaactcccagggcttttgaggccctggagcttcccacccggaacacaaaatacactgtcatgtgtcatcttgctttgtgacttctcatcttaaggtcttgtcaaagctggccacgtaggcctttgaaaatatcatagagttctttgaagtaggttgtttacttttcttgaaacacatctgtgattcatcttatttgcattttaaaatgtaagtgttttggccagcaatttgagggagaagtccaatagaaaatcagtataccagtccaatttgacagctttcatctaatctatcatcactttctattcatttgttcactcattcattcagcaactacctaatgggtatttactacatgccaggtactgttctagctgcttgggaaacagcagtgagcaaagcaaggtcaggaaggtttcattccagggaaaagggacagataataaacaaaggtataaattttttatgtgtcagatgttgatgagtactatagcaaataagtagggtgagtgaggatagggagtgtggtgtggatggtgctgattgggatggttaaaaaggcttctttgctaaggtgacattttgtgtagagacctgatggaagggaagaaacaagccatgtagccatttggggtaacaatttccagacagaggcaacaacaaggactggctcctgaggctaggagactgctcggtatgtccaagaaacagctaaaaaataccaagtggagtgagtgaggtctggaatggtagaagaygaggtctggggaggttgcagggaccaggttttatagggctttatagaataatataaggacttttgccttttctttttagayggagtctcactgtgttgtcaggctggagtgcagtggtgcgatcttggctcactgcaacctccgcctgccgggttcaagcgattctcctgcctcagcctcctgagtagctgggactacaggcgtgtgccaccacacccagctaattttggtatttttggtagagacggggtttcactgtgttggccaggatggtctcaatctcttgacctcgtgatctgcccacctcggcctcccaaagcgctgggattacaggtgtgagccactgcacccggtcagacttttgcttttttaaaaaactagattttttaaattgaggtatgatttacatccaaggaaatgcacagatctcaaatttgttttgaaggtatctggcaattttatactctgcaactatcatgcaaacctagacatagaggattttcatcacctcagaaagtttatttgtgatgctttctagtcaattctccacctgctcccagcccagaggtaaccagtgttctgatttctatcactattctggaactttgtaaaaatgaaattatgcatgcttttgagtctgggtttctttcactcaatggaatgttttagagattcacctgtgttgttgcaaatatccatcgttcattgctgggtagtactccattgtgtaattatatcaccacaagtttattcattttcctgttgatgggtaattagattgtttcttggttttggctattttcaataaagctgccgtgaatattcttgaacaggtcttattgtgcatatacgtttgcatttctcttgggtacatacctaggattgaaactgctgggtcatagggcgacagatgttttaactttatatgaaactgctgaacagttttcccaagcgatggaacaattttatgctcccaccagcaaagtgtaagagcttccattgttccacatgttcactgacatttggttatgtctggtgggtttgtttgtttttgttctaatcattctggacagtgttctgtgtaagaaatatctgtctactccaagatcgtgaaaggattttctcgtagaaacattataggtcttagcatttaggttttagctctaagatccatcttaaattaatttttgtgaatgctgtaaggtggaggaaagaagcagatatccaattccacattatttgtgaaaaacactgtattttcccattgaattgtctcagcagaaggagtttgcttttattccaagtgagaagaaagttgctggggtgtcttaaattttcctcaaggcaataatagttgtcttgcataatagtggtctactttgcatattagatgtytattgcacttttaatacacatgtgcatgcacattgcacacactttgagaacaggaactacatcttgcttttatttttatcctcaacttcagtacctagagcagtgcttggcaaaccataatcaatgaaagaatgaatgaatgaattccagcaaatgacataactttttattttcctgtgtagcctgtggatgtactcatttgtctgtgatgtactcacatgtatgtactcacatgtacaaatgagtacatgtgatgtattcacacacacacacacacacacacacacacacacacacacacacacactctcacagccacttgagtcgactgaagagatcagagaagaaaagaagtgaggcagcatttactacaacctaaaagccaagcctcagaagaagtgagagcctggaactatgagccttatgtatgagcagctcttgtacaaaagagaagtgagataaaatgggtcaggagtctaaaagatggcaatcccagtttacctttgcttttatcctactttgatcaaataatgagtacatgtgatgttctctttgtcaaatgtactcatttgtctgtgttctatatggctcccacacatactatgaccatttccacttgaggttgttagtctcagatttatgggtcattgataatgtacatgcaggattatatatttcttatatataccacataaacctatgctggccccttacatggttaacttagctgctatttttgttttcacttctacatgccatatttggggtagagaagattaaaaagcatatgtggacaacacagaaatggcatctggaaagcagccgtgttgcagcactctcaacttcccttgaaaatttccagaaaggctcagaaacaagaaaaaaatctcaccacagccacaaaaagcatgcttgtcagacagcctgttgccaagacccaggagccacctccctgagggaagcagagatagaaggagtggagaaaggcttttatgcctcccctggagttttccatttacagagccccttggtctattccagccagaaagctgagtccccctcccatttttcaaggagctgattccttttaaggcaggcaaaaagctgcttcccattcacccttccttctttctctattcacccaacctccacaactccccaaatccagtaggatraaaaaagggagggatctttttccctcccttgaagcatgtgtaaagcttaactgcatmctgggaagtgtagttccagcacttaggtggatccaagaagtaagatttatggcagaagtattctacatgctgggattgtagctttycatgcacagggtgttgagtcagcrtctcaaagaatcagacaatgacggttaggagcaataccccacccgtgcagagctgcattagaatttagagttaggttagaagctgcgcaaacacctgttctgcagctgcaggtgtgagatcatcatacaaatggagggccggcattgatgaagccaaccccataccatgtatgactgctgcctcaaagtctcaagaaagctcaccttatttaaatatttatattgaagaagtaagttataggaaagactacttggaatcagtgaaaaaattgttgaagaccccaggatgtctatttcaggaaccaggagaaagtttcaaaaattttcaaaatatcttttgaaatgtaagccttccttaggcaggcaacactttctaccttgcattatggttgtttgtgtgcaaygtcttaatacacataggcatatacatacatctgcctgcacactttgrtaacaggagacatgtctttcttttatttacattcctaacatcagagcccagcacactgcttggaatgtcataggaactcagtgaatgaataaagaatgaattccagcaaatgacaaaatttgctctttttttcttattgagtatgtggatgttctcatttatctatgttctatttggcctttaagaaaacagaaatggaaaaccacaaggtcataggcatgggagtgggagtgaggtgaaaatgaaaatgtgaaatggataaaatctgactgaaagttaacaactcaagagcagaattaaaattcgtattagagtcaacaaataactgaactaaaccagagaagaactgaataatgattggagaggataaactggaaatctctctcagaatgcagagaaaagggaaaaagctatccatgtgataggagagatattgttagatgtggagggcagagaatggagttccaacctcaaaattataggtattttgagttagtaagaataactgaaacagaaataattataaagactttgaagaaacaattttctgtactaaaacaaagaatatggttgtcatactccaggcaaaatgaataacaatttttttatgacaaagagaaagaaaaatatcttgcagatctcagctgatatcatctagctgcatggcgtgggcaattttcggagcctaattttcttcatctttaaakgggaaagtttccagagagtcactagatccctgctagacgtgactattttatgatttcataaatgtttggaggactagagggtctaagacagcaattgactattttaacatctcatttgagatagaacaagcaaagaacaattgcaagtcctcccaaacaaggctttattgccccttaatataatttgctccagtgcattaactgggattccaggaatgttctaagcaccccagatgttctcatagtaacatcaggacctcacagcctctggcaacactacctgtttttgacttcatgtggagcagaaacctcctgatcacaatgatgtctgtcaaatccagcattaagattttgaacactaggaccctccaacctcccagcagattttggcacacttcttgctctctcctctcttccggaagactctaggactaaggcatcttctccatgagctccctctaagtccatgcatgccctcagtcccaataatttttggcttccagagctccttcttctcagcccaggcaccaagcaacttttcagcatttattcagcatttaaatcaacctcaacagtgaacacagccttcctttttgctcattttcagagcccagcgatttcatagaatggcagggcatcaggtccagatcatttagaccactgccatgaccagcgataggtatggactccacttaaaaataaggctcgtagccgggcatggtggcacaagtctgtcatcctagctactcaggaggctgaggcaggagaattgcttgaacctaggaggcagaggttgtagtcagctgaggtcgtgccactgcactccagcctgggcatcaaagtgagactctgtctcaaaaataaaaaaaaataaaaataaggctcatagttccaggctctcatttcttctgaggcttggcttctaggttggagtgaatgctgcctcacttcttttcttctctgatctcttaagtcgactctagtggctgtcagtgtgtgtgtgtgtgtgtgtgtgtgtgtaggaataggcatgaatttaccagccagaatatacacacacaccctttcctgtcttgtcgtgtcctgttttaggttattcaaaatgttattcagtggccacatttacagcaataataaaaataggcagaagtcatcaacactatgaatagtaaacacatttagaaaaaggtggcagacaataacgacgtctgggaagtgtttcagtggagtctttcctcacatgagcacgcagtggtgtggctgccagaactccctggcttctgtacttgatttacgcaatggtctgggttgccctagttgtaaccatgcagcttggctctgggcttcataaattcagaccccagaatacagtttatttatgttatgactccatccaaaacgttgcaaagaagccaactcccttcatcccattaaaaaggtataatatgtatttttactagcctgcagagcttggcattcagaggtaacaatatgtgctttgttactctgcaggtttgccgtgaagtgtgctgtaatctttgccaggggtgtgctgctctctcccargagggttcacagcccgggaggaacacttcagactgcttaacgacttgctcgggccttgccttatatggaatttttccttctgcacaagagaatgacaaccacttagagtgacagccagcagggaacagatgacagccaaaaatccactgtgctcttggtcccaggatgtcctatctgacttgaacttttgctgtttaggcttgctctctgataatgaatttgggaatgccaacaggtttggaggaataggagtcacttagaaaagctagccagataactccattttagaaagcatgggggaatgtctttcccattaatcctggtaagttagttaacaagcacagggcacaataggtccccaaataaatggaagaaatggtgcaaaatgcaagctacaaagtaggtgtttgatcatacacattcatattttattatttaatttgattcaatcttarggtcagagctaacagaaataaatatatttattattattattgatcaataattattagaaccataaagaagtgtcctcacactcagagtctagtgtgctagcccagtagagagacaccaatgatatccccaggaggtggaagggaggttggtgtggatctggttcaggcactgctgtaaatgctttagatctactgtctcagtgaatcatcaccacaaccctatgagatagtcctattttatcttcattttgcagatgaggaaactaaggcacagggagactaagaaacttgcccaaagtcacacagctaggtgtggctagatgtggcttctagttggcagcagcctagagttcaaatacaggcagtcttgctctatgaagattttaacaggcacaggtggaagagggcagtgcgtgtggcagagatgtcagcaagaacatgagaaaggcatggagtagagaacagggacatgtccagttggattggagtatgggtaagagggttggaggaaaattacaccataaacacaagctactgccatattgtggagggccatgaatgctgatgtgaatatactgtaataaatattgctaataataaaagccaatatttctatggttttatattgtgtataatatctgtaatagcctagctttgtttttacaggtgcccaaaaaggccaccagcagatggattcactaggctcatttctctttgcccttgtctttcaagtggtttatgtcaggctagcccccaggccaccacgctgattttcagttaaaaagtcactggtattgaggttttttaaaattataaatgccttcttaaacagatgttttactytagaaatgtttgttaaaatatattctattcaatttctagtaatggttagcaaatttgccttgacgttcttggggttcctgtcttggcattcatgcagaatttgatataaaattatatatactcataagaagaaccaaagaaccaaatagttcttcttgccagtcacttggagattacaaaacagcatttctgagtagaaggcataatcaaatatgatttcatgaactgatgcatatatgagttagaggccaagaaatattgaatcatgaagtaargttcttctcatttctaaaatactgtaactccataatttttttcttttttttttgagacagagtctcactctgtcacccaggttggagtacagtggcatgatctcggctcactgcaacctccacatcccagactcaatggattctcccacctcagcctcccaagtagctgggaatacaggtgctcaccaccaggcctggctaattttttgtatttttggtagagacagggttttggcatgttgcccaggctggtcttgaactcctgagctgaagcgatctgcctgcctcagcctcccaaagtgctgggattacaggcatgagccactgagcccagctggctatatgtccataattttaaagattacaaatgactctatcaaaagttattctgttgacagtttcaacacaatatttaccagttgaaactgatttttatgctcttggaagctggtggccaccttcttatatgtatgtttggtttattctaggatacttagttgattaaccacttggaatgaagtagagttgtgttttcttttttttctttttttaactgtagcagagtgaccaagcatgcaaaggagggagagagaatatgatccatggcaaatgcaaataccccctatactctttccatctggacttggtgaattgggctgcccttctgcagttgagggtacatgaacagcccagtttctcattcccaaaaggacactagggtttgcagggaatgacgcactacaggggttcccaagacagctggggcatcggccttaaacatgaggcgataggagcagctcttgtacagaagaggagtgagataacatgggtcaggagtctaaaagatggcgatcccagtttacctttgcttttattctactttgatcaaataatgtgtgatgctaacatcattgtattggaaatagaatcatgatgcttcctaagttaaatggcagattgcatgtactgtcatgtgtcctatctgtcatgatgctgacagttacacaattttgctctggaaactgggaattacactttgattttggggtagagggtgttatattggcttgctaggctgccataacaaagtaccagagactgggtggcttaaacaacagaaacttttttgctcacaattctggagtctggaaggccaaaatcaaagtgttggcaggattagtttcttctgaggcctctctctttggcttatggatggccatcttctccctgtgtcttcacctggtcctccctctgtgcaaggttatgtcttaatttcctattcttataaagactccagccatattggattaaggcccactctgatgatctcattgtgacttaattgcctctttaaagaccttatctccaaatacagtcacattctgagatactggggataaggacatcaacagatgaattttgggaggacacaattcagcccatatcagatgtgctctcccttagggggttctaagacaactggggcatcagccttaaacatgaggcgatagragcggctcttgtatttctgtctttagtcccttggtctgcccgttagtccttctagaaggagtccacttgacagatcatgatgcccttcagaagtacccaggtctctcacagtatctagcagggcctccccaggctactccaacagactattgaaattagtcacgcgccccaccatattagaaccactttcctgggcctaggcaagtccctagtgctggggaataatcactggactagtgatcaagagatctcgttcttgtctagattgctgctggcttgctcttgggcaagtctttttctcatctggggctgattttcttacctaagaaatgttgagctttatgatttctgaggttggctatatgtgaattgccctagtaagtgcaaatgtgttttcataggttagaaaaaaaaaaaaagcccaaaaagtattttctgggaattgagagttgtaagcacctacaattctagaatatactttattataaaagttaaaatgttatgcaatcctatagaaaaattcaggaccattttgctgttgtctaaaatcagatgtgtgatctccatcttcttaatttgacagacatttgccacaagtcacttccacaccaggcagagtgctgagcactgtgagaaggatgtgggaattcagaggctaataagttctagtcccctgctcccaaggagttcgttgtcaacctgttttcatcactggatgtttagaagccttggataatatcaaaggtatctatgttggagaccatgggcttcaatttctggctgtcttttgrcatttagaacctaaacagctctgggctggtagacatcactgacatgactttattgttcccatgagtgaacatctgcatgagatcaaaagtagtgatttcagtgtcaccaatattgaaaaatacagaaattgaaattgtaggtaaacccctggatggttatagttmaggacagaaagacaaggagtgaaagaaactccgtgaaacaggaaatgccaagaaaagcctatagcttccctgacttgagacaaagrctgttgactagaatctcttgattcttagtccagtgattattttctagcaatagggacttgctcaagcacaggaaattagttccaatatggtgggggcacatggccaatttcaatagcctgttggaatagcctggagatgccctgttgcatactggcatgtttgattccttattgaaaamagataaaatatatacaattgcaaaattcatataattctgcaaaagtaatataatgtaaaggaaaaagaggaaaaaaagttctgctaccatgttaaaaaaatcatgcaatgctaagtatgatacctgaattagaatggtcaagggtggccaaccagtggagacaaaactcatttccttctcatcctcagagctctgccctaggactgtgtgtgtgtgtgtgtgtgtgtgtgtgtgtgtgtatgtgtgtgtgtctgtgtgtataccaggatgttagcctgtatgaaatttctgggctagatgaaagagaggggttgggattgaggcaagttctggaaaataatttgtttttttctaaaggtcatgatagctacttggatctagccaattgttaccatgaagaaatttttaaaatgttggcaatcaacttaagacattcttttgtaagatatagtatggtccaaacaaaaccatgccttggtcactaatttgcaatttctgttctacagcatcttccagatctttatggttacattaatgatctgaggcaaaaagtgcaattcaagacaggtttctttcccaatgaagaaatacaagataggacccaatacaggcagagacccttgcattccaccctcacccctgcttctggcttcctaagcaaactgtacaatctacttaagtgcgatgtccatgtgagtctttcaaaatatacctgaatccagccaggcaaccctagattttcagttctgttttgtttgctttcaaatgattttcattcagtattccactcagaaaatgtctaaactgagtggggaactgcggttgagttgggcatatacaaggatatcctcagtttgaatcttccctaaatatccataagggaaaaaaccccactttaataataaattattcaaatgtgcattcgttcttgaaacattttaaggatgtttacattgaaaccagatgcctgctccacagacagcccccgtttctgttgattttacagctctcctgctcacttcagttttctcagtagggtctttgttttactcactagtaaaaagaatgtttcttttgtttgcttttctttgccatccgcgctgaccagactctagagggaactccagccatgctgtgatttggctagcatccccttcatttcactcctaaaagtcatatgtacacataatagtaaatcgtttctgagacctcatgcgcttgggcttttcctagctcgttcttcttccatgtggttggagttttgcagcagtttgagtaacagttcaatcatgctctcaattaaagaagttgagtcagttcatgatacccatctcatagagcaagatgaagctaggatttctagggaatttctggccgttcaaaaatgtcatctgaacccaaagcttttatttctaagctgagctgaatccatcaccgagtaaagagcaggagggaraactcatttgttcaaatgcctgcaggtattggcctgagggaatatggggagaatagctattcccaaggataccctttttctttcttagtggttggccattcaaagtgtagcaagaaccagaaaggtgagctatctaagtctaagaaaaagtaaaagtcataaagataactaagcaaagcttttctactcacactctatttggcctgattggtcctttcatgtattcatttgtttattcaaaaaacatttattgagcacctactatgtattgctaggtctgtgctaggtrctgtagtgcatatctcttggtggaggtggcagaagagtccagaaaattttagtgcggtaacttatatggcgagaaacacataggataatgggacactggagaaaggcattcaatgaagaccagttagagtgaaggtagaatgcaagaagacttctgggaggacgtggagcctgaagtgaccatgagtaggaattagcaagccacagcttttcaaactttcacatgcacaggaatctcctgggaatcttgctatactggtgattttgactcaggtctgggatgggtcctgagagtctgcatttctaaggagctcccatgtgaggccaatgctactttgggtaggaaggagmtaaatgatgacttgacatgggaaaagagaaagagggattgaagaaaacatttcaggtagagggaatggtgtgtcaaaaagcctagaggtgtaggagcatgtggaatgtttggtaagttgcaaataactcagaatgggagaagcccaaggggatgagggggaatgatgaccttgaatctggaagcagccatcatattatgaaggaccttgaaggtggtgctaaggatttggggctatttcctaagaacaagaggaaaacactgaagagttttatataaaggaatgataagaaccacttcattttgaaaggattactctgattgcgatgcaacagatggactggggaaaatgccacctagaggcaagagaccagtagccgggcaatcttgttcatccagttgagaaaagatgaggtcctgaacataaagagtagcagtgagtagagagaaaaagcaactggctttggaatattacagaggttaaatgatgaggagtactagctggtcaagaagaggagaggcaagttcaagaactgcctgttttctggctttagatgaagttcactccatttcaatcctggtcatagtgtcccgcttcctcaagataatgattggtgaaccaagatgccacttggagtttccaagagaaaataccagagccaggatttgtacccatgacttcttgattcaaagcccatgttcattttaccatactccattgcttctcagtggctttcttaaagccagagaggagaaattcggaagttcccacccaagttgagtcttagagattttactactgagcgctgaagcacaggggagggatcaaggctttagggaatcagagtggctggggtacttagtggttgtttccaaaaccgttccagttctgctctaataatgggggacggggaaaaagagggtgcctccttcctcagtttgccatcttctttttccagcttccaaaarcatactcgaggaaagccattggaaacctgtcaagctgttccctagtactgaaagacagtttgtgacaaaacaggcttttctgcgcccttgggctttctgtgastttctcaagatgtttgcagttgatgatctgcatgcaagcaagccacgttgacagtttctgacctgtttccagcacctttgcaagtgtgtgtggaagmactgttcagattcattttggatgcttttccrtatatcatggggaatttgatctatatatctcagagtcacttaaagttaactcatcgaggcagttagagattgtgcctatcgtttactaaattataaaaaggattaactaagactaaaagccatccaagcattggagttcttcacttctttaaagtaattgaattcagctcttaactttttaaaaatcaaggatactacatttttcggatttcaaaaatgatacaagtttattgtagaaagtttgaaaaaaatacagaaaagactaaagaagagaaaagagtaattataatttcactgccccggtataactactgtcaacaccttggcatatgacctttccatcttttaaataaatctgcatatacacaacttttcagtgattgttactgtactctgcacattgcttcctcgcttactgtacattaaaagttttcccttgatttttcctttattagattttattggagtgccaaatacaaaacatgtggcatgaaagataaaacagaaaaagtaccctctaaggtatccaaggtagcttggactcttatttgtaaaatcaagaccagttaagctacttctctaagatcacattagttaggaamtgagcaggactacaaagtagaacttatattaagtccattgttttggttactgtgaatcctataacagaatccaaaagctgagaactagaagtaattttagaaattatcaaattcaacttcttcattctctcttttttgtcttrttatggtaagaacacttaatgggagatctgccctcttcacagattaagcgtagtatacagtgttgttaattatagtcacagtgttctatggcagatctctagaacttatttatcttgcattttgtcattgacttcctccttcccatctgtcttagtcagtttgggctgctacaacaaattgctatagactgagatttctgagacaacagaaattcatttctcacagttgtggaggctgggaagtcctagatcagggtgccagcttggtgagggttctcttcctagttggcagatggccttctggctgcattctcacataactgagaggagaagcaagctctcttgtgtctcttcttatatgggcactaatctcatcatgagggctccaccctcacaacccaattactcccygaaggcctcaactccaaataccattacattagggattagggtttccacatacgaatgttggggaacacaacattcaggccatagcacsatcctaataaatggcaccactatccaaccagttgcacagactccaaacctagtcatcattgctgcctctagttcctcttgccctatagcctgtgtataagcaagttctgctgactctcctgccaacaccaagggctccttagaacctccacctctgccacccgagtctaagccaccatcacctcttagctgcacaaattcattggccttctacctggtttccctgcttcctctctcactcacccatccccactcccacatacgtagcagccacaagtatttttaaaatgtaaaccagaaaatgccacttccctgctcacactcctccaacagcttctcattcaactgaaatccaaattccttatcctgaccaacaaggctctttataactggtcctgccagttcctctttcctcacctcccaccactccccctccattcatgttgttccagccacagtggccttcagactctttctgtaatgtgtccagctggttaccatcctagactattggtctcattgttccctctgcctgaaacctcttctccctcatctttgcatggcgcacaccttgtcatttgagtataggaacatatttcctgacaactctattgaaaacagcccacagccaggtgtggtcgctggtacttgtaaggtgggaagatcatttgaacccagaaatttcaggctgcagtgagctatgatcatgccactgcactccagcctgagcaacagagtgaaaccttgtctctcaaaacaaaaaatagaaaagcaaaataaaatagtccccagcccccacctccacccccttagtatccctttacactgcttaacttttccataatgccctcatgactatgtaacattaaatatttatttatttatttattatatgtgaggagagcctygctagaatgtaaacctgatgaagacttcaaaacccctggaacagtgcttttgcacagagtaatcatcatcaatacatacttggtgaaaaactgtaaaaatggcagcacaatcttttatcacagagatgtaccatgataagcatgcagattcattttgatttttcatcactgcacatgatggtttgatgagcttccttatacataaacccttgttcccatctctagttatgttcattactgatattccaaggggcagaatcacctaaatcaatgggtatatatagttataacacttttgattcacatcaccaaatggttcaccagaagacttgcaccatttatatacatrcagataccaacagtatgtaagtctgttcctcaaaccttcactaatgctgagtgtgattgcttttgaaatcctgcccactttgatagtcaaaataacagcgtcacattttgtgtttctttggatatctgtgaaatgaacatttctctcgtgtctgtttgccataggtatttatttgtatgtgaatgtgtgattggacccatgttctactattaatcttcatcttttttcttattgattcataagggctgaactgttgatctgttacatacagatgttgtggatatgttttcctattttgttgtttgccttttgattttgattgtggtgctatcttttatagacatgttcattggcttttggccaattttatcagtttgttcttttaggatatgtcctgttccttttacacccaaaagtcacttttcaccctgaaattaggtgtttactttttatgcttarctctctaatccatgtggagtttatctgagtgccagttgtgggatatggattcaaactgtagttaatttctccccagaagttaaccagatactctatgcactttactggatatcccattatttcaccaccagttggaatttcaagatttatcatatactgattgctttgaatcacttgagattgttttatgcatggttagcttttagtaattctgaccatctttaattttttttgatgagtacatatttatagggcacatgtgatattttgagtacatgtatagaaaacctaatgatcaaatctgggtatttaagaagtctatcacctcaagcatttatagtttctatgttttgggaacatttcaagtcctctttctagctattttgaaatatacaatacattgctgttaaccataagtgacctattctgctattgaacataacgtgttctatctatctgtatgtttgcgcctattcgccaaccactctttatccccacctaccctcatacacacccttcccagcttctagtaacyatcattctaatctctacctccatgagattaacttttttagctcccacgtatgagtgagaaaatgcaagatatgcctttctgtgcctggataattttacttaacataataacctccagttccatcacrttgcttcaagagaacatttagtggcaaagaatactttgtaagaatcccatactgtatctccttctttcataccaatgcgtggtttaatatataataaccttgtttgaaataaaagsctttgatgcctggtgcccttaccacttatgaagtaaccatcrgtttccaccactaaaagtctcctatggtcacaaagtcctttgtgaaaaaatccaaaggcaaagagagaggcaggtcygccccatacagaagttcaagctgtgcattgcacaactccaaggagtgtctatcacatagcaagttatataaatggtgccccagagtttgatagtccrcaatatgtacagttgtgtgcattgatcatgaagagagaatccatgttcacttcccaattcagccctcaagaaaaccaacacgaggtcttcgasagcttactagatcttagagatcaacttcatcatttacagcaaaacatgccaaggttcaccaaaaakgtataggcttgtctatggtcataagacttagtgatagaaaagggatagatcccagatttctctttttttcattgatttatctatgtaactttttatgtatttcattgatttatctatttcattttttgtttactttcaagaaggtaatatattctcatggcccaaaattcaaaatgtatatccacaaaaacagctttacccatcctaaccccctcccaaccccactgagagttcccataaacaaaccctaataccagttggtggcatatctttccagggatagtccaagtatatacaagcaaatacagccatacattctccaatcactcccctttttaacctaaatactaacatactgcacactattctgcattttgactttttgatttataatatatcttcatgcttgctccccatcagtgcatgaagagtttttccatcctgtcttaaagagaagttgtgtactattgtatgatatacaacaactcttttaaccctatggatggacattcatttgctattagaaatagtacgacagtgaataatgttgttctcatatcattttgagcatgggtcatctgtaggataaaatttgtggaagtgggattgctgggtcaaagtacatttgtaattttaatagacattgccaaatggttctctataaaggttgttccgttattagctgattttcttatatcatcattaacactgctagcaaacttggtacattttgccagcccaatgcatacaagagagtgcagtttgkgtgtgtgtgtgtgtgtcaatgtaaagacaaatatttctttaaataataatgtatttgtattwttttttgcagtggaattggaaattttctcacagtcctatccagatgtgcaaagaagtggtagtttatttctataagtgacctaatcatccactgtgtacatttgctgtttaatgaaatctcagcttctcccagctttaacatgtattctcatttaaagatttagaaagataaagtaaaagggtggggatcagattctgcccttcctctattctttcctacaatttgagtctcatgttggctcttttsttcatttgtttttaattgactcatgatagttgtacctatttgtggggtataatgtgagatagtgcagctttcatttgcctttctcttattatgagtatgtttaagcatcttttcttgtgtttcaagctatttgtattttctattctgtgagctatttcgttcctttgctcattttcttaaaaaactgagctattggtctttttgcttactaattaatagaaagagaagtaactttttcactagttatattgaaatagaacatcttttcatagtttgagagccagtgtattttctctcctgacctgtctgttggtatagttttcccttctcttcttttggggtgtgaatctttttgttcttgatgtatggagtcatttatgcattatagaacccagatttttggaacccyattcccagcctcttacacttagatgtgmtgtatcctcatttcttcattgcacatttcttcatttcatagaatggtagaawgttttgtaagtgtacatgtaaaaattaatcaattccagaatcaccacaaactcagaaaacatggcatcaaaacggtgattctttaaggtgcaagatagtgtgaatcatttagtctccagcaaatgcatccatcataatataagaccttttagaattrgaaaaataatcaaacctgtaacaaattttgcaagcaatttataaacaggtgctagaatctaagatattggtgacagtagagaagcaaacaaacaacaacaacaacagcaacaacaacaaaaaccaaccagtgattaattgtaatcttttaggcccattttaaatgcgtcctcctccatgaaatatttcttggttyctctggacggatgttgtttctcttgcctctgaattcccagagaactttgtacctctcttagggaaattatcaatctctgtcttttattatagttagttatgtacatgagtatttccaggagcactgccaatttcctatactgatcatagatttttcctaatgaaaggctcaaaggtcccaaggcaaagtattcttttttgaagtaaggttattgtggtgtaatttatatatggcaaaattcactcttttcaaatgtacagttcaacgtgttttgacaaatgtatacatgcatataattacctccaaartgaagatacagaacatttccgtcaccacagtgttctcttggtacttctgttgtcaagccaccctcttcaccctcagcccctattgatcactgattcgatttttgcccctatagttttgcctattccagaatgttgtatgaaaagaatcatgcatcctgtagcattttgtgtctatttttactctaaaccgcagtactttaaaattaaacacgggaaataatttactcattgctttgtggaatttaggttaagcagacttgctcaccaaaatcatgccagtagttaggcagtggtcaaaaggaaggaacaaagaggaaaagggagggagaacagaaattgagaaaaacacagaaggaaagtttaatgtttattataatattctttattgtttagaaattattttctatagagcacgtccaacgtctccagcattttgtgtcatcttcacgataactttacaaactgttattattcccattctgcagatgaggacgctgaggttcaagttatttgactgacttgtccccaaacagaaccatagaaaaatgaaaaatcagcattgaataaactctgatttgaaggacattgttttgtggactccttcaggcttcctcttccccaaattctagtaagagagagttaacgagaagagctgtcagctctggaaggaagagcttctcgctttcactcaccattgtaaacccagaaactagcactgtgttagcccactgtataagaggtgttcattaaatattgttaaatgaactcacgaaacaagtrtctgtccttcagatccttagagtacaaatgcactcaattttcctccccaagagctccctgggagtttttttcaactgttgcattttttttctcattttttaaagtttccttttttactcaaagtaaaacacaaatgatttctcaattcctgtaactttgtgtcagggcacattatcccaacacatgcattgaaggcgtgtgactgagtaccaccttttggattgtctgtcatttgaataaagaatatggtttatgttcattaaggaccactccagaggtaaccttcagctaatcatttcttatgttcttcatctagaccagtggagtaatgatcaaacataaagtgatctatttgaatgaaaaacaggctatacataaaatggttttaaaatgaaaagaaaatctaatcttatggcattttaagatgctgacaaaccaacagggtatgtggaaaattccatccaaaataatattattgctttcctaaaaccaacctgaatgtttgaaggcagatgaataggtcaggaattataacagtatctattacttygtggattgttgtaatgtctgaaacaaggatagaatttttttttcaattttactttaagtttcgggatacatgtgcagaatgtgcaggtttgttacacaggtgtacatgtgccatggtggtttgctgcaccaatcaacctatcatctaggttttaagccctgcatacattaggtatttgtcctaatactctccctccccttgtcccccacccccaacaggccctggtgtgtgatgttcacctccgtgtgtccacgtgttctcattgttcamctcccacttatgagtggaacatgccgtgtttggttttctgttcctgtattagtttgctgagaatgatggtttccagtttcatccatatccctgcaaaggacatgaactcattcttttttatggctgcatagtattccatggtgtatatgtgccacattttctttatccagtctatcattgatgggcatttttgttggttccaagtctttgctattgtaaatagtgctgcaataaacatacatgtgcatgtatctttataggagaatgatttataatcctttgggtatatacccagtaatgagatagaagacatttatgctgtcaacaaacatatgaaaaaaagctcatcatcactggtcattagagaaatgcgagtcaaaaccacaatgagataccatctcatgccagttagaatggcaatcattaaaaagtcaggaaacaacagatgctggagaggctgtggaaaaataggaatgcttttacactgttggtgggagtgtaaattaattcaaccattgtggaagacagtgtggcgattcctcaaggatctagaaggacagaatttttttttttttaatggtattgtttcatataaacctatgtagttcccaaagaggtcttcaaagtgttttaggtccctgggaagtttttgatcttttgaatttctcattttctttttacataattatgtctccaaaatggctcctcttttggcaataaactttgatcagtggaagactagtgacacctggattctaggtctaagtttccacttttaatttaaatatttgtctatttaacaccctggaactttccaatgaaattccatcctagagtataagaaaagtctttattaatctagatgtgtagggcagtatagatattcacctttaaattaattgatcgattatcctcactgaattgccaccccagacccacagaagggattatyggagctggcaatgtcttgaaatggcaatgtccacatggaagtggcattaatacagcagcctttgtgctttgtcattgcaacccaggccaatgtaagtcactcactgtgaggcaggaaaaaaaccctaagttattataaaggggcaaaagctacttttatatacttttcagaagtctcttgccttggagctgagataatgggaaattttaaaaaggaaaataggagaatgacatagacaagtgactttttgccttggcagacatggctttcctaccctccttttatctcaatgcccctccttcccattccccagggggtggaggggaggaaagagatgggaatgctgagaacagaaaccagagtaaacattaggattttagggtcaggaaagagctcaaagatgttaagaccatgtggccagagctggccacatgatcagagccaggcacatgcctatgtggacagagaagccaagagagaccagagggcagcactttcagggagtcaataagggtagagccttttcaaggatataagtggagagagcaaaggactccttgagaagcaggtcccaaaagcagggctagagagttggacaggttaacatatcccgggggtcactgtggcatgaaaaacagaagctgagggaaactcagagggcggagggaccacaaaagcctgaaacccagaaggctggcctcctcctgcccaccatccattgccaggccctattcatcctccccgcctcctcaaatctgcccttttctctccatctccatagagctgagaccacgggctatactaccagactgtcggtaggtaagaccctgccctgcctcctacttgctttgcaaccctaggtcaaatacctaacttctctgtgcctcagtttcttcatctgaaagatgggaatgatactaccatatccagtttaggaactgtttggggtgccaaatgaattgacacctgtgaagcattcacagggtacttaatattagtttcttagctatgttagtttcctagggatgctgtaagacatgaccactcactgggtggcttaaaacaagagaaattcactctctcatagttctgggagtgggaagtctgaaatcaaggtgtcagcagggttggttccttctggaggctctaaggaagaatctgtccttgcttctctcctagcttctggcmgctgctggaatttcagagatgcataggccctcaatgtggggtgggagggaagtaggtggaggtccttggctcatggacacattgctccaatctctgcctctgtctccatgtggccttcccctctgggtgtgtgtgtgtgtcttaaatctctttctcttatgaagmcattggttattgggtttaggtcccaccttaaattcaggatgatttatctcaatatccttaactaaattacttctgcaaagactctaagtgaagtcacattcacaagtasaaggggtaggacttggacagatcttttggacagccactattcacccaggtacagtcatcatagttattactttcaattcaggctcctattgtctcttgactatactcttataatagtctccttgcctgcagtcttcacacagcaacccattctcagtaaagtatccccagtgagctttccaaaacatcttcctcttttacaccctcaagtggctccctgtcacctgcaggggaacatctgacatgctgaactagacccaacctggagcttatctcatctccccagggccatctcccacccccctccatcttgtacatccttctccaaaacagggtgtctcccagaactctaaacacactgcgctcttttacacctcctggcctttgcacagcttgttctctctgmctatatactacctcccchctagcccccattgasagcctatgcatccttgaarttcagttcttatttcatctcctctgagatgccttcctggacccttctctggcagttcccctagatcccaagaactgcctccttatccttactgattcttgagctcacccctgtcatcaaactgtatcaactgattcccaaagatctattaatgtttctgttgccccttgagagttgcaccttattcaactctgcctcaccgatgccagtgcagtagtggaaggtgttgaatgatgaatgactggtggatggatggatgaatggatggatggacggatggatggatgggatgggatggatggatagatggatgcatgggtagatgaatgaacggataaagggatgaatattttttaaaaaaaagaaaagaaaactctgagtcaggaatcatttggaactacaaggtgaaacctggactaaagctaggaccatctgtgatgagaagacctgagcagttattagtgaggaaggaatgtggatactcaggattcatatctttgtcatataaataatgaacagccatgtatctgaactgccccatagatgatgccaaaagtaactgctgagcaaactcattatagctctgmttctttttaatgtctaaagccttaaaataaagaaacccctttgggagtggataaaacgtggttctcacatcttacactttagtatgaattagatttacctggtccataagtttaaaatgtggacacctaagctccacccccagagattctgatgaagtcagtctgaggcaggctcagtgatttgtgaagaggttaaaattgcaaattctggctctgccacatctgtgctatatgaccttaggcagttccttaatttttcatstcttaagtggagacaatgctagtacttcttcacagaattgtgatgagttaaatactagtaagaagagttcagcacatgtaagtgctcagtaatgttacctgcagtcattgccgtcttcatcaccatcatcatgatcaccatcatcatgatcatgatcatsdtcatcatcatcatcatcatcatcatcaatgacatctgtggtttttaatagtggctgcatagtaaaatcacctgagaaatttacaaatagatcctgatatagttagtctggagtgggcattgggtaagggtataattttagagcaacccgcctttaaaagtctgatgtgcagtcacagttgagacccagccttgatctgtgcttctcaaacttgaattgtgcacagatcactagggcagtttgtaaaaaatgcagattctgattcagaaggtctcagggtgttgataatctgcatttcaaacaagctccaggtaatgctgctgctgctgtcacagaccacagtatgaggcatcaggttttaggggatgagtaaaacctcctgagcctgagatgcaatgcacaacatggtcggggacttggtatcaacccagtgaccaattgtgatggaggccacatggttcctggttatacccaggcctgtcatatgcagagtgtcacatgcctgccttctggaattcccccagctcctcactaatgtcccagggaggagaggcaggcaggctgtcttgggcttctctgataagatatgtcaagtgtacatgcattaccttccctactgtctggggagtcctttcggaaagcacttaaggacatgctatgcactgagcacttagctctttatattgtggagctcagggtcaacgttttgcccataaaagggccacttgtgtaggtcaaactgccgagtcaatgaccctgcccagtgggaatagtattgtcacccctgtttttggcacaaatgatttgagtgttttccaaacatcattaaatgccaaggtccctgaccctaaatgtggttcaggtgtagggactcagaggcccacagctagactgggcaagggaggggtagaagattaaaatgggaatgactgacaggcataggctattaattctcaaaggttggctctgcatcttcttgcagactcattgcgatttcctcaaagcaaggccttcactgcctggttgtgcatcatagagttcacagcattgtgaaatcacccttaaggcaaagctgacagcatctttatttattgtgcatggatttcatgttarcctcatcatccttttgctgcatgttgataaggcagaaatagtgagtcatttaaatagcggattacaaagactctgatgtagtaaatctaccctctaggttttcatttcataaagaatctgtgcattatttatcatcctcatcagcagaataataaaagccaacacagaccttctcatgaaccccataatgtagatattattgtcctcagtttacccaggataaaattgaggcacagagaggttaagtaccttgcccagggctcccccatgccaataaatatggagctgacgttggaacccagagccttgcagtgccagtgctgttagccactgtccccgactccatttgtgagaatgctgctgactggcatttatgagagtgcttagtacctgccagrcactgtgcctggggatttacatggattatctacttttaccctcaaaacaccgatatgagttaggcactattaatttcattttctgattgagagagctgatgtgagagaaatgcagtgattttctcaagtttaaactcaccttgtaagcttcaaagctgtgattggaaccctaggggtccatgttccccttgctcatgtgttctggcccctcctcagctgactttggatttttgtcccctcctactgctccctccaaccccagagtgaaggtctcctggctttgtccaaacattagttccatcagggccgccccaccggcctgtgcccaccctaataccacttccttggagtcccttttgccattggagatgatgcattcacaggttccagggattagggcgtgggcatctttggrggctgttgccccatctacccctaccacaccattttgcaggtctctcacatgaatcctgcaggatcttgctggtttccctgcttacatcttcttccctgcctcatccctggcagctggagtgaccttttaaaatgtaaatacattactttgcagtttgcttaacccctcccaaggccgagatctggtggggccaccctctggcctcctctccctgaacccctcccctcgctccctctgccctgacatgactccatcgctggcttcattcggggctgtctgattgtcacttcctcctcccatacctaaaccatcacccccatgccactctctccccttagtgttggcttgcttcagagcattcctaagttacagtgtgcacttctctactcttaatgtctctctcccttccctggattctaggtggaaaaaaggcagctgatctctagcacatgggacaatgcctggttcaaagcgtgggctaatacayttagcaggatggaaggagggaaggtgggatggaaggaaaagagggagagagggagaaaagaaggaaggagaaaggaaggaaggaaggagggagcaaaggcaggtaggtaggaagaaaggaaggaaggaaagaaaaagagggaaggaaggaaagaaaaasagtgaaggaaggaggaagggagggaagacaggcaggaagaaaggtaagaagaaaggaaggaaagaaagaaagaaatggaaggaaagaaggaaggaggaaggaaagtaggagggcaggagggagtaaagcaggcaggcagggagaaaaaaggaaggaaggaaagaaggaaggaaggatgggggagtcagctcagttgattgtccttttaatgtttgttatctgaggccttattccttaggatgacagtccaagtacttaaaaaaaaagtatcccttttgcctctttcaaatgcatwttttttattcttaawttttttattgatacataatgtttgtacatatgtatgggatttatgtgatattttgttacatgcataaaatatgtaatgattaagttagggtatgtgaggtatccagcacctcaagcttttatgatttttatgtgttgggaacatttcaagttctctcttttagctattttgaaatatgcaattttttaaataatactgctaaatgttcctgatacttaagtagttccacacagtcacatactacaaacagtaagctcatcacctgatattattacatctgccacttagaagctgtgtgactggaagcactctgtgcctcagttacctcatctgtaaaattcrgataataatagtgctactctcataggctgatatgaggtttacattagttaatatatgtaaagcactttgaatgaattcagtaatayagtcagcaccatgtaagtgtgtattaaatttaaaaatagaccaggcaaggtggctcatgcctataatcctagcacttcaggaggccaaggtgggaggattgcttgcacctaagagtttgagaccagcctgggcaacatagtgagaccctatctctatttataataaataaatataaaaacaacttaagttcaagactatcctctccagtcttctattcatacttttatttaatttaaaaagactgttggaaactttcaagtttttacttgcrttagtttgtttctgccttatcagaacccataaaaatagtagtttttactgacattagtttgtttctgccttataagaacccataaaaatactagttttttactcctacgaaagtgaaatggcaaaagtgtacctatgcacattatttttcccaccaatggtcatattcttagcaaataaacgtttyctctgtgggctgggggtgttacaatgtttttaaatagtgggattatcaagtttagggttttattggctcagagggcaagtgygaaatcttgagtctgtctggtgctggggtttgaaacctgatgcccatgtgtcacttgctttattaagtcaccaycttggaagggctgcttcctccttattaatgaaaagcctgctccatttgttttggcttgcaccaacctaacagtgtctttaaatcagcgacagactgttttccttggaagccacagagtccaatagttttggactaagctcagattctggctagaacttccaaactggaagtaaaatgacttcacccaacagtggttggggggaaaagccaggcaggcttttggaaagtggatttttaatattggaggatatttgtgaaggtgcctgatgagatggacctaacagtgtttgagggtgatgtggacaaaccgttttattattctgtttcaacatagtgctatgttttatttaaatgaatttgcaacttggggtcctgaaatctatttttgtttttgtttccacctagaatagaaagcactttcaagcttatcctgggaggcaagaatagattgaaaggataactactgtatgtagatgcaaaggaggtaccttctcggggagatcgggtgaaggctgttctccctagaagaactaaaggctgggtagacatggagtcagaggaagctttggttgggagaaagacagtggcagtaacccaagcccagagaggggattccttggcatttgtgccttttctgtgccatcaacagtgaaaagaactagagaagggcagctctcagagctcagacagccaatggttggctaggtcagaggagctcttgggctgggtcggagttggccagacttcttgtgctcttccattcatacccaaaaggagcttctgggtcttgaagataaaccactttctcttgttcctctcagttgctctgatattctaagacccagagcagattttttttttwaaccaggagtccatgagtcttctaagaatgtccttggaagaattcaaggaattcctgataccccagaaactatacataaaatgctgtatgcatgtgcactgctctgagaaggagtctatakttcttaccagattcttgaaaggattctgtgaactcttctcccctaaagcttagaatcactgttctggatggtaccaaaaaccacacagtagaacactttrtacttttgtctcccacctctgataataaatgcagaatttggcatagtcaaaatgttacaaaaggtttgtacagcatcaaaagaccttggattgcaaattttacaggtaagaggcaatgaccaggttagcaaccagtcaagaacattcatgagcaaatgctggtctagtytgaagggccatcttgggtacacttgggcacwactggtgctgggctgaacatgccactcaggagtttttactggaacacaggcatgtagaaacacatctagaaggatataggtgtcaacatccagaaggatacaggtgtcaacagataagattatgctcataattagaaaatagaattcattgagcatctgcaatatgycaggagctttgtatacattatctcatttgtttgtcacaataatcttatgaaatgaatactattgtatttcccattttacagacagcatagcttaaactcagagaagtcaagtacaattctcaaggtcattaagtggtaagaactggaagataaggtcaggtttgtccaatctatgcttcctcccaacttaagtagcttcatcacatgcaaacaatgatcatggtggcttatgggacaccaattaatctgacaagagctccttcgaggctgtgactttataatttttagaattaactgaaagagtggcaagttgagcattcaatttgcaagtcatgctatgtttggaattaggagggataaccmcttttccttcccaaagrgactgacaagcataccaagagggggtgggatttctggaactctgtgaagttaacaagaagggacttggaaagttagaagaaggagggggagctgcattccaagcatagctcatggtatgagaaagcaccaaatttggaatgggacgaacagatgaagaaggtgtcaagttctctggggaggagtggagggtactagacaccaaatacagggtaaaactctggcaagatgctgtggtgacttatctgagcctaaaacaaaggagaaccatcccagaatcctagaaatctcccttcccccaaatcartgaagggaagtttcataatgatggacagagtcccagatggaaattgactacctgttctacagaaaggtcttcaattctaacagagaactctctgatcgcaggaaaagctatctcaatttcaatgacttgtccactgacagaaaatagtgtaagaagggctcactctgggggagtgagaagtaargcattagaggaggaaagatgataactgagtgggaagaaagaaaatcatgaaggaccaacaggaggcacctgggtcgcagcccagggagcattaatgatcctacctccagttttaggggcacaatacttaatccgacccagaaggtggaatgcaacaacctccctctcctcccctcccaccccagaggcattaccgcagcagataaacaactggcatgaccctccaatagaaagcaagatcacctttgcagcagaagtggccctgccagctgcccttcttctttccgtggggacagacactgttttccctggggaggccagagagctgctgagtcttcatttcctgaagggttgggccagatttgggagctcatgggagttatagaactgctttttctaatttacaagttctaaagtcttgttcctggtcacttccttctcaaaagcgaagggygcagaggctcctgtggaaacaccttcccttgtgaagtctgcacagagtcctcacagagcctctggagtggctaccttccatgtgctggctaccaccgtcttcttccagggaactccacaaggctcctggctcccagtcaagcagccgcctttgtgtctgttctttttccacccccacctccccaagtatgccttctctagtgggataaatttagctctgaatgaatgcagaaagaagaacacattaaagtaaacacagaccaaacagcattcaaatataggtttggcacacacacacaactgacaaaagatccaagtttttctgtttccttctcttctgcttatctctgtttctcccatctcatcctctgactgctacactcttttctgcrtgtatttaagctaattagatatgtagatcagaatgtggggctgttggtcttcaraccccatgaaggggaaatcactggagtgactgagaaacatcaaggagtgaatgagagccccaggtggtgctggcattttcatttactggcttgatcatcttagaaacccttccaaaaacttgaaagcatattttatcttatgtgttagcacaaccttttctcccggtgcactgagtctacagtggctatagaatgttgcaaggtcgggccgggtgtagtggttcatgcctgtaatcccagcactttgggaggccgaagcgggcggatcacgaggtcaggagatggagaccatcctggctaacacggtgaaaccccatctctactaaaaagacaaaaaattagccgggtgtggtggcgggcacctgtagtcctagctacttgggaggctgaggccggagaatggcgtgaacctggaaggcagagcttgcagtgagccaagatcgtgccactgcactccagtctgggtgacagagcaagactccatctcaaaaaaaaaagaatgttgcaaagtcttttttttttgatatggggttctcattctctcatccaggttggagtgcagtggcacgatcatgattcactgcagcctcgacctcctgggtttaaatgatcctcctgcctcagcctcctgagtaggtgggactacaaccatatgctgccacacctggctaatttaaatttttttttgtagaggtagggtctcactatgttgcccaggctggtcttgaactcctggcctcaagctatcctcccacttcagcctcccaaagtgctgggattgtgggcatgagtcactgcacctggcctgcaacaccttctaaacatcttcccaccaaccagtcagcatgtccctaagccctacttttgaagtattttatttcactgtagttcttcactctcacagcatttgtagttctcagatcactttcttattcacgaactttaaacttataagaatctaatgggactagttagctatccctgttcccagtttacagatggaaaacctattcccattttacaaatagagaacctcagttcagagcaggcaagtgacttgtacgaagtcacacagcaagtggcagagttaggattaggacctaggattgatactttgtcttatgttcattccactctaccatgagctgctttggggaaaggcagtttgtccgggaggccctggctgggagggtcacacattagtaatgagcaatttttgagactggctcaggatccatttagtcaatatatggagggtgtgcaaggggcagttgagacctctgtcattcccaaaggtgtcaggcaggcacagcatccataggtggtaggagctgaagctaggctttcccaatttcattattcattccccagccagcagggtggacaggatttagtrggcaggccaccatccctccactgccaaccccgcaggaaatttctctcttgtcagcagtgctgacttgcagaatgtacacggcattattgaaacatggttaacaatgaaagtgttgatggccacrctaccaaaagggattccaagctgackgagcacatcgtggtcattgtgctaaggtaaaccagactggcccctaagctctctgagaaaccaatgaccygactgtgtctactggcatcagataaccaggctggagtagaacctggccttcccaaagactttctagtttgtagctaattcatagccaaacctagaattgtttctaccacagagcaccttcaatatgtaggcatgtagctctcttcctaatactcaaaaattaagctgttcttcccatattttcctaggatttaatctatctcctcttaaatttttaaattccttcttatttataattgttagattgacccacactaaaagataagactgtagatgtctaagaatcattaaaagcagagtctagtaaaggtgtttctagataataaatgacatagggcagaatcctcttgtttaaaagatggaaaatgagaagtactgactaatgggaggaatgttaagaataccgatagctcaacccttaaaaaaaaaaaagcctayataaaagggtggataaaatgaagtcattcacttaagttggtccatggcatttttcatgaagcaatgattgggttgagtgatcaagattaccatttccagagcacctaccatggccaatcacaagccttttacatctgttaaccttatttattacaacatccctgtgagagggctgagattccaacttgtcttcagagttcctgtcttttctgtgtcatatctacctcctacttcctaatcctacttttcaaaacttttgtcattaacaggactaccactctggaccaacatctgaataacacagtatttaaacttatcagatatgacaacccaatgagactggacatcacatattttcatttccatcttaatgtaaggaaactgtcattctaatctattatgtgatttgtccatactaccacaacaaaataaatgtagaatgatctctaaccatttggctctaattgattcccgtacactctccttatctacccagtttcctctagggactcatgttgatcaactgacattgccaaagctaaccaagagaaaaggaagtcatcacagtgaaatatwgatattcatttctagccagatttccaattgctcattttcaatctgctatgtaaagaccttagccactatataccttaagcaacattcagcctagtttatttttcacaatggtgctgttttctgacttctttctatcttcttgctccatggggactccctaaatgaatctatcatttggatcccatggagaaaaatagcatatacttgaaatcccatcaactttcccaaagagctaacaaccacaggagccaagaggaccacaggcaatgttctccttcttttgattctgtgcagctatcacatatgttttaaatgaccatttattttcaaaagatcccaggcaaaaaagaactaacacaaatataaacatttgaggggatcctggcattcctttcaaaattacttttgtccaagggaagcttcaggttgctgggaaatgtcacactcatagctcttgctcaacaagactgacttttactcacacaacgggccttggcaagtcatttcccttttggtatacagagctcttgttttccccacaaaggaattggctatgatcgtttgtgattctcaaaggactcatgttctaaaatagattctgaaatttttattaacaaaacatctattttgcatatctagcattctgtatccttttcgtataatgctttgcaatgaagcatctatcataaaaaccactaaacyrtacagatggtgtttatgcaacacaatttaatgtcccagcaagaactagtgatttgttacatacattatgcatcattgtgatgtatatatccagattttaaatgtttggagggcaaatagtcaccaatatcattgtggcactagactacgattttttttcttaataccaggccatggccaaacatctaatataaaataattatacaatatgtttattaaataaatagcatagtttgggttttaaatgcctgtgtttgtaatgggttcaaagattttaaaatactaaaatttagaaagttgaaagaagtgctggaagaggaraaaagattttccctctgctccttggccaaccatcaggcagtcatttcatgtgccttcctgtttcacctagggttcttggtcccaagcaacagaaatagattctggctgataggagcagaaaaagaatgaaatgaaattgtattagatagctcacaggagagatggaacgtccaaagaaggaagcttgggcaatgggtacaaccaaaggtgaactaatagcctgaaggaattctctaacatgctcagtctccaaaattcttggcaggcacacatgcctgactgagccgagattgcctgccataccatggcttcagggggatctggggaacaagtgtctgatacctcccagcttctaccacaggatgtggctctgcctctcactatggcttttaatatgggaaatccccaaagatgggaaggagttcacaaattggccagccagaggaaaaaaaaatgtgtatatgaacaagtctgttacacttcctacctggccagaagcattttgaatttcctctcttctttggctttttgtcttacctgctttgataatccgcaacactgaataaacacaagctttttttattgtgggtctcagggcagttaaaaatcacttaggaagtacacactattggtcatgagtctttagtctattcctagtaaattcaattagtacaaaggttctaaacccatccctaactcccacatcaccctgtagaaatttaattctgtacaggtcttcaggagattctgatgcagatttctgattaggaaccatgttttagtctttctcatctttcacagtttctttacaaacgatttctatttttctgaagccccaaccctaygccatcagtcttaatcaatgactctttgttcaattgggaaaaccagtccatctgatgcaaattcacttaacctctctcctgagagttgaactcaaactttcttcttgtctttatccatttcttcctccttccctacttcgttattccttcttcccaaggctaactggctaatgtgatgctcatctgaatgtcctcttgactaattagagactttgactaatattcaccttcctttttgactgtatctttggcctmatttccctgttgtctaatttgctttgacccccaaacatccaagtcttgcctgacctaaaaaccctttccactagaccctgcttcccatgggctatgttcctgttctccaccttcatctttcacatctgaagagctgaaagaagcagtttgtactcatggttgcttctctgatctctcgctcatccccatttttgtttgttttattttcaacattcacttggtagcagtcattcctcacctcttgtaagtgcttccaagctcatcttctggacacaagtcactcatggcttactgacagccctccaatggtctcttcttcatctgcatcccccatgacctttcagaagcatatgaccctgttgaaaacctctttccttctttgtggcttttggtgcaaatccctttgaatttttccttctacttctcggatgatactttatcagtcttctttgctgggctctctcctcttcttgctctgttttctcatcctggctgttctcatttctttagctgtaaccgcaaagtagatgacacttggatgtgtgtccccaaccccgattcttctattcagagttcagatatttccaactgatcacttccaaagggtgcccaggcccttttccttctccatctccccattccatcactccttttaaaaatttattgcggttaaaaatacaaaacttaaaatttaccatttcaaccacttttaagcatatggtttgatgacagtaagtacattcacactgttgtgctcaatcataccttttaaatatctgtatagctgggagtagaaggaccatttctggttcaattgtttattcctggggcctgcttctatctccatatcattggccaagcctggtgcttaatggttaagagcatgggctctggtgagtgtgatctgagtttaaatcccagctctataactgtagctgagtctttcaacctctctggtctcattttcctcatcttagtattctctacaatcactctgctgaagcaataacagctttgtttatttgtgagcaaacccctttaaataacttgtcctgctggggcttgtgctggaaatgaagaaaaaaggatgcatttgaagaaaaggatgggcttagccagaaagtagaagtttctgatatattggagtgggatgtagaatctggcactggcttggatttattaaacaatcagctccacctacacttgttatgaaaaagatgggaaaacaatccatcagtaaacgattttggtgagtgcttccatctttggtcagaggagtaattgttcatcagtgacaggtgaacctctgtgaaaattgaaagggcaatttagttgaaatggaagcatttattcaggaaacaggtgatctgggaaaatttgatgtgcatttttttttttttttttgagacagagtttcactcttgttgcccaggctggagtgcaatgatgtgatctcggctcactgcaacctctgcctcccaggttccagtgattctcctgcctcggcttcccaagtagctgggattacaggtgcctgccaccacgcccggctaattttttgtatttttagtagagaaggggtttcaccatgttggccaggctggtctcgaactcctgaccttaggtgatccacccgccttggcctcccaaagtgctgggattacaggtgtgagccaccgcatctggcctgatgtgtatatcttttaacatgcctttaaatcctatggctctaaagaggccatattagttatttcagtgtttatttcatttgatgaagaaacgtttgcatatgaatgttgggaattctagcaggtcctgcctcaatgtgaagaggcatttttttttgcttttggcattgatctccttttggactgggcctgatccacttcttacatccagtccaggacctgtcacaaaagactcacattagtaccacatggtatcctgttttagtaaagaataggtgaaatattttagtgagtagatcctacttttcctttcagatgcaatgaacagaagaccctgaaaggatttcaatccagaatgtcacaggataataagagcagatgtctgtgatgccctttacaaagcacctttacatactgtctctcattcgtctctaatgacacctatgtgatcctccattttttcagatgaggaaactgaggttcagagtgattaagcgagttgcctgagatttcacagctaacacattgtgaaatctagtctagcacccaggactaaaaactctcggcttcttttaaggccacatatcgcctcaccagaagggtggcctctctggagatataccctaccctcggccgacttgatattgagaacttggtcatcttaagcatgtgggccacttgggcaaggcagcccttcccaaattgtaaatgtccccacgtggagctcaagcgtctggcttgagccagaaggtgccctgaacactcggtggccccagcccccacgtaacagcacgtgctcgggtcccacattcggtcagacgcccctctccactggcatctgcccggtggaggcgccactgcgctctgcctccgccccagcaagcgcgtgtccacgcgggcgcgccacgccagccgtgcgccccagcggctcgccgtgcgcccgcgccccaggtgcccactggctcgcgcgccctccgtctgcgccttggagacccgcggcggcgatcgctcggagccgccttggaccgcggcctcgggtccatcacactccaggggcggagcgaggcaccgagacgtcagggcggagaactagcgccgggctagcgcgccctcccggcggctgccggcgtcccacgtcctcggctggcgcggccggcggcggcggcgaccgggagatgcagtgagcggcggcgctggggcgcagccaggcggccgggagggcgggggccagaggctgagcccgggcgagcccgccgtgcgcacagctctgcccgccgcccctggagcggatccccagccgtccctgggcgttctcccgggttctagcaaagccccccggggtgcccatcagtttccttgggtgactacagcgtgtgttttttcyttcctctttcccctgcctgtgtgcccttctccaggatggcagaggcggaattgcacaaggaaaggctgcaagccatagcagtaagtccactttcattttattttcttgctctattgtctggggtggaagggggcccccgagggtttcggggcaagcggcatgccagcacagtagccgcaggtcatatgttccaggggctaaaactctgtcagggctcagctaggctgccttttcttttctatgtctatagatggagacccccaagggcgcgctttggactgaggatttgaatgtggaagattggcttaaaaaaagatgcttgctgctgggctttggggaaggactaaacagaggcttggggtsgggggacgactccaggaatattatgaccraatgctcaggcatacgttggcttcatagcctggagaaccaagagaagggtgacctgaacggtggctgccatcctctctgcggaagctgtcctcctgttaagtrgaaaaccaggagtcagcgactcagccagccacgcggtagaacctcctcccagaaaccgggaatgttagttttcccttctctgtttgatattgacaagggcactggcacaagccaccaccctggaggtctggggacttcatacaactgggtcctggttataatattccatgagagcctccttcttatggtgtggagtatctgaaaacctattttcagcctacaaaggagtagtcagttttggcaaagttcgtaggcactttcagaaaagtgtacccatgtgcatcttgggtttaaaaaagaactctctgagactgcctagatttgagcaatcttaacacagtgttgccaatgatccacagatgtggtatttttactggagccaccacagctggattatatatttccttcgaggatgagggaatgattactgctgccgtatgaaatagtaacaattaaaaaagaaggtccgttaacatattggcataaaagaatctccagacattcttccacctaaatacatttgtgtttttcagttcggaagttctctggaaacacatataaatttgttggagaaatagtgtgtaatgttttggaaccaaagtatattaaagcgttttccaaaacctttttggacagattcttcattgggaaaatgcacacagacccttccttttttagaagcatttgacatggtctccaaggctctgagaccctctttctcaaacgcctcaaatctgaaatgtcttggagacttcaccactgaagtgagagagatgtttgctggcaatattgaaaygccatggtttgcctattaggtaatctttgaacgtggtgctctgaactcagaaaggttgtttttttcttctttctctttccccctgtgcatgtgtattttgatggtttgtgaagttatttgtggtttctaaagttggtggcaaggcagcatggccagtgtgtcatgaacttgataagaatggtgatattgagttaatggtgccatgtagctggtgggtgttttgtgtgaactggataataggctgctttaactgttgatgcagtggctgttcccattggctgctgctgaaggcttccaacagttgtcacattttctgcctttgcacaaccagctttactggatgcctgaggaacagctgaactccatgaaaggacttgctttccaaacatggagccagtagctgctaacactggggtacccttttccaagtgcggttgagtaatcccagcagaggccaagtcgattttccaagaaagatctaggcaaatctttgggaattctcttgagcatataagaatacacacaaatactcacttgtgcctcttcagttattgaagaattgagtttgtcctgtgtatctggggagctgttgattaytctcatgaatgtgcacctaatacagtctgccctccctattcatgggttccatatccacgccttcagtcaatcttggattgwaactattggaaaaaataatagatagctgagtctgtactgaacatgtacagactttttcttgtcaccattccctaaataatacagtataatcaactgtttacgtcgcatttacagtgtattaggtattataaataatctgaaaatgattaatgtatgtgggaggatgtgagtaggttatatgcaaataccatgctattttatagggacttgagcatcctttgattttggtatccaagggggtcctgaaaccaattctctgaggatactgagggatgactgtatgatgttgtcaggacagatttgctaacagcgtgtgtttgtttgtgtgtgtgtgtgtgtgtgtgtgtgtgtgtgtatgtgtgtgtgagagagagagccaattaagagacagagggagttgggtggggggamttatggccacatcggtaaatggttttatgctatgctttggtctagtgcctactcttctgaattctgcaaaccctgactctctcatcactttcctggagttctcaggggaccctgaggagatcacaagcctgcccccagaacctagcactcctgaagtctctctggagatgtgagggaagaagasaataggtcctcacatcttcacttacttgggcttctctctcagaggcagagaatcgactgggattccagtctgcagggccttgggcagtctttagtctgggtctcagctccttcatctgtagaatgggttcatgagttctacctcctgggctggttgtaaggtttagttaggatggaggtgaagcacctggcaggtagctgtcattggatggtgttgagcagagcccttagcttttgtctgtattgctgtcttgtcctrtggggggtcagaagcaacatctctgaagtggaatgtgtattaatgactttttttttttttagacagagtctcactctgtcacccaggctggagtgctgccatgacagctcgctgcatcctgaaaccatcctcccacctcagcctccccagtagctgggattacaggcatgtgccaccatgcccagctaatttttaaattttttgtagagatggggtttcgccatgttgcccaggctggtctggaactcctgacctcatgtgatcctcccacctctgcctcccaaagcactgagtttagagacatgagccactatacttggtctgaacagctcttttttaatcccttccttcaactgactgaaagtcagggccctgcccagcatcactttctctaactgctttagacagaggcagagatatgacttgaggattcattcatccatttgttcagtaggtatttacagattgcctcctctgggaaggtattggcaacactgaaaagwtggtgtccccaggtttcagctgcctgaggctgaaacctttatttcaccttttgcacataatttcttgaaggacagatgtcctgatacctaagatgcttgtcacatgaacatctgtggaatatccgcccccaccaacaaaactgaattaaatacttagaaactacagtgctttaatggaatcttccatttggatccaggaactaatcaatgagaaaagatgactcttatcctaatttctgccaaaagaaragcaagtccatctttgacaatgatctctacactcacatgctcctttcttctgtagggatactccccaaactttacatttagaacatggtaaaaagcctctgaaacagcatgagtgagaatggtaatcccagggactaataacaacaattgccatttattgaatattgttcattcagaaaggcacggtgtgaaatactttttgtttttcrcctaacgttatttatagtctaatggaagaaatagaaaagcacataagcagttactatccaggagtactatgaaaatgagcatccaggaggaacatgtaaaccaatctcagagttgtgaaacaattccccaaaaagaagacattagagtaagtcctgaaaattgggtaaaataaaatataaaataacatcataaccttcccaattaccaggaggcatttgtttattcgttatttgattattatttattcaggacatttagygtgagaaagggaaaggcaaaagcatgaagaagttaagtcagtagctaaagacacaaactcagagtgaacactgaaatgcttttcagcatgtattatctcattgaatcctaataagaagcttatgaggtaggcactacagtattactcatattttataggtgaggaggttctagaactggtctaacattaaactgatagtatcaaagccaggatttgaatgctgcccgcagcaggccattggagcctttgctttgactgctgccctgagctgccacccaagatggyggcagcgtctcgcacttttcccatgagcacactgtgcaggtggtctcagcagcctgagtgtgagccacagactgattccattgcaatgggaaagcttgagacaagccaggaggcctacctccttttgagagtctttcaagcctggattcagtgcatagaaatacccaacataaaatttaatggaacgagtaacattcccatggggaagaagctgttgtgtctcagtggaaactaaccttgtgggagggtgctgttatgtctgcacattggagaggaagatagttttctttgggcatgagtgaaaataagtaaatgttatataaattgtcttgggtgaaactcctaagagccacgtggacaaggctcaggctacaccagggaccagcatgagtatgtttatatatgtgcggaaataggaaatgctaatctaacctatgctgttctttagggaattttgtcatttaattagaacccactctgtgaagtaataaaaatgatctttgcatttgtgcagtactttataatttatgaaaaccttgtatatgctaccttcttcctgaggtgtgtagagcaaatcttatacgctttacaggtgagtattcagagctatccaagcttacacagatagaggtggaagagttgtagtaaatcccagcctctcctgactcccaattcttgtattagtccgttttcaccgtgctgataaagacatacccgagactgggtaatttataaggaaaaagaggtttaatggacttatagttccacgtggctggggaggcctcacaatcatggcagaaggygaaaggcacatctcacatggcaacagactggaaatgagagcttgtgcagggaaactcccctttataaaaccatcagatctcgtgagactgattcactatcacaagaacagcatgggaaagacatgtccccgtgattcaattacctcctaccatgtccctcccacaacacgtgggaattcaagatgagatttgggtggggacacagcaaaaccgtatcacttgtgttagtggtacatccagccttggaagggtgctttgatacgggctgaaactgcaactaagatcctgctggactaaaatcttctggctgggaggagaggagtgagcttggatgtgtctctrtggaatatgcccttgttaggatttcactttcggcctctttcattcttgaaattctcaccaaggggtcagctagtgagtttatggctttcatctgattctattctcagtcctgcatagacctgggtatacgctgttggcctaggctggctgtgccgtgggcytacagagaagtgctcattggcttttcgttggattcgcctctccatgccttttcttgcctgggagcattacagccttgagtaccaggcttggagtgtggggccagtggccaaggaggccaccaccctgcttttggtccaggccttttaggccgacctgcacagcatgggcaaaaagtccttgcaatgatttacatactatccagtccagcttcccaaggatccctcagaggggttagagactcaaacccaagccctgtagaaacaggcactgtgattcatgtggggaccatccccatccatgttccttgtggacttgtgttattggtatgcagctgtcagagaactggagaatttaagatcctggtcattcatctgttatcttatatctcagagatgcagatgacaccctgcttctaaaattccatgttaaggcctaaaaaatcatttgcgtggtatattggtgctgaggaagggttcaacttggctgagtctgtgaagctgcccactggataggtgacactttgggcccatgcagggtcattgctgtgtctgggagtgccaaggcaggccttacccagcatgcataagggtcacacacctccctgctacttatttgtacctctgagtatttcagtcttcagcttattgggacaaagagcagctactctgacaaactttaaaatgctctgagaaatagagcagttatcatggaaaaaaaaagtcatcatagaaaaagctaagtgaggggggttgtgggttatagtttgtcaatatttaaaggaaaaccagggcccagtagaattgtttctatatttctttgggggctactcaatgctttggggtcactgctggcccctttgaactctccacatttcaccactgatcccatttgggaatgttgatgaacttgcttggcagtaagagttggtcattctgtggcatgaaattgactgagacagcagatggacattgatgcacagagacggtggtcccaagggctgtcattgtggtggggtagttaccagcatggattttggtgtcaggaagacctggcgcaagtcctggcctttccgttggtatctgtatgatgtcactgtaccttggtttcctcacctgtaagatggggctaatgatcatacccacttcagtgtcttgttgtgatggttcttttagaggtttcttgggaaatgctcagagacagcatgcattaagcactcacaaactttcctatttataataagcaaaccaacaaatcataacttatgcatctttaaacagaaagtgaacacaaagagtgaaaggagaattttgttagccacagcatttttgtcaaactaggaaattagataaatactaggaaatcagataaatgttgtaactcctgagttttcaatgcatgaagatagtattaataataaaaaatggattatttgtagtaagcaggagtagtaaactcaacaggtcagggggccagcatgcaatgtaaatgagggacacagattgagtcgaaagtattggtccctagagagcagatgccacctctcagttaagatgcagttaatttatgccttgtgagaacgtgggtcttatgttgttacatcaactcattttcaagagaagccagaaatctgatttttaacatgtgagatctcccacttaaaaaagaacagtattaactagtttaaaaactttaaaaagattggcagtcacaacacaattccttttgatcaagaggccgacattttgtgacctttagatatagacagagctttgaactttacaggatgctttccttatgcattgatttatttggatttcataaggatactgtgaagtaagcctatcagcacccctgagatatttcataatgttgtaatatcgggttgcattttcaccagagctttgtgagtttggtgtccagatgtttggatcattggataaatggtgcttatttgcgatatcttttgacattaaatgagcccttgcaaatcactgacattattgaaactcagaatactcacatctagataggtaattgctctctaactcaaccaaaacaaatctaaaccacatcaagtcagcaccttaatttgggaaattcctcttattagaaaagaatctttaagaasctatactcaaggtatgcaaatctgaaatgcaaacctgatatgaagcccaagcctaactcatgtcagtcaggatgtttgagttgatcctgatttattattagcctcaagtaatggacattgtagggagattctgctgggctcaggactcatagtagcagcaactgccatttgaccgatgtttttgtcatatatggtatagaacagtaattctcaaacgttagtgcattaggatcacctggagggttccttaaaacacagattgcaagagcacactcccagagtgtctaattctgtaggtctagggtgatgtggcctgagaatttgtatttctaagaagttcccagctgcaactgctattctggggaacacactttgaaaacgactggtgaagtgtaggagatcaatagtaaaggaagattatgacctgggtcctgatgtgcatcacatgcccattgtgatatgcccaggagtttgtgtggtgtgtatattctgaagaggtgaaatagaataaaaggccaaatttagtcttgattaatgagagccttaaacatagcccagtttggaagtcatgcaagccgggtgcggtggcgcactcccatagtcccagctacttgggaggctgaggtgggaagatcgcttaagcccaggagttcaaggctgcagtgagctatgatcactgccactgcactccagactgggcaagagtgacaccctgtgtaactgtgtccttctcacattacactggctaatcaagaagaggtctttgcttatctcgggaacttgctttaatctatttaaataaagtgagatatctgttggttacttgacaacaccggtttggaaggtttgcccaggattggctgggcaggttgagagagtttgcctgggattgactgactgaaactatgggctacaaaattcccttggggaggccttagaggacacctcagtgagataagaagtcatgcagtagagaagatatccagcaacaccatgacagccccattgagagaggcttgccatacatatgatggtgtatagatgaagacatcaaatagcagatcagcccatcaagcctggtggccccttctccagcctgcaggtgctaattcgcgatgtgattgcttctcacgtgggcaactccaataggatgccaggagaagcagcaactgatgttcatttacttaatgatggttaatattttatgaagccagtctgtgtatatgcaagtatgacttgttattggcatatcaaggacaagtttattcttccaaggatgtcatgcaggcttccctcacttgtctttgtaccatgcattttttgagctaacccttcatttttggaaggattctgcctcaccggatctcttrtatatcttaaaacacaaagcacagaggctgcactgtacaggatgaggcctaagagaacgtggagactgtaggggatgggccacacagcatggcggagtttgtagaggaaaggttgctcataagtgctctgggtttgggagaagaccacacagctgagatctatttctgacaggaaatgccggcaggagcagagggtggtgtggggcagtgcgtgttggagctacagtgcccttggttaattattatctcagtatttctcattagtctcttgttgaattaaaatgctcaaaaggagattattaaatacacacagaaagggagacagactgacagacacagagacaagactacaccctatttacataatgcttgaacatatattaaaaatactttggattactctttgaccctagtatcactgtttctataggatcatataagtttagctagaagaaaagaatagagaatctgtacctttcttttgcataagatcgaaggggaaagaaaagccatgtgaggcccaagataaaagccccagctgtagatgaaaaagctgtgggccagacgtcggaacacatcttcctgtccatcatttcccttgtggaagcctatttcattaccctgcaggcttttaggctctagacagctttgcaataccaaatatcttgaaggcatttgtaaaacctactcttacttttttcctggaaaaaaaaaattatactggtttacttactattctaggtgggtgggatttttcccccctctgctaaattataaccagtcatctaagtattcactttatttttaaattcagggctgaaacttaaaaccttgagggttaccaaaaaatgttattcttaagagaaaaacatgcttgaaaacttaacccctttggtggcaggcaggggattttctttgtctgtgtttgagtgctaatgtcgacaactttgaggccaataaataccaaatggggctctaggatttgggcaactgtgatagtgtgtgtgtcctgcatgtsacatgagaaagagagaggccgggatttaagaaaggtgcctcttggctgggtggcatgaactcagtcagctggctttccccaggcacctgattggccttaaacactgagtttttgtggygtgacttgacatacatcttgggctgatatcacgtgctgtttctactggggtgggaagtgctttgaaaatgtccttgctccagtggaactgtgagacatatctaaaaagcttaaggctaatatgagtgatgctaaaaggaagtcctgcttatccaggtaagcaaaagcatactctaggatagcagtgctcctgtaacctgcatggcctatttttcttttccaggtggtatgcaggcagtcttgttcatgaacattgatgtctgagcatgtgtgttcaaaattcagtgttgttaatcaaataaaactcaccacaaaacccgaaggatatttaacaatagatgagataggtttggcggagatgggtcagaagacagaggaggtcctggaggcagcagtagaatgtactttccaatcttactggtgactagagataagacactagtagcctgtttactccccatccttatttacactggagtgagaatgatatatgtcagatcagtattggatgcgatgagggagaatgaagagaaaatattgactctgaaaaatacagacaagaggaggcaaagttgaaagtaatgtaaactgcttaatcacctgcctttctctctttccaccgtcatctctttctacttgacatgttcctgcttttgcctctggatggttctatctctcatcccctctcagcctgggtccacagagaaaagcaggaagcagcctggcatggcagtggagggagccttttccagccttcctccagcagaagtgcgccctctcccctatagggagatagggcaccccaggcttcagaaagcaagggaaagatggtacttcatcatgtagcttttcttaaggggttggagggaagggctcccagttccggagagggtccatgtgccagccaccctgctgaatgccttatgttaggggggtgagatctcagatgtgcacaggwaccaggttgacttggctgagcttttgggactgtggtagccaagagagggcagactcctgaggggacagagagtgctcaactccaactgatgggcactgtgtgggaatttgagcccagggtctcctgcttttccaagagaacctggaaatccaattttgaaggaagtctgttgatgtttaaatgctcacaacagtttaaatactgtatgggccaaaccaaacataacacagattttaacacagtgtaggctggatttgttccctgtctcaatgaccctccccctctacccccagcctgggccaccagttttccacgtctgcatgtcacaacctattttatttaattacaaaaccaatagtatgtgggaatgggggctggggggttggtacagtataaagctatgtgagttgtagatacacttatgtatgttgggcaccttggtgggatccataccctataagaaaaccatagtcttgggtcagagtcagggctgctacttaaatcagttccttatccagcatgctggatgaactcatcagttctctgtaagaagtaaaaactacaagcactctttaaaaaaaatgaaaatgaatgaagagaaaaatagacttattaaattctttaatttggaagactgggtctcgctatgttgctcaggttggtcctgaactcttgggctcaagcgatccttccacctcagcttcctaagtagctgggattataggcatgtgccattgctcccagcactaaaattgactttcttgatgtacagctctctcaatttgaacacatgcgtagatttgtgcaatcactggtatactcaggcaacagaacagttccatcacccccaaaagtctcccaggaaggctgattttaaaactctaactggaatctaagtcattctgcttggggctaccttataccctgactttgaagaccctaaaaatcagttgagggtgggagggttgaccagaacatgaaacttgggttcccagccattggtggggaactgtttcataatgagcaccctaccatacctatataacaagtttttgcttcttcctaatacataccttctgctccagcctgggtcgtcttttcactatcccctactagggttgttccatttagcaactaaatgtataggatgcccagtgattccatggggacatatttatattaaaatattatttgttgttgatctgaaattcacatttaacaggacattccatattttatctggcaagcccatcctcttcacattcatgccacattctcatgtaagttcaaaacctactttctctgtgtttcaccaaagggtgaaaatactctttgaaaatactctttgattttattacacttaatcttagccaaaggccaagaagcgattgtatgctttgattttaaatagtrgcatgtttatagggagatagggcaagtgttggaaggataagagtgctttctatacacataaatggattttcaagaaatgttttgtgaccaactggttttatcctttccagagaacaagaaatgatctaatatgtgctcaaggaaggaggacaactggatttcagaaattggttcatgttacagcccctcctctaccctttttctctggcctgacctttgaataatataagtctgaaaagactaaacaaagagattgctcaaactggatgagtttaaaaataacattggaatgctagccttcagcaagccatatatcttatactgcactgagcaggacagtgccctgtggtgggtagaagatgagtcacacagtgatcacaaccagatccttcccagcctggatactttggtggagagtggtgtgatggctgatttatttgtcttgtttgtttgttgtttcatttttccattttactagtgtgatttcagaatcacaaggaggcaagraggaaaattgattttagatagcagcttcagaatgaaaaatgagtggaaattccacttttcggtctagaccagggaccagcaaacaatagcccgtgggccaaattcagcctgcagcctcttttcataaggcctatgagcastgcctggtttttatatttttacaaatttgaaaaaattcaaaaaagkatcttttatgacwcatgagatttgtatgaaattcaaatgtcagcatccataaataaacttttaccagagcataaccatgcccattcatgtatgtgttgtctatggctaagtttgtgctataatggcagaggtgaataattaaaacagagactctatggcctgtaaagccaaaaatatttactatctgaccatttggagaaaaactttgccaacccctgctttctacatggcgtatttcaatggctgtatttgcgatgaaggctccaggagccttttatctaaagaaatcactattgcctcattgcttacagtccagaacaataaagcatctcagacatccttttcactgttttctgggcttaccatgatgagaggttttgtttaccgaagctggcatgtgagttttgccgctgtggaattttctcattatatcctttgctatctaagccaactgcatgttgttgttgttgttgttgttgttttttgaaaaccagaaaatctgatctcttarggttaacagtttggcccatctgaaataagtccatacaattaaaaacatttctttctattgacagggactgagggttgagggaaagcactgcagattttccaggtgtattttttttttttttttgctccctggattttgcctgaaccctcacttttctctttcagggaactttaagcacacttagtgaaagactaaaggtcagagagcacaccagccacattccctgagtccaagcagggagccagagaggagtggtttctggccarccttcmctgttcagttacctcatggaacccttgggaccagggccttgatttacaaatagagtggccacyaggtaaaagttgcccatggccagtggtagcaggatcgaccctagtgtctctgaatcattaagtacttcctttctgccctcttccatttcttactcaaaaacaccagctacaattttgagtctggtctgcctggaaatttccaaagggactttggtgccttaataaatattttcaaattgctcaaggttttggaagatagcagagccataattgtgaaatcgrgttaaagaatgattgctgcagtacttgcgtcggccctgtggccatgctgaagtggacagggttgtggacactcamaattgctcactgcagatggacagcctttgcttttctggtcatacatatgcttgatcctgaaattctctagatgggctacttctgagcagctgcttggagaatgggaagccaaccctatagtgtaaggtttcttaactgaagtacyattaacactttgggatagataattttctgctgtctgtggggccgatcttttgcattataggatgttagtggcatccttggyctctatccattaaatgctagtagcacaccccactcttcattgtgacaatcaagaaggtctccagacattgccaaatatcctttggggaaaaaaataacccctttgaaaatcactgatgtagtataacataaaggttacctgaccaaatgtacttcccattcttttaccattagggatttatccctttaagtcttcactctcatcattagggattaatttctttaaatgtcaaagtcttttttattttctagaatccctcacgacaatattgatttaactaacctgcacgttgtgcacgtgtaccctaaaacttaaagtataataaaaaataaaattaaaaaaatggtaaatccttaagcttgggatggcagatggttttcagctcctatgtgaactctaactgatagaaagtgtccatctatagtgccgccgtgggaagatctttgaagctgcattttaggtgttggagaaaggacatyaagacagattagagctgtcttccatgggcaagagatgagggagttggcatacacgtgtaaggaaccttcttacctaacatttctgcggagattcactatagtcaggccttaggctggtgctgtagttcagccttactgctgagccctgtgccagggcactgttcacacaaggtccctgtagccttgtgtatttgttagggcaattttccagcaggttttgaggaaagggcaccttttctagatcacagagtgccatatgggcgagcagaggtgctgtactctgttgatgggaatagaagtcagggaacaaaaagagaggggcaaagaatataacttcctgtctgtctctcctgcctgactgtaaacttcttgaggccaatgactatgtcatattcaccattatctactctccgcctgtcacaacacattttgcatagtgtcaaagcaagtttagtgacttttagcagagttcttgttctgtatcttggactccttggcagtcttgtggaacctatgggtcgcttttcagaatagtgcttaaatgcacaaaataaaatatttaggattaaaaatataaccaatgaaatttatatatagtcagcaaaatattagaaaactgtgatagataatgtgctttgattgattgatgtacagtcagcaaaatattagaaaactgtgatagataacatgggmtttgattgatgtacagtcagcaaaatattagaaaagttaaagataacatgcttttttattaagtaaaatctagtggcagttctaatacttactctaattgcaaattattggtgaatgtaagtgatattttgagctgtctccaacaactgtaatgttatataaaaagtctgtgattcctactcctaataaagtcatggtatattagtccaatctcacactgctataaataacttcccctgagactgggtaatttrtaaagggaagaggtttaattgattcacagttctgcatgtctggggaggcctcaggaaacttacaatcatggtggaaggggaagcaggcacatcttacgtggcaacaggtgagagagatcatgtgtgtaggagtaactgtcaaacacttataaaaccatcagatttcatgggaacacactcactatcatgagaacagcatgggagaaactgcccccatgatccaatcacctcccaccaggttctgcccctgacacatggggattatgrggattacaattcaagatgagatstgggtggggacacagagccaaaccatatcatataggtactaatgatctacctggggcttgtgcttacattcataactgaaggcggtgctaaatgttagctagggggtggtaaaaataacctttagctgggtaccctaaattctgtcttatccccaaacgccctgaattctcacttctttcttttgtaactgggcccctgctctgatggtttcctcctttcctttgcctgatgctacctctkttaccttcttggggttcttccccagcaaatttttctaggttctttcttctgcattcactttccatctctctcagctgggttgtgtcctttggccgctatctaagttctcactccgcttagcatgggaagggaagcttctaggcccagcttggggttaccctgagcttcagaggagagagggaggttggcacatcacagatactcactgaatgctttttgaatggaaacagttgctttgccaacttcaccttttttatcaggggctcttcttggattcttggactgtgtttgagatcagttcactcttgatatctcccctcsgcatggaaagcatccacaaatttccagctagagcatgaacttgcaatttggtttgcctagatcctggaagtctacagagttagaatctttcctggttctgaactcagaagcagcagtgagcagtgggactgctrggacctttaccagcaatcacccaccacrtgcaccagcttcaagcagctctgcagaagccgtccgtcaccctccccgttgcacaccttggctgtgaaccgccagggcaggggcatgtgtgggaagcaggcggcctgcagattcattattgctacaagtgaatttcataataaacaaacaaaaatgagccatctctagtttagttccctttgagcatataggccatcaggtcccaaaatgttcagagttgggttagtatctgtggctttcaccaggtaaacacatcagtgttcttcctaatttggactgttgtggcttccctrgttcttttttcccctagattgttataaaggttctgtattagttttccagggctgttataataaagtgccacaaattgggtggcttaaacaacaacaattttatcatctcatagttctggaggctagaagtctgaaatcaagatgtccagctagattggtttcttctgagggttgtgaggaaggatctgttccaggcctctctcctggacttggggatggccagcttctccctatgtctcttcacatcatcttctttctacatatgtctgccggtgtgtccaaatttccccttttcataaggacaccaatcatgttggaatrgggcctaccctaatgacataagttgatgacttctgaaaggaccctgactcagaaatatcctgaggtactgggggttaggacttcaatatatctttctggggacagggtccttgcatgctgtcagatgatacctgcatctcgcagtgatggtcaagcgtaccctactctgcttctggctatggcagtagaaattgtgtcccaggggaatggctaaggggcctgtaaacaatgggtgccatatgccattaatggctcaaacctctgccttgtctacacactcatgtatcccataaccctctgtctcctgtcaaagccttttatcaggaaaggcatagaaccacatttcacgctaaggcatgagtgttaaacataccctcacctagccagttaaaaacattgggcaaagctgtaaactacatcacaggagttcaaaatgtcaacagagctgcccccagtcctgtctgtgtttttgcttargacccagtgttgtgtcactactccccattgawaataaacaaaacatkcctcatatgttcacagttatttagagtttacagaattctctccttctatcaatttgtttgtgcctgaaggagcaggaaaggtattattttctgcattttatttcagagaaaacagaagctcagctgagtaatttgttcaagatcatccaggctgtggccggagcccacatcatccatgtctctatgtcagctgtctttccactgctccaagccacctgccctgctgccctcygtttcccctccaggtcactgttgtgcggaccatgcaacccgagtctcaaagactcacggatccccttgctgtgctctaggacccagtccyagcacctcctaacctccccaagagggcaaaaagcagcctaggtctggtgagggtggccaaggccagaggattctgttagtatgcagatcaaaggaggagcatgggcaaagtgasraggtttgtgatggagcagaacagtgtcaggaagtgatgtgaagctcagcgtggctcgtggatgttgagaagtgaggttgatgggcagggggtgctggaccacagaagaccaggtgttccaagtggggcaaagatgtggtctgtgagaggctgagagccactgaagacctgtggtttatcagagactgctgtggtggcagagtggaggcaggatgaggcagggagctgctccaggttcctgactgccggtccctgccagtgctggtacattcctcaaggcttctcagtggctttccattatttccatagaggggtcacctttagttttggggagtttatttttgagatggggtctcactctgttgcccaggctggagtgcagtggcacgaccattactcactgcagtcttgaccacctgcgttcaagtgatcctctcacttcatcctctcacgtagctgagactgtaggcgtgcaacacgatgcctggttaatttttttgtattttttgtagagatggggtttcaccatgttcccaggcttgtctcgaactcctgggctcaaacagtccacctgcctcagattcccaaagtgttgggattacaggcatgaaccactgcgtcggccaccattaggtttttaactgtttaaggcattctttttatactgaaacccagaagaagcatcctccccagcttcagtggaaagccttagagctgatggaaaaccagtttcgagttggaatgtggaggctatttctggcctttgtgacatcctgttcaactttcagaggagcctgggaagaaaggggtgactcagactataagcttatttttagggaaagctaagaattcagtcagagccactcggattccctattgcctgccatacagaatgtgctgttggtggagagattgatgggcagaaatcctatgtttatcacctgattgttacccagcacctcccatgtgccagtataaggtttactgatttgaaaagaggatggagatcaacacaaacacacttttaaatcagaggagcatatttcaaggcatttatatttaagaactaattttagggccaaagaactaatattgtaagagcttctgtgattaggtacttaatatatactactgttatggtaagtgtttagcaaatactaccgcatttaatggaaacaataatactctgttagaggaattcttatcactgttttaacagaagaggaactgttaacttgaggaggtttaacgttagcccaagaccgggtagctgagtccagattcaaactcagatctgtctggctccaaacccatgcaaatgacccctccgggtttggcaattaaacgactcacatgttgccaccctttgttcctatgtatcactaattgatcatggaattatttcttgctcagctcagatttgacctcaggatcctttcaacacaatgctacaggtagccactgctcccaactgagcaatggtagtacttgaagtagcgtctacctgtcatcttasctttatctttctctgtatttactcaaaatagaatctttaaatctacaggggtttgttgttgtttatttctacagwtgtatttgtaaccttttattgattaaacaattgtaagaaatggagtattcaatacaatttccttttatagtcactggaaactctgcgtgctttaatagaggatcctaactgccttggagggaagaatgacgtcttaggactcaaagccttgatacaggcaactggcttatgtgtcagtgtggtagtgatgagtgggagatggggaatcagcctgaagaactcaagctgtatagcagtaaaactttcaattagcccagtctggttaattacaactggatggtgagttggggttgggggatgtggtgggaaggctaaagaagcaagataacagggtagatttgggggttgcatacatacacaccttcagttgccgtgaaacatttcagctcagcagacagacctgttgtcctaaaagtatagcaccatgtggggctgtgggtccctccagggagaaaggagttccttaaaagcaaactcagacaagagaatggggaagatacccccagggatagtggtgaagggagaacctagaacccagccttgcaggaggatgaggtagaaattggtccaggaggaagtctatggacaatatctaaaactggagcatcaagaaatagtaatagaaatatgttgcttagaaaggtggattccagatgattgagctgaaatggagttggacagtcacaatgtatggaaggtagtgcaggtgcatcaccaacacagattcattcgataaaattaaaatgtttttgttttactttcaaaaaaataaatagcaaaaaagcaagctcaggccagtggtggctggtggcctgtcagcatggagcatggaccttagccacaggccagggctttaaagccaggactccaggacctgggatgggtcattctgaaagctgattatcagaatgctcaggccagagctgggccagctgcccaggtgttgatatgtgtgtgtgtgtgtgtgtgtttgtgtgtgtgtgtgaagggctgagaactgcatctactaacatactccttgtgtgatgttagggttagtgaattgacctacagtggtacttggcctgcaggaaggggataaaaatgggcatcatggtaagaagttgggccagcaagcagctctagtctcacaaagccttttcctggactaatgagagggaccatggggaggggtgatccccccaaaatcaaccagatcaagttcctgatgaatgggcaatttatgactgaccagctggacacaaaatgccattgaacaacccaaatgaacaacacttctcagtcaaaatgctgctttggagagtctgtgtatgcaaatatacctcatatattcttctcactgtgggatggagcaagaaggccctgagcgtgtttctctaaaaatgcatagcaataatcctagtcttaattttagcctcttctgggcatctgaaatggggttgctacagttaaaataatgctgtataactaacatgatattgggtattgaggtcagagcagggctggcttcatcagcacgtgatttctgtagtcacataggttccccactttgttaaatgctccatagccatattgaaattcttaataacttttggaccaggagccctgcattttcattttgccctgggccctacaaattatgtagccagcagtgggttgtcataccccagagtcccagacaccagccagacatttgctgtgttgaaattatataggggaaaaatataatttagagcataaataaacccccatactttcagcaatttaacagtctaatgcaggtattccttgccagtggacagctttcctccatgtggtttctactatttctgactctgctatctcccagggcctcagaatcctttgcctccagcctgtcaaatgagagaggatgaagaggcacactcacttcttaactgcctttgtctggaagtgacccacatcattcttctcatagtctggagaactagtcatatgaccacacctaggtgcaaagaaagctagaaaacatggtacctggctgggtggttactttccagggctgcctccatcctatgggaggaagagcgtaaatttagatggatcattagccttctctgccacatagattgttcatgaaggaatgctgatgcaaaagcaggtatctcagtgcagactactgtgatggatcaggaaaggtaggaatccgggtctttttaacacagatgccagtctcttagcctcatcagttcattattattaagatgcttgctagttccagaataggaagaaactagaatcagaatagtctgtgtttgtttgcttgcttgcttatttatttatttccaagaacaggtttttggggraaaaaaaagaaacactaacacattaaaatgtacacattaactgtaagatgcattgctatttcagtaacattataatgcgagaggaaacacaatagcatatcttagaattgaagaaatctagtaattgtcactgtgaattattggtttagtaatttttcacaaatccttttgctagcttcataaagtcctttaatagtgctcataggggatagccatgtgttggcacttggatctggtaggttctgcctgaccattttaatcaaaatgctgttaaccagggtaggcaccgcctgttgaatagcacaccttcttggtgaatttgtctcatggagcctcatttctggatgtgtcttaggcaaactaggagccctcaagatcatctagacccacgctggaaagaggtctaccttggagatgcatttatattcccccctgagatgctggtgattttgcaagtagtaataatcagagacctggaaaacttcaagagttctgtaggaaatatgtcctggtcagttctcatcagctcaacaaactgatgtggctcttgagggaaccagctgcaggaggcaggaaagcaagttagcatcaacacaagtgggccagcaccatagtcccaattctcctctttcatctgcttctcctccaccctagtagacaccttgggaagacaaggtagagacagtggcttgaaattcctagtgtcttcctttgatgggtatgtgctcctgcagagttaagggagtagatgaggttaactgtcatctaaacaaaggcagtggctgtaaatatattccttggagcttgggagccccatggctatgttccaggccagagagtccaaagaaaatcaaagactgccacctaacagcttttttggycatcctgaaagtccccaccttctcccaggtagctccagagawagacaactcccagccaggctctgacagctgaatcgaatggcccagtggtggcacattccccagagggcttcaggttcaggatgcagccaagtttcctgctttatcctgagttaagcagagatcatcacctgcctggatgttgttttgtctgtgtcacctcatcactggagaaaacagattaccatctcctgcagtttttttcacaaaacagagcatggcatggaggaaataagatagtcagcatggcatcttggtgggtcaaaaataatatcatctgtatactttgattacattttaaattcagtttgcacacaattggggttcatttaattaactctaagctgtaatctcagtctgggtttgaatggatctgaattttaatagctttttcctccaaaatattatttctatggcaaataagcagcccttccttataatgctgaaatcatakaagttagttgttttcccctcattttttgacaatcattctttttgcrgtagtaayraaatcaagcagttttcatttggctttttggtagttgaagttaatttgtcaatttcctgctagtcttctattacgtacacatttttctggttagctgacaaatcagaatgctaatgatggtggggaaaagaagactggcaaattttacttctgtgggttttaccaaaatcataattggttgatttttcctttagaccttccaggataaaggattttttatttttaataatattttcttcattctaaataagaaagtgaaatgtacaaaacagtggaaagaataaaataacttaaatgtgcctgtcatggggccttacactcaatcagtatgttaacatttttaaagaaaaataaatgcccataatctcatcaccaaacacatgtagggaatttttttggcaaagattttatatatttgtagttatgctctctataaattttgcatcaagcttttttcatttcacattttcataaataatttctcatgcygttataaactcttcataaacataattttaattggctacgtaattgttttttaggagtacatttggctgcaagtgcctgaaaacctgggaagaaacagcttaagggtttttgtttgtttttttcatggaagaagacattgagacaaggggataaggggtcattgagaccatcagagaacctcctcctgcagctctgtttttcttagtgatggtggctgcaagccaagcacagggctctcccagagaaaacagggaatcactcccatctgcagactaagccatgtgatcaccctagctcaaaaatatctgggaaggtgggctgataactttccagcctttgtagtggaggaatatgggtttcttaaaataaaatgacctgaattagaattactgtgtcaaagagcagttgatttttttccccgaaattccagtctgattgcttatttggtgaaaagcaggatttaaaaacctgtgctccatttactaccatctcatttggcactggaaacacaaatgtacaactagttataaaagtaggatcaagtccaaaacctgtggctatcwgtttcggggaggcagctgtcaatgcaagataaggaaaaaattcctcaatatttagagctgccccagtttggaattaactacttcatgggatggtgagcaacctttcccaagatgcagcgactgaatagatacttggtatataggcagaagaggtaatttacgcatttggtaaagtagaccgggtgacctgtaccacctaggcatctccatgattttaaaattaggatacatttgctaaaatatttccccaagcacccaggatatcctttgcatggtggaaccttgttctgatgttgcttcagatcaaacatagtagcctgaaatgtggctgtagtagagtagttgcctgagatgggaagaattcacctcccaggctcctgactccagggccatggaaaagctctatcttgggtttgagaccagccattacctgggtcaggcccacataccagccccatccaaggttacatatctgatttcctcactgcctgttaacatgactttattatttttcctgatgccatggatttcttcttttgtatcaacaaaatgtgcatgttccttatgtaaaaggtggtataagttctatctttgacattacccaattataaaatgcagtaaacataaaaacaattttctttttgatttatttacaaaagtggtctttccaaaacagttttactagtttaactcattttatctgaactccagcttaaagctatgaagtcatgtgtgataaataaacatgcatctgagtttatgtaattcagccaagaaatattttttgaacattttctatgttatagatatatttgtggrygctgagaatgttcatggtaaatacaagacagtctctgccctcacggagcttgcattctggtgggagactagrgaagaataatttatgaataaactattgaatatatactatgtttgtatagtttgtagtacagagacttggttgtgctggggagggggataccttcatagaatgttcaagaaaaaccttactaataagctagtgttggagctgtgataaaaaacaaagagtgagccatgtggatatctgggggaaacacacttctggtggaaggaacagcaagtgctggcctgagctgagatcatacttagtgtgttcaaaaagcaaaaggaaagcctagtgtggcaggtggggagtgggtgaaggagagtggtaggtgatgtgaccaaagaggtggtggctggggctggattatgaaggcatctatataccgtggtaaggatgttggcctttacttgacatgasatcagaatccagtggaagatttggagcacaagaattgcacaatctgacctattttttaaaaagattactctggctgatgtggtgagctgagttagtaaggaagtgggcaagcgtggaagcagggagactagttgggaggatattgtggtaattcagagggaaaagagatacatgtgggccaagctagcagcagaggagatggggaatcctggattgatgttgatagtatagttcaggggatttttctcatccagtagatctaagtggaatgtgagagagagaaaaaaaagtccagaatgtgccaaaggttttgaggtaagcaactagaaggatggagtttcactggaatgaaatggggatcaccatgggaaggcctgctgtgaagggaaaataggaattcaattctggacatgttaagttcaatttttggagatgttgatctgatacctaggtggaagtgttgagtggtcagtgtcttagcctgttagtgctgctgtaacaaaatgccatagactgggtggcttatatacaacagaaacttatttctcatagttttggaggcttggaagtccaagaccaaggcattagtaggtttggtgtctggcaagggcctgtttcccggttcatagatggaaccttctatatatatatgttcacatggtggaaggggcaaggcagctctctgggaccttttttttttttttgtctgaaagaattccaatattatgagcatgtaatataaacaaaggtagtgctttaatctattgggaaaakgatgaatgatttaatcactagcaatgacatggagggagaaaatcaatatgaaccaatggagcctcttttataaaggcactaattcaccccctgatatggtttagctatgtcccgacccaaatctcatcttgaattgtagttcccataatccccacatattgtgggaaggactatgtgggagatgactgaatcatgggggtggttacccctgtgctgctgttctcattatagtgagtgagttctcacaagatctgatgattttataaggggctttttcctgttttgctgggcactcctccttcctgccaccatatgaagaaggacatgtttgcttgcccttctgccatgattgtgaggcctccgcagccatatggaactgtgattcaattaaatgtctttcctttataaattacccagtctcaggtacgtctttattagcagtgtgwgaacaaactaatacagtaaattggtactggtagagtgaggtgctactgtaaagatacctgaaaatgtggaagcaactttggaactggtgaacagggagaggctggaacagtttggagkgctcagaagaagtcaggaagatgtgggaaagtttggaacttcctagagacttgttgaatggctttgaccaaaatgctgatagtgatatggacaataaagtccaggctgacgtggtctcagagggagatgaggagcaaaggagactcttgttatgttttagcaaagagactggtggcattttgctcctgccctagagatttgtggaactttgaacttgagagagacgattttggggcatctggcagaagaactttctaagcagcaaagtgttaaagaggtgacttgggtgctgttaaatgcattcagttttatatattcacaaatatatggtttggaattataacttatctttaaaagggaagcagagcataaaagttcaaaaaatttaaagcctgatgttgcgatagaraagaaaatctcattttctgaagagaaattcaagccagctgcagaaatttgcataagtaacaagaaagccaaatgttaatcaccaaaacaatggggaaaatatctccacggcatgtcagaggtcttcatggcagcccctccaatcacaggcccagagggcctatgaggaaaaggtgtttttttgggctgggcccagggccttgctgctttgtgcagtcttgagacttggtgccctgtgtcccagccatggctaaaagaggccaatgtagagttcaggccattgcttcagagggtgcaagccccaagccttggaggcttccacatggtgttgagcctgcaggtgcacagaagtcaagaattgaggtttgggaacctccccctggatttcagagtatgtatggaaatgcctggatgtgcaggtagaggtgtgctgcaggggtggggccctcatggagaacctctgctagggcagtgtggaaaggaaatgtgggattgtagcctccacacagtgtccccactagggcactgcctagtggagctgtgagaagaaggccattgctctccagactccagaatggtagatctactgacagctttcatcgtgcaactagaaatgccacagactttcaatgctagtccatgaaagcaactgggaggggagctttaccctgcaaagccaaaggagcagagctgcccaaggccatgggaacccacctcttgcatcagcgtgacctggatgtgagacatggagatcaaggagataattttggaactttaaggtttaatgactgtccactagattttggacttgcatggagcctgtagccccttggttttggccaatttctcccatttggaatgggtatatttacctaatgcctgtacccccattgtatctaggaaataactaacttgcttttgattttacaggttcataggtggaagggacttgccttgtctcagatgagactttggactgtggacttttgagttaatgctgaaatgagttaagactttgggggactattgggaaggcatgtttgtgctttgacatgtgaggacctgagatttgggagaggccaggagtggactgatatggtttggctgtgtccccacctaaatctcatcttgaattgtagttcccataatccctgtgtgggatcatgtgggagatgactgaatcacaggggtggttaccccatgttgctgttctcattatagtgagtgagttggttttataaggggcttgtcctctttttgctgggcacttcttcctgccrccatatgaagaaggacatgtttgcttccccttctgccaggattgtgaggcctccccagccatgtggaactgtgagtcaattaaacctctttcctttttaaattacccagtcagctatgtctttatcagcagtgggagaatgaactaatacacccccgaaggccctacctaatataatcacattgataattaggttttcaacatataaatttggctggtggtggtggggaggtcataaacattcagtccatagcatgcagataaatttaggagtctagaattcaaaagagacgtctgggctggctgtataaagatgggaatcatcaatgtttagatggtacttcaagctaggaggttggatgaaatcaccatgggagttaaggtaggtagagaagaggtctgagaatagagctctggactgttacaggagatggtgaggcactaggaaatgaaaataagaagggctggccagtgaattaggagaggactaagagaactagggacctagaatttaagaaagtatttctagaaaggggcagtgaccatccttatgaaaagctgctgatatgccacgaaatctgaggccagaggattgtccactggatttagtagcaagraggttactggtgccctgaactggagctgtttagatggagaggtggaggtgaacactgggaggtctggatttaagtgagaatgagatgaggcagcaggagtgttgactccttcaaggagttttgctgtaaagaggaatagaaaatggagtagtagatgagggagattgtgggcttggaaggggatacttttagagatatgacagtatgtttgagggctgcagagaatgatctagagcctgagaaacattgatgagggaggagagagatgagacaactgctagaaggaagcacttgagttgggaaatgaggaaggcatcgagtgcacaaatagagaggctgttcttgtgcaggagtgatagcagagcccacagaatgagtgcaggtgtgcgggagcctgtggtggcttggtctgtggrtgaaccttctgactgcttccgttttctcagtgaaatgggaagcaaggtcatcagctggcagggaggaagggggaagaggtgttggaaatttgaggagagaagagaaggtgtgaaataatcctctcagacagttcaggagtaattgatctaaggcaatgcagtcagatttctggatacctccaacggctcccctgtgattagggatcttgaatttaaataagagcagacagtagaaatcaggtcttgggtgtgtctccagtgttttcaactcaataggtgcaagtacaggtaggcaaagtattggatttaatctgagttgggcttttgccagctgagtatgacagagagagaggggtgcaagggaattgagggtgtggactgtgggtatgatgatggttattgatcatagaatctgaaagctggtcagagagggacatgaggtgggtgcggggcagtgaaggggtggtagaaagagtgctatgctttatttgacttaacaaactggactccttattataaattcaatcacatttctaatgcatggtggaaagttagtatgttaaaaaaaatagtacatttttatatgttaaatatcctatataatagtaataattatctgctgtgttgctgtttttattatattctttttctttatgtttttagagatggagtcttgctctgttgtccaggctggaatgcagtaccatgatcatagctcactgcagccttgaagtcctgggctcaagcaatcctcctgcctcagccaactaagtagctgtgactacaggtgtgtgccaccatgcctggctaattaaaaaaaattattttagagacggtggcttgctatgttgctgaagctggtctcaaactcctggcctcaagccatcctcctacctcagcctcccaaatagctgagattataggcatgagccactgtacccaggtatattgtattttcttaaagcaagtcatggtataccygaaagaaaccaaatataaggcactgtagatgaatcccagtgctgttggcagaagggacagggaggccacatgtgaaccaggggtcactggccctgccccaaaggctggacttgaatatgcagctggtgccactggctaacagagccacagtctcggtcacaataatagaactgttgacccatgaggtttctggtcataggggcagaaactgccaacagggagagggcagctggccatctgaagccaggatctgtcccatccaggaaaggagaattggcaggagttggggacatcttgccatgggtgaatactcctctgagaagggagaagggaggaggmagcttacagacagaaccatgarggagggacaacatggagcccaaagccctgctcctgagttgctgggtctggatctcggggtcagggttgtttgtgagattggagaggcagcagaagtagcccagatgaaagggaagaacctgggttggtctctttgctgggcaaactctttgcaccacagtctgggctggctcaggcattggataggagtgagcctgagggtgggggtactgacccatccagcggcacaatttgggaaaggaaggggcagaagaagcaaggcgcggctgatgaggaacatctgctctcttcccacagtgcagatggaaggcctaaatgccagcacaccgtttatttcactttggcaaaatccatgtttatttcatccctcacctcattgtctagacttaacataaatcaggacagtgcaaatggaaaccacaggtccttctcttggccttgccagctttattcttccctagggcaggtgcgcatgttgcattagtgtcataaggtggcatgagactgtaccaggccattagtcctgattctgatccagcagcatcactgccttgctccgtgatcttcccatgtttgagtcacctcatccttgatatggaaggggcagtacctgttctctcagtagcataagataavaggtagggaagtgcttgggaaaatgcaataaaagacactgctggaagccttcagcagtaggttgggttacagaggtcttggccttgcaaaatgaagtgaggtcagcacagattaagcagaccaaatcaaatctttgatggttgagtgatttttaaaaatgattgcaggtctgcacaatttaacaagactgcccatagcagctgaaaacatttccagagcagatcagataaagccaagttagaaattggtcattgctgtaaatcaagtggcagactatcaatgacctagattaccccagttttcccacaggaagtgaaaggaaaaccactgtgtggctgctgaggcttgatttgtcaagagctgagagagctacacaacattaaaagattgcccatttctcagcttgccctaatgaattgggactcatttaattcagaagccgatgagatgtctaaatcacatctatagaataagtggtcagatttaaactccagttgccaacaatctgtaacagcctctggttgcgttgttcatctcttagttaataaatgcttggctttttgctgaagctgccgctttttaatgtctaacaccatgacgtcagcatttttcccattttctgccctccctttaaggaggtagggatgagaaatggtaagaagatagggcttgttatgggtcttgacttggaagacccagagcatgggtcttgaagtagaaccttgatggctcttttctgtctgtgctgcaggtttaggggcctgcatttagactggcccataactatgggagctgctcccagccatcctagacttctcaagaagcccataactcttaggaagaactaagagcctaactcgtgttgtcctggacttttcaagaagccgataactcctaggtagaaccaggaacccaactctactcgtctgtcctacgtagggtctacaaggcagtgtaayacaccacgccctgcaccctaactgatcatagtcagcygtggtgaccacaggatggttcatccttcttgctggttcccagcatccttcttgctggttcgcatgtgctcttttggcacttatcactcccacattctggactcctggccctgcagttgactttgaccctaccttcggccctttgaatttgtgcaaataccactgctgagctgacttgactcattctccagctcccactaccgtttgcagtgaaggtttgtaatgcccttgatgagaatgaagctcccagtttcacattgggacacagtgggtaagcaaatgccacacaaaagaaggcacatagtgcacacttgtaccatcatctaacgtctgcatggttctattgcagggctatactttcttatcrgtagatacatggaaatggaaatgcacctgcttttaaatatrtacttaatgcacaagtgtcaatgatatagttttcacctgaagaaaatctagagccatcaaagtacagggcgagacatactatatgagcctgaacgattgtggcaggattctaagaatctggatgatgaatctgaagaactctgtaacaaacagatgcaaagatgccatatttagacctcagaggaagtgagcctcctgtcactgggagaatccattcattctcctgattcactcatatgcagaataagtgttgatggccttctgtgtgctagggattcaaggacagtgcagtggaaaagatgggctagtacggaggatttagaaggtggtgtgggacaataagtactctgatagagaagcatgtggtgctctcagaagtaacttgtccatgatcacaaaccagtaagtggcaatttaattttgaacacatgtatatctgacaccaagactcatctatcaaccattaagctatatcattgcataagcagttccctgtaactggattggaaggtttgagataatggtgagaatggtgagaaagaatgatggagagatggactgtcttgtatgccattttaggtagagtttggattttatcctgtgggtcatgggaatctctcaggaagtgatctagttggatatgcatttttgagagagtactccactgtagtatatgaagtaatttgaattgggagggatggggagtgggcagtaagaccactcagaggtggytatcttgatactgatccaagaatgaaatagggatagamtgacatgagagagtggctgtggagatggtgaagaaggcatggatttratagttatgtggttgaattgctggaacttggtactgattgagtaaagggtgagaggtatggagaaataaagttaatagccatgtttccagcatagacaaggggatggttgatgttgaacatggaaagagggacatattttggggaaaagtgatgagtttattttggacatgttgagatcataataccttcggaatatacatgtgagatgcctgataggaaataacatrtaggtatggaattcaggaaggagatctggttttggggacttcagtaaatctgcatcaaatagtaactttagccatggatgtgaatgaggctatccagggaaagaatgcaaaatataaggtcaacctggtgactcactgtgctgagggaagccagggaagyagaaggggagtcagggtagacagaaacaggggggtaggtgaagatgaaagaactttccaggaaggagggagtgatgcatggtgccaaatgccactgacaggcaatggtacacattctaaaaagtgtccattgaacataccaactagaaggtaactggtggccctcacaagaatggaaaagcaggttcagtgaggttgtggagtgtggagttcagctgagaggaagttggggattaaatgaagtctttgtctccctaagtggtgtggctgtgaaggaaagaagagaagtaagtcttagctagagagggcataggatttgcatggattgttttaagaagaggaagtctaaattcttaggtgaaggagttaggagaaaatagtsaaagaggtgaaatgcaggtgagtggaggataaatgatggtatggggtccctgagaggtcagggcatgatggaattcaaggtactggttattagcctttttatgtacaaacaaaaaagatattgatgttctatttatgctaagtatgggcttgtcctggggagaaagtatctttaactgaagctagagagttgacaaggaacatgtacaaagatccctggacagtgttgagagctcagataaggttggagaccacagatttgtagtgtcgttctcctacactccagggcaccttatgtaggtgtttgatcttgggaaatgagactgtgcttagctctcatttgggatttttgccagatacctggatgtagccaaaggacgaggaggcaagattgttgaggatataggaagacagtgcagtgattggaatggattgttcacatgatcttaggcgaaaagacataaaaatgaagacaggagggctatgatggactgggataagatagaggaagctggagattagaagatttgaaaagacccaagagcagaggtgtgaggacaagccagtgagagacagggaaagaggcgaggctgtggttggagtctgggccgctgcacctaaacagttccacatttagtgatgaggccagatttcagccctgagtgcagatcgttgaggagagtgaagatcaaggtcatcagagttgaggttttcaggaaactgtgggaataggrttgaatgagtcatgaacacaaacactgaagtcaccccggatgatggtgggatttcatatagctcctgtgagccaaggaatgaagtcatcagtggatgtacggaagtgaccagaagatcagctggggacagagttaaggagagagggaacaagggaacagatgagactttttccatgagggcagaggagtcatggtctggaaatgacatgaaggagaaagaaaagtgccaaacccacttcctgatcctaatgccatctggcttaagagcccatattcattgagtctgaaatgcaacggacaactaccrgtttgtctggaggcggtacaaatactcttctaatatttttttaaaaactataggatgtagtctattttcaactttattcaascagatttatttacccctaccgagttttctaaatcagtgaatcagtattttaaggaataaatcttaggcacataaaatgataggaataaaakatgtattataaagcttctttaatcaatacaagctattcttataagtctattggttaatgtctagattgccgtgcccacttaaaatgggaaaacattccagttggcactttgtggatgttgagttgctacttggacacagttactggccttttggtctgatcagaggccaattttgagctaggagtttcccatgcatatgcatgatgtcctactatctgtgatacatgctgsgcatctgagcctgcctggtatgctaatgatcagaccagggaaatgcacatcactgtgagtcacaagggtagcacgtctaatctaaaaaattcaaacccctataattagagttcagatgtcttcatagctctattcctcagatttttttgatctgaaaaacaaaagcaaacaacaaacaattgtgtaaaaatagacagtctaggcttgtgtaaatttgcagtggaaatctgcctctctgatgagccatacagtgtctatgggttgaaaaacgaaattcagaaagcaaatagttggtcaccttagagcccagagggatgctcagaattccctaacctcacagyggtgactactgaaagtttcattctgttttatgacttgacttgcagcgaggaaggtagcacagctgtaaaccagctgtattttatttacgcttggaaacagggcccctttgttccaaatgttcctggccccctccctcaatttcatggatttaggttgttagtggaaaagtagttgttgaaatatcagttcactcttggaacctgccactcaccaggacttctggcaaccagtgagcctttttgtgatatgcagcaaggtaaagaagtcgttaagtggatctcccacatgttcctctgtgacttcattcatagaaatgcgctgataactgagttacattaagcgcagtcttcccagctgtctgaggacataagggatgtagcgcctcctagtggagggaatttcttagcatgtgttcaaccccgcacatatttttggaatgaggcaaggtatttaaaaatagtgtacgctaatgaatgtatttattatatctgggtagcagcgaaacagaaaaggtataaataagcctttcgaaaaatgtacttgctacacaatctctttttttttgacaagtcagcccttgaatacaaataatcttttaatggtgaaaaaaatgactgaatcatagcatcttataaacataggagctatgggtatcaataacatggaaactgaagctgtggttatttttgagtggaagaagagggattaaaattggcgtggggcacatggagaggcttctggaagtggctagcaatttctatttatttttaactgggtggtgattacaaaggtgtttgccttataaaaattcatttagctaaacattggttttatgatgcttctgtatctgtattgataagaaggtaaaaaacataaaaacttttcattaaacatactacctgctaaatttgctttttaaggaaaaacctcaaaaatgctaagccatgtatactttttatttttagagatggagtctcactgtgttgcccaggctgaactcaaactcctgggattaagggtttctcttgagtagttgggactacgggcgtgcctggcatggttttgacactttatttcactgtactttcgaaataagacttaggtaccagtgaacacctacattgacaggcctggtaatatcattaaaacttgagcttttatgttgtctgtggcacagactctcttctttctagttcttcagagaactccaaattcagtatttcacttggaacatccagttgccatagaaatgaccatgtaggttacaagttcatttttgtaaccagtcaaaaggagaaactaagaatgacacgaaggcatctttccattggaaaaaaatcctttgcagagtcccaatttgagaaaaaatacattttgctttagaagtgagaggcgaacagatgaattagtaatgctgaaatatttgactccttcccccacaggtgaaaactcctgcagagcatcttataagaaaaattattttagagcaatataggtgatggcaaattgacattgggttgtaatattctatccaacatagtttaattctgagttattcaatcataactaaatttattcaagacatagaatacatttaaaaattcatcttaaaggaaatttcacaaaggcttttacattcgtgtaatccagatgagaaatgaagatagggggcaagcaataaagttgaaagacccaaattgattccggaaggacttgccaagtttctataatgcctcattagctgcttatgtggcagggagacctgggaagagcaataactcttttctaggttctcaggttagggaatgagattttgacgtggccaatatgatcttatatgtccatttatgtcttttaccttatcattttcttttaccttatcatggacagagtggccccccagaagcacaggatgcaagacaacacacatttcagtggctgctccttctgcatacatcattgagytstgccaagggtttgaacacacacacacgtaaataaaggcctaattatgtgtgtgtgtgtgtrtgtrtgtgtgtgtgtgtgtgtgtgtgtattatatgtattaagctctttttcctttctccatagcactgcatatacaaagatcagccaccctgagttgaaataaactgtcatgatctgtttggcattgtgagatcaccactcatcataaaataagctttttaaaatgttaaaattgaagtgagagcatgagcacaaagaaacaaggaccagaaggtgtttataatcatgaaaaattgggaacaattcaataggaaaacaggaaaatggttaaatatgatatgttcggagtatggaatatgatgcagcagttacaagtagtaaaatagatcagtatgtactgacatgaagaaaatagacttacacataccttatgtaaaggaggtgaggaaaaggaacawtggtcttttctgtattattagaatttgaatatcaaaattggattcatatattacttatataattaaaaaattaagttagtcagacttagaactctttgaaatctaatttttgaaagttaatttatgccatctggaggcaaacatgccaatgtgattgaagtttcagtggtaacctgaatcctcagtctcgttgcacatttactctgaagacattctcaaaagagaattggagaggaaatccacccagtgtgtcccctcatgtatgtctgtctgggatgctccagtggtgagatgccgtcacctcagtccattgtgttagtttattgcaatgttctagggttcagtctcagccccattcctgccaactgttagcttaaggcccttgggcaaaggagataaaattgttcagggccaacagatctcagagtttcttggaaccttaaaaggagatgacccaaacatttcttattcaagatgccaccagctccagtcactcacagtgacttgccacaggggctggtgatgttagctgcttccttggcgtctgagttctggcttgtgagcagatcttatgcccaatacatcagaaactccatgtctccttcagttgtagtcrttgggagaatccatgggttgacwggagcctaaggaaagcaccaaaaagtcactagaggcactggagtggatatgaccttttcctttgaacagcagtttgcacaacatataccggtggctttgtagatctggttttcattaccatttctgtcctggggcagccatggaagccacctggatatttcaattagtgcagcaagctggaattcatttactttagagtctactgcctgaagcttctcccagctgggcacccaactacgcccaggaacttctagatataacacagcatcctgatttcagtctaataagtagatctattttagtcttctcaatttccagtcattttgaaagtgctcccctgtccccataccaggcatgggttccattcccaacttctatcactgtcagtggaggtggcagccttgtgagctgccaggtgggaccaggtgcaacccacagcaaggccacttgatgtctcagtctgtagagtaggtgcttaataattgtctttgacgagttaatgggtgcagcacaccaacatggcgcatgtrtacatatgtaacaaacctgcacattgtacacatgtaccctagaactgaaattataatgaaacaacaacaacaacaacaacaaaataataataataattgtctttgaatggctgactgaaagcacattcatattatctagtcaaatgaatgtccaccctccactatagagcctttgtaactgagctactggggtctacctcatttcagaatccctcagagtccatggtgtatccattcatgcattcattgagcaaatattatgtacctgttctgtgttagagaatatttgaagtggtgggaatatagtggtgagaaaggcatgtttctgccttcaagacatcaccatatgaaagatactctgggatggatggagggtgttaatagaaccccagcaaattgacaaggtggctccccctgtgtcctctggctagtaagggactggtggctccatgaaacagggagctgccctgtgctgcccaaggctccagccctgcttcctcctcatctcccccctggacgtgactctgcctcatggggagcccattctcttagggatctttgtaaactgatcttcttgtgtcaaaaacatcaaatgcctcagattccattgcttataataagcactttgggaccaaaggaattttttgtaatgaaaaaaacagtttttcataagttaatgtttttcctttgagacctggatgcccttctcttattcatccactgcccatgcagctaatcagatttgaagggtaaaataataccagacttatcattgcatgttacatgagaaatgtattagttaggagtctggggttctaaggcatagagacagcatgagctagctcaaggaaaaaggggagggaattgttataagggcacaggggtgccccacagaatcgaaaacagaaatgtgactaggcctaaggaaagcgtcaaaaagtcactagattttttttctctctttcatctctcttcccatcttccccatccatctatccatccatccatccatccatccatccatccatccatctatccatccatctctctttccttctctccttcccagctcctgcctctgtatttcttcctccttttttcttccaactttcatttcaggttcaaggggtatatgtgtgcatttcttatatgggtaaattgcatgtcacggggggttggtgtacagattactttgtcacccaggtaataagcatagtacctgaaggtactttttggacctcacccttttcccaccttctaccctcaagtaagccctggtgtctgttgttcccttctttttgtccatggtatactcagtgtttagctcccacttataaatgagaacatgttgtgttggtttttggttcctgtgttagttcacttaggacaacagcctccagctctatctatgttgctgcaaaggacatgatctcattattttttatggctgtgttgtattccacggtgtatatgtaccacattgatgtccaccattgatgggcatttgggttgattccatgtctttgctgttgtgaacagtgctgtgatgaacatatgtgtgcatgtgtctttatggtagaatgatgtatattcctttgggtagatacccagaaatgggattgctgggtcgaatggtagctctgttttaagttctttgagaaatctccaaactgcttgccatagtccgcctctgtatttcttcctccacctagcttcctctgctttctggtccatgaggtcaatcaaatagggttgccccatagtgtctaagttttcatgtcaccagcccagccacatcagagagactctcgtcagatcagctatggccagaggtcatattgttccatagtggttcctggatgcagattaacttccagcgaaaagggacacattttgagcaggacagacatggccaaagctatctaatatgcccaagtctacacacacagacacatgcccaaatccctctcatggctacacatccaaccagagatggtcaaatggaccctgccctgaacccacatgggaggatatggttctgacttgagctgcaggatcccagggcttgtgttgaggtgggaacagccctggacctgagccagaatactggggctccagtcatggcttcaccattaaacaactctagagtcttaaacaagttcttagcctgtctgagtctttattttctgtataaactgggagtcacagaggcagctttcaattatttaaaggaccactttatgggagggggataggtgtgttacctgtctagtgttggaaggtgaaaccacagtggagaccacagagtggcaatttgtggctggagatacagaagaaccttctcccaatcaggctgccccaccatgttcaacctgcctgccttgcagagagttggctctycctgttactgtgggaaatccaaggggtctcagaaaacatctacagaatggagatactggcccatttcctagcaggattatctgtgtttgtctgggggtgaggggagtaaatagaagtttgagtgctacatacaaatgtgtattttttgcattgtaatcttaacaaacagaaagaagtattttgctccagtttgtatattctttcaaagcctttgaaccacactttatttttttagacaggatctcactctggcgcccaggctggggtgcggtgttgtgatcatggctcactacagcctcaacctcccccagctcaggtgatcctcctgcctcagactcccaagtatctgrgactacaggcacataccactatgcctggctgatttttgtatttttgtagagacagggtctcactgtgttgcccaggctggtctcaaactcctaggctcaagtgatcctcccatctctgcctcccaaagccctaggattacaggtgtgagccactgtgcccagctgaagcacactttttagtgtgtctgccacaagggtttccaaggccactagctggcagaaggataaggtggaaatgtaaatgacatgcccctctcttcatgaaaacaatgtcagttgttcctctcagtccycaccataacagtttctgaaattctttctcacctccttcacttatttatcctttctgctccctgctagactgctaggggtggggacaggagtgatgtctgatcaccactgcctctgtgaccataacctctgatactgtcatttcttctttccaaagtcttggctatcatttgaggagctgagacaataggatagttctgctttcacagagcatattagcaaataccctgtgtgaggccctaatgacatatttggccctttccatctttggggctgtaatattccctacagatggaccctttggttaagtctccttatgttgcttttagttttcatcaatctctggttggtttttagaactactaaatggagccattaggtcattcaaaaacaggcagatgtatgtatgtttgtgagccatgatagggatccagaaatatttacataattttcatctattaagagatttaacagctgtgtytgccatgtagttactttaaaatataaaatgcaaggtcagatctcttggggatactgttttgtttttcttttcttatgattgctgttaacgatgtcatgtttaagtaaggaaagaaggttttgatattcctctaagagttaccagcmtgtggaggagttgtgctccaagaggatcgaaggcttagaattcaaatgtaaaagtgtttaccttcttaggccagtcatctgatcaacacgtaatgtagctgaattagtacacatttccaaagaatttacgaaacaagacaccttgcaaaactagcagtcaaataaaacagaactctaaaattgaatttaaagtacagttttgtctggctagccatatgtagaaagctgaaactggatcccytccttacaccttatacaaaaattaattcaagatggattaaagacttaaatgttagacctaaaaccataaaaaccctagaagaaaacctaggcaatatctcattcaggacataggcatgggcaaggacttcatgtctaaaacaccaaaagcaatggcaacaaaagccaaaattgacaaatgggatctaattaaactaaagagcttctgcacagcaaaagaaactactrtcagagtgaacaggcagcttacagaatgggagaaaatttttgcagcctactcatctgacgaagggctaatatccagaatctacaaagaactcaaacaaatttacaagaaaataacaaacaacccaatcaacaagtgggcgaaggatatgaacagacacttctcaaaagaagacatttatgctgccaaaagacacatgaaaaaatgctcatcatcactggccatcagagaaatgcaaatcaaaaccacaatgagataccatctcacaccagttagaatggcagtcattaaaaagtcagggaacaacaggtgctggagaggatgtgaagaaataggaacacttttacactgttggtgggactgtaaattagttcaaccattgtggaagacagtgtggcgattcctcagggatctagaactagaaataccatttgacccagccatcccattactgggtatatacacaaaggtttataaatcatgctgctataaagacacatgcacacgtatgtttattgtgacactattcacaataggaaagacttggaaccaacccaaatgtccaacaatgatagactggattaagaaaatgtggcacatatgcacaatggaatactatgcagccataaaaaaggatgggttcatgtcctttgtagggacatggatgaagctggaagccatcattctcagcaaactatcgcmaggacaaaaaaccaaacaccacatgttctcactcataggtgggaattgaacaatgagaacacagggacacaggaaggggaacatcacacaccggggcctgttgtgggggtgggggtaggggggagggatagcattaggagatatacctaatgtaaatgatgagttaatgggtgcagcacaccaacatggcacatgtatacatatgtaacaaacctgcacgttgtgcacatgtaccctaaaacttaaagtataataaaaataaataaataaataaataaaatacagttttgttttgtatcatgaatattgttgctacttgggaaaaacatgtttaatcaggcactaaaggggcagctgaagtgtttgatggtgattctcaaagggattcttggacccctcaagagttttagaagatagtgatgctagtattttattatgtataattatactgtaaaatacatttttgatacattataattacttctgtttatgacttaggtagtttttgccttgcaaaagggagatagggaaagaaagtttacttaaataattggaagcaaagggggaatgaggagaaagctaatgaagatgtgaatatttgtgaggaaaattgcctgtaagtgtgaatagggtgtgaatggagagtggatgtgtctggcagcacctcttcttattcttatcatcttactggggtgattgaagttgcaaacacatggcccttcacttcttttgtaaacggacataattgatccaacacagcatgattgctttctagtgcagcaattttcagaatactgccttctcaaagatrtggttctcctgattgattatgaaatgagataaaaatataagtccttggtttaataagtgatgaacaagcccataaaatactaggtttttacttttgctagagtaatctactaagtgagttattaagggcctttctgaactcaagttagtgtgtcaccatagactctaattagtctgaggactctaattagttctgctaaaaagtctcactgctattcggtgacaaagctcctataatgtggcatgcatgtagrcagttgtagtttccaaaaaagaaagaagtaggtggagcataggatgctcaaagtagacaatgatcaaagacttttgagagtcatcagtctaggaaagttattctcaaccctggctgggtatcagaattgtctgtagtgcttctaagaattatgagttatggccagacgcggtggctcatgmctgtaatcccagcactttgggaggccaaggcgggtggattacaaggagtttgagagcagcctccccaatatggtgaaaccccttccctactcaaaatacaaaaattagccaggcatggtggggtatgcctgtagtcccagctactcaggaggctgaggcagaaaaatcgcttgaacctgggaggcagaggttgcagtgagccgggatcgcaccactgcactccagcctgggcgacagagtgagactccgtctaaaaaaagaaaaaaaattatgagttgctggactgcatgatgatctactgaatgagaatccattctccccccagtaaacttttcctttatctcctttatctcattggcaggcactcattcacaggtccactcaagacagtcacggacaaaaggaaacaggattgtgaggatttagccccatggggctagagcactgctactgaaaaaaaaccaccctaactatatttgcagctttacggtgtgtaaaacttcagtttaaaaacaaaagggaraaaaggtctctgccttcaaagattataagctattcattcaaaaagaccaaacattgtaagaaataactggataattaatccataaagggcaagagaagtagagccagcttttattgagtacctgcctacctgtgtgctgtgtgctgtgtgctgggtgagtactttatatatgtcacttcctttaatcctcattttaatcttcagaggtcagtagtgtcactggcattctacagattaaaatactgtagttgagggaatttaggggatttgaattgcatttcctctctagaatggggtgagacagaagtggtgtccttctttcaggcatctaggkttgtttctttggggtgtgtatgtgtgtatgtttccatgtgtgtggcagcttaccaggctatgtcccaattaataaggagatgtatcatcctcattccagtttttcaaatgtgacttgaccaaaatgcattctattcctattctttgagtttatatgccagaaatggagtgggcatgtgtgtcttctcaggactaatccatgcatgaagctctttgaatcagcacaatattgtacagcctagttgcgttctgttcatcaagcatcggtcgatgatttattgacaatgcaaacaagtggtctgttcatgtgagttcatgatgatttgtgagtgcttcctgcccatctgctctctcattttaagtgtgctctgtaatataaaaatgatagtcatacaataattctattggggtagatctgtaccactacccagagatatttgtttgacttttactattattttacaaaatgggaatttctttcacaaagaagatgagttcattgtactttggctttttgtaagagaaagtgaatgttgtgacactgacatgaataaatgaattcatgttttctgatcccgtggaaaggaaagaatagaataatatcagcacgtggatctcataatgaaaggggagtaaagtgagtcttcagaaacagacttaaaataagctcaattcattgtaattagaaaatggatcttgaaagggccttgccaaaaggcgatgatgtgatgttggggtgtagaagttttttgacagtggactcttttatcacagaatgtgaggtgaggcagaggaaatatgattcatgttatagtgctttagttattgattacataggagtttgctttctccagctcttgttcatagctgctaactggcatacagaggaaatattgtttacttatttaaataatttttaagatagtgaaaattctgtatgtttggttaaattatacttggttgtttgcataggctgtctctccctgagacgctcacctcacttctctatgggtcagcgaaacacataccctgtgkaatcacctcccctataaaaccccatggcaacctcttccaacarttcatcctttgcattccatccaagtatgtcttgttatatccatagcatttagtgcatttattatttcctctcctgctttcctctactagattttgagagccttaaggactagagagtgactgattcatccttgtttccccagcaccctggagcaaagagcccagcacatagtagttgcttgtggtgaatgtaattcagggtgtcttaggactatcctgctcattatgaatagaggataaaaacagatttctaagttctccatctgccataaaattmtgggaagaaaaaatatgaagtattcctttctgcacacacagaagtcttccattttgcaattttctatctagtctgctgtcctttctctctcttctttatcagggctacacatcctctctcctggccagagcgtcatttgaggcgtgcttatgcagttctcattgtcttcaattaaggtttgggactgagattaccagcttggcttggtaaccctgttcacttattaaaaaatcagtcgatccttcatttttatgaaaagatgcaatgcaaaataaccttgatttagaatttaatgaggctgacatttaacctgagttcagttaggaagacaaacraaaaacacagacaaagttgagagaaggaaaataattacctacttgaatagtgtgggcaattctccatccatatgccccaggagaatatgaggtgggagatgcatgaattacctgaaatttcttttagcctctgtttatgattttagtctttcaagatgcaggtatgtttttcaggccttgtggtccccaaacacaaggaaactttctttatctgatggtcaaaagaagtgacgacctagtccttagtaggagaaaaatgtgcctgcatggactctttgtgagacagtgttgttggatactttatgaacattttaagggattctcatgagtaattttgattatagacgatttttactttatkcattgactaggaaccaaatgcaactttcttagaragacacaaaattcattgtccaaatagaccatagggtcagcaggctttgtaaacatgttttgtatgtgcctaggggttgagagcaggggcgggagagrttctggtccgttcatcaaaccaggggctggtgttaatgtttgatcaacaaaacacatgtaggcctaggctcygatctaggtccaactgccaacatagccttttcrtgcctgcctttcctacttcaggtagagagaggagaaaaaacctattgaggaaaaaagaaagaataatattagcccaagcagtggttctactcacttaaggagaatggagtatgtttatttaattttaactgaaaagtcctggccaatatttctaagsctggcttgggataacagaatgaatggccttgggggagagggaggagaaagaagatgactgattttagtgtctgctttatggtgtgtgctgtttaatcctcatgacaatcctaagtggaaggaagaactccccatgttaccagtgacgcagcggaagcccaggtgctactgaaggtcacgcagtcagcattgacraagtctacactagaatccaggcctgacacaacccaaagtctgtattttttccctctgcagtctcttaaaattggcaaaaggtaaaccttcatgcgaccctagatttgattggaacagcagatttaggggtcatgcaacaggagaatgagtggattataagtttttgagtccccagatctttggggagaaaacccaattctgttgaagtaggagctgttcaattggaggtgagatttttagtagggatttctaatgcattcttttttcccattgatggttgttaatacttcccctacacacmcacacacacacacacacacacacacacacacaagcataaatagggcacacgtattctcccatgtaagggctgctgtcccttctccctcccacttatagcratgtgtgcctctctgtagctgaaggttgccttgtattaggacactgactgatgagtactccccaccagggtccggagagtgtgcttcattcacctttcagcctctcacagttctggcacaggggagataaagatgttgatggtttgaggtgctttttggtaaataacataggcaaacacttgacacccctaggctaccacctgtcctgttgtgtggatacctattcagtgaagccagataacttttacaaatcacaatgaatacatcctcagcagagccagttgcctgagggaggttactgaatcttctgggagtcgtttgcaggcctttagacactgggctcctttctggaccatgcccaaactagtgacagatgcagtcagagtagcagaataaggaagtctaaagtcacccaagcctcttagttcttgataattgacatgtccagcatttcttgaccatcagtagaaaatactaaactttacagtacataaaataatcaattcattcctctgatggggcaactatttaagtcagtatggaactctatctttctgattgctgcattagtccctttttttttgtttattttgcttcttagtagaaaagaaaaatctaaaagattctcattttaagtgacttgagctatcagttaaattttaaaagccaattattttgaagcagtagagccttacraattctaaagtcacacactggaagccaaactatctagagtataaatatttccttttgagggggatactgacagattcttctattttatcccaattccagttcctgacctccactcacagacagggaggcaaggggaaggctcactaattggcaaggctggacaagcataaaggattcagtgcataaagaatcaagcttctgatcctctcaagaggtcacacgcagagtgtctatgtgctggacagctttggctgtacacaccagaagtgttccaggcgtaaggtttttggcaagtctcgttgcctacgttcaagtcctctctgagtcgcttactagtgtgtaaacatagctgagatatataatgtttctaagcctcagtttcactgtctgtaaaatggcaatgacaataactgtacccacctcacaaggatgctgtgttgtgaggtgtgaacgagccatttgtgtcagaacatagcacagtgctgggctcacactaagcattccattcatgtcagctactagctctttggaacttttcaactttggtccctagggctacattaaccctctttcctgccagacaataatctgaggttggttgctgctttcagaagaaacagtgtttgaaagytaagaaaaatgtacctagaaatctaatttctaatttcattgtcatgccttaacagaacacccagatgccttaaaagacttttacaaaatgcaaatttctgatccagaaaacttctcagccatagtgccaaagaacattatcagacccaattccctatatcccaacaaaaccactccccagtcacagattatccgacacaatttcattggggttctcaaatggcaagagtttgtttaaaatgcaaatctctgagccccaccctcagagaggccagcggggcagtggaatatgcactgaacacttcgggcactaactcrtgtgccaatggttgcacttggacatatactactctaggcctttgggctcctttcgtccctgcagcaccttctgtcctcaagacaggggctctcttgttttcctcatgcragagctgttgcccagctagtccatcccactgaggacaaactctgactcaccttttaagatgtagttctctggctaggcacagtggctcacacctgtaatcccagcactttgggaggccgaggcaggtggatcacgaggtcaggagtttgagaccagcctgaccaacatggtgaaaccctgtctctactaaaaatacaaaaattatctgggtgtggtggcacacacctgtaatctcagctactcaggaggctgaggcaggagaattgcttgaacctgggaggcggaagttgcagtaagccgggatcacgccactgcactccagcctgggcgacagagtgagcctctttctcaaaaacaaaaaagaaaaaataaaacatgaagttcccaaccatgtgctgtgtagtgagcaccatggtggccctgcagtgtacaaaggtgaattggccatggtgtgtgttggcatggagctcccagtccagctaagaatacccttcagggccaagctgactccaccctgtttcctgaggcccagtcagcggtcccagcttctggtctgtgggctcacctagtttaaagacccccttgagcctcaaaggatgttcgaagcatgattcagttggggagttattggtcaacatggtgggacaattcttcactgtgtgggactgccctmaacagtacagggtacttagcatgtctgccctcccaatgctgagtaccagtggtgctccacagtcactgtgacaatcaagaaaagtaatgattgccacatgtttctgaatacccctgacctctggggaataatactgccccaagttgagagcctctgtccggtttaggtctttctcctcagtccatacctctgctacctccttaagggaccagttccctccaaggggcatgctttcttagaaaagtcatttgatggccgggcacagtggctcacgcctataaacccaggacttcgggaggccaaggcgggcagatcacctgaggtcagaagttcgagaccagtctgaccaacatggtgaaaccccgtctctactaaaaaaataaaaattagcaggacatagtggcatgcacctgtaatctcagctacttggcaggctgaaacacaggaatcgcttgaacctgggaggtggatgttgcagtgagccaagatcacaccactgcattccagcctgggtgacagagcgagactccatttcaaacaaaacaaaacaaaacagaaaagaatgtcatttgacagtgtacaaagtttatatattttaacatacaaatgaagttgacatggtatcaaccaaagggaaagaagggccattttgtaacaggcagaaaccagttgggatttaagaagcattttaattacccttactttttttctataaaggaaaatacttttatttctttcactgatgtgccggtgagagtcttagcaggcttgcctttgtaggtaaatatgatggcacttcccaatcatcatgtattgggatgtgaagttgtgtggagtctgaggctgacccctggtagtgtgaggaccttgggggattgccttggaaaatasagggtccagcccaaggctctggctttcagggtcgggggttgagatgaatttgtcacagctccrcctgagctcaccacactgggaagtcaaacagaggcaacagcttctgtttgctaagtgttaccacatgctaggcactgtgttgagtatggtgaaggacctcttaaatcttcagaacaaccgacgtttcagcattttacagctgcaaaaactgagtcttagcaaacatggtcttagagccacgagaatggacctgggacttaaatcccaagtctagagcctggacttgaccacagcagcatccagcttctcacccatctttcgctcaattcatccctttaatcatttattttaggattcagtttgattcccccaatctcaaaactttcaaggatgaacaatacttctcacacaaacacaccttctaccgaatgccaggaggggtctgcacttagattcctcagctgtcacagtgccattgagtctgaggctgcctgactgcttggttgtggttttttgacacctggcatttgtgtttaacagccccagtggttgagaagcagaggggacccacactggcagaggtggagggaaagaggagagggtgtagggaaagaggagagggtgtagggaaagaggggagggtgtagggaaagaggagagggtttagggaaagaggagagggtgtaagggaagaggagagggtggagaggtagaggggagggtgggggaaagaggggagggtggagagatggagaggagggtggagggatagaggaaagggtggagggatagaggggaaggtggagggaaagaagagagggtgggggcggttccaagatggccgaataggaacagctccagtctacagctcccagcgtgagcaacacagaagatgggtgatttctgcatttccaactgaggtactgggttcatctcattggggcttgtcrgacagtgggtgcaggacagggggtgcagcacattgagcattagccaaagcagggcgaggcatcgcctcacccaggaagcgcaaggggtcagggaattccctttcctagccaagggaatctgtgacagacagcacctggaaaatcgggtcactcccaccctaatactacgcttttccaatggtcttagcaaaaggcacaccaggagattatatcctgcgcctggctcagagggtaccacgcccatggagccttgctcattgctagcacagcagtctgagatcaaactgcaaggcagcagcaaggcttggtgaggggtgcctgccattgctgaggcttgagtaggtaaacaaagtggccgggaagctcraactgggtggagcccaccgcagctcaaggaggcctgcctgcctcagtagactccatctctgggggcagggcatagctgaacaaaaggcagcagaaacctctgcagacttaaatgtccctgtctgacagctttgaagagagtagtggttctcccagcatggagtttgagatctgagaacggtcagtctgcctcctcaagtgggtccctgatccccgagtagcctaactgggaggcatcccccagtaggggcagactgacacctcacatggccggrtacccctctgagatgaagcttccagaggaatgatcaggcagcaacatttgctgttcagcagtattcactgttctgcagcctcsgctgctgatacccaggcaaacagggtctggaatggacctccagcaaactccaacagacctgcagctgagggtcctgactgttaaaaggaaaactaacaaacagaaaggacatcgacaccaaaaccacatctgtacgtcaccatcatcaaagaccagaggtagataaaaccacaaagatggggaaaaaacagagcagaaaacctgaaaattctaaaaatcagagtgcccctcctccaccaaaggaatgcagctccttgccagcaatggaacaaagctggacagagaatgactttgatgagttgagagaagaaggcttcagatgatcaaacttctccgagctaaaggaggaagttcaaacccatcgcaaagaagctaaaacccttgaaaaaagattagacaaatggctaactagaataaccagtgtagagaagtccttaaatgacctgatggagctgaaaaccatggcatgagaactacgtggcgaatgcccaagcctcagtagctgattcgatcaactggaagaaagggtatcagtgatggaagatcgaatgaatgaaatgaagtgagaagagaagtttagagaaaaaagagtaaaaagaaatgaacaaagcctccaaggaatgtgcgactatgtgaaaaaaacaaatctacgtctgattggtgtacctgaaagtgacggggagaatggaaccaaattggaaaacactctgcaggatattatccaggagaacttccccaacatagcaatgcaggccaacattcaaattcaggaaatacagagaacgccacaaagatactcctcgagaagagcaactccaagacacataattgtcagattcaccaaagttgaaatgaaggaaaaaatgttaagggcagccagagaaaaggtcaggttacccacaaagggaagcccatcagactaacagtggatctctctgcagaaactctacaagccagaagagagtgggggccaatattcaacattcttaaagaaaagaattttcaatgcagaatttcatatccagccaaactaagcttcattagtgaaggagaaataaaatcctttacagagaagcaaatgatgagagattttgtcaccaccaggcctgccctaaaagagctcctgaaggaagcactaaacatggaaaggaagaaccagtaccagccactgcaaaaacatgccaaattgtaaagaccatcgaggctagaaagaaactgcatcaactaacgagcaaaataaccagctaacatcataatgacaggatcaaattcacacatcataatattaaccttaaatgtaaatgggctaaatgctccaagtaaaagacacagactggcaaattagataaagagtcaagacctatcagtgtgctgtattcaggagacccatctcatatgcagagacacacataggctcaaaataaagggatgggggaagatctaccaaggaaatggaaaacaaaaaaaggcaggggttgcaatcctagcctctgataaaacagactttaaaccaacaaaaatcaaaagagacaaagaaggccattacataatggtaaagggatcaattcaacaagaagagctaactatcctaaatatatatgcacccaatacaggagcacccagattcataaaacaagtccttagagacctacgaagagacttagactcccacacaataataatgggagactttaacaccccactatcaacattagacagataacgagacagaaagttagcaaggatatccaggacttgaactcagctctgcaccaagcrgacctaatagacatytacagaactctccaccccaaatcaacagaatatacattattctcagcaccacatcacacttatttcaaacttgaccacatggttggaagtaaagcactcctcagcaaatgtaaaagaatagaaattataacaaactgtctctcagaccacagtgcaatcaaactagaactcaagattaagaaactcactcaaaactgcacaactacatggaaactgaacaacctgctcctgaatgactactgggtacataatgaaatgaaggcagaagtaaagatgttctttgaaaccaatgagaacaaagacacaacataccagaatctccgggacatatttaaagcagtgtgtagagggaaatttatagcactaaatgcccacaagagaaagcaggaaagatctcaaattgacaccctaacatcacaattaaaagaactagagaagcaagagcaaacacattcaaaagctagcagaaggcaagaaataactaagatcagagcagaactgaaggaaatggagacataaaaaacccttcaaaaaatcaatgaatccaggagctggttttttgaaaagatcaacaaaattgatagaccactagcaagactaataaagaagaaaagagagaagaatcaaatagacgcaacaaaattgataaagggkatgtcaccaccaatcccacagaaatacaaactaccatcagagaatactataaacacctctacacaaataaactagaaaatctagaagaaatggataaattcctaggcacatacacccttccaagacacatacacccttccaggaagaagttgaatccctgaatagaccaataacaggctctgaaattaaggcaataattaatagcctaccaaccaaaaaaagtccaggaccagacggattcacagccaaattctaccagtggtacaaggaggagctggtaccattccttctgaaacgattccaatgaataggaaaagagggaatccttcctaactcattttatgaggccagcatcatcctgataccaaagcttggcagagacacaacaaaaaaagagaattttagaccaatatccctgatgaacatcgatgcaaaaatcctcaataaaataccggcaaactgaatccagcagcatatcaaaaagcttatccaccatgatcaagtgggcttcatccctgggattcaaggctggttcaacatatgtaaatcaataaacgtaatccagcatataaacagaaccaaagacaaaaaccacatgattatctcaatagatgcagaaaaggcctttgacaaaattcaacagcccttcatgcgaaaaacactaaataaattagatattgatgggacgtatctcaaaataataagggctatttatgacaaacccacagccaatatcatactgaatgggcaaaaactggaagcattccctttgaaaactggcacaagacagggatgccctctctcaccactcctattcaacatagtgttggaagttctggccagggcagtcaggcaggagaaagaaataaagggtattcaattaggaaaagaggaagtcaaattgtccctgtttgcagatgacatgattgtacatttagaaaaccccaaatctccttaagctgataagcaacttcagcaaagtctcaggatacaaaatcagtgtgcaaaattcacaagcattcttatacaccaataacagagagccaaatcatgagtgaactcccattcacaattgcttcaaagagaataaaatacctaagaatccaacttacaagggatgtgaaggacctcttcaaggagagctacaaaccactgctcaacgaaatagaagaggacacaaacaaatggaagaatattccatgctcatggataggaaaaatcaatatcgtgaaaatggtcatactacccaaagtaatttatagattcaatgccatccccatcaagctaccaatgactttcttcatagaattggaaaaaactattttaaagttcatatggaaccaaaaaagagcccgcattgccaagtcaatcttaagccaaaagaacaaaggtggaggcatcacgctacctgacttcaaactatactacaaggctatagtaaccaaaacagcaatggtactggtaccaaaacagagatatagaccaatggaacagaacagagccctcagaaataataccacacatatgcaaccatctgatctttgacaaacctgacaaaaacaagaaatggggaaaggattccctatttaataaatgatgctgggaaaactggctagccatatgtagaaagctgaaactggatcccttccttacaccttatacaaaaattaattcaagatggattaaagacgtaaatggtagacctaaaaccataaaaaaccctagaagaaaacctaggcagtaccattcagcacataggcatgggcaaggacttcatgtctaaaacaccaaaagcaatggcaacaraagccaaaattgacaaatgggatctaattaaactcaagagcttctgcacagcaaaagaaactaccatcagagtgaacaggcaacctacagaatgggagaacatttttgcaatctgctcatctgacaaagggctaatatccagaatctacaaagaactcaaataaatttacaagaaaaaaacaaacaacccaatcaacacgtgggcaaaggatatgaacagacacttctcaaaagaagacatttatgcagccaaaagacacatgaaaaaatgctcatcatcactggccatcagagaaatgcagatcaaaaccacaatgagataccatctcataccagttagaatggcgatcattaaaaagtcaggagacaacaggtgctggagaggatgtggagaaataggaacacttttacactgttggtgggatgtaaactagttcaaccattgtggaagacagtgtggcgatagctcagggatctagaactagaaataccatttgacccagccatcccattactgggtatatacccaaaggattataaattatgctgctacaaagacacatgcacaggtatgtttgttgtgacactattcacaatagcaaagacttggaaccaacccaaagtccatcaatgatagactggattaagaaaatgtggcagatatacaccatggaatactatgctgccataaaaaakgatgagttcatgtcctttgtagggacatggatgaagctggaaaccatcattctcagcaaactatcgcagggacaaaaaaccaaacaccgcatgttctcactcataggtgggaattgaacaatgagaacacttggacacaggaaggggaacatcatacactggggcctgttgtggggtgggggtaggggggagggatagcattaggagatatacctaatgtaaatgatgagttaatgggtgcagcacaccaacatggcacatgtatacctatgtagcaaacctgcacgttgtgcacatgtaccctagnnnnnnnnnnnnnnnnnnnnnnnnnnnnnnnnnnnnnnnnnnnnnnnnnnnnnnnnnnnnnnnnnnnnnnnnnnnnnnnnnnnnnnnnnnnnnnnnnnnnnnnnnnnnnnnnnnnnnnnnnnnnnnnnnnnnnnnnnnnnnnnnnnnnnnnnnnnnnnnnnnnnnnnnnnnnnnnnnnnnnnnnnnnnnnnnnnnnnnnnnnnnnnnnnnnnnnnnnnnnnnnnnnnnnnnnnnnnnnnnnnnnnnnnnnnnnnnnnnnnnnnnnnnnnnnnnnnnnnnnnnnnnnnnnnnnnnnnnnnnnnnnnnnnnnnnnnnnnnnnnnnnnnnnnnnnnnnnnnnnnnnnnnnnnnnnnnnnnnnnnnnnnnnnnnnnnnnnnnnnnnnnnnnnnnnnnnnnnnnnnnnnnnnnnnnnnnnnnnnnnnnnnnnnnaaagaaaaaaaaatgagggggatggaggggaagttggagggatagaggggaggtgggaaaaaaagaggcctggagctggtgttaggaggccagggtctaaaccccacttgaaaacctacctggtggatgacatgcacagactctctgggcctcagtttcccattcacatataagatggggaggcctttatccacttccctaagagggttgttgtgacaattcagagcagtgttagagtccaaagtcgggtgaatgcccctggggagtgtacaggaccatcctttatagtgtgagtagaaagtcttagcatttttattttttactcaacaagaaattaggctttacaaatatttgatgtatggatggaccatgacatccacaatcagctgcgtgttctgggcatgtcctcaaagaaagaagggactttgcaaacgggaaggggttgggagctctatcctcattcattcccttgcagcctttgtgatgttkgattgcaatttgccacttctggtgaggcgggtacgcagaatacattatccagcttaaactcaacaaaccctgtttcaacaaactgaagaagtggcttaaaaagttttcatgaattaaaagctaattaaaatctataatgaacaatatccacataaaccaaaaaatggcagagttaacacttcactgggaagaagtttttgttgtcgtcgttgttgaatcagccccagtaagatgtgaaaaaaaaaacagactaatgatatctgacaagaagtcggcccaagaagttcaaaattatcaaggtcaggtgcagtggctcatgcttgtaatcccagctctttgggaggccaaggtgggaggatcacttgaggccaggaatttgcaaccagcctgggcaatatagtgagattccatctctactaaaaatcaaacagttcggtggctcacgcctgtaatcccagcactttgggaggccaatgagggcggatcacctgargtcgggagttcgagaccagaccgaccaacgtggagaaaccccatctctactaaaaatacaaaatttgccgggcgtggtggcgcatgcttgtaatcccagctactcaggaggctgaggcaggagactcgcttgaacccgggaggtggaggttgcggtgagccgagatcgcgccattgcactccagcctgggcaacaggaatgaaactcggtctcaaaaaaaaaaaaaaaaaaaaaaaaatcgaacaattagctggrtgcttgtagtctcagctactcaggaggctaaagaggatcacctgagcccaggactttggtgctgcagtgagctatgatggcactaccgcactctaacctgggccacagagtgagcccctgtctcaaaaaaaaaaaaaaaaaaaaaaagaagaagactttttgaattaaagaaagatttacatctcctctcattaatagcactattgatttttatttgatttaacacattatttcattgttattacaaattatgtgttttaaatgcctattttgatgyataattctataatgtacacttagttcagtagtacatgtgtattacttgtatttatcatgtgtgaatatatatatatacacacatggtatgtgctcaaaatattttacagattagagtatgtgaaaaaaatttgaagaccactctgcataataaatgtgcaggggctgrcccatgagacatgttcagtaaatgcttgtttccatcctctttctccctggaaataaagtcgatagtgtgtgtgtggaccttgcttattaaaggaaagtggctgatttgatttctggaacaaggtgcatctcaaactagctggcagcactacctcggcctggccccatcccagctgttcacaccgagttccagacatttgtaggagcccggacgaggccagctggctgcctatcagtggccttcttctgtcagcactacacagttgtcacggctcacatccaaccgccagacagccaagaaggagacgccaagatttaaatctgcagttcctgacctccgcaaccacacccgattctttggttggtcctagacaaaaacaacggttttgcagatttgggttctctttctcaaactgccttttgatgatttatttgtgagatatgattgctcctcttgcaaatcagagctggttgcagtagctaactaacatttattgagcgagtagtatacccaggcttcagctaagtgctttctggaattatttaattttcacagcaaccatgtagagtaagttctgccactggcaccactttacagataagcgaatggagacttagaaaggttaagtaattttactagaggaacataaactaacagtgaaagtgagaaatctcagagtctcattggtctgacagctatgtaaggaactgaggggatgtaccattgcaaatcgtcaaaatggaaataccccaratgcaatgcaggactctggatgcgattctggaacaaagaaagaacacttgtgggggaaaaaaaatagtgcaacccagagtctttatttaacagtattgtatcaatgttaatttcttagttttgacaaatgcatcctggttatgtaagatgttaggattatgggaagctgggtaatgratagatggagagtttctgcactatgtctgtactgtttttgtaaatgtacaatgattccaaaataaaaggtgtatttaagaaacagaaatgccaagtgtatatgtgtgagtacacacgtgctckcacatgtgcatgtgtacagttgtgcatatgtaagtctttgtgcatatgtaagtgccccttgctgcacaccccctgctgttctgtgtgtgctgctccactcaagcccctgggacttacatggatgtcagcgagaaggaagcctacacaactcacatgtgacatgcccgccatgctctcgtcatacctcacctgtgctgtagaacccctgggtcacaggtggcagtcttgttcccccataacaaatgccagaaaatgatgtgtgtgtgtgtgtgtgtgtgtgtgtgtgtgtgcatgtgcacacacgcatgcacgcacacacgctctggtaggggggtttcaggaagtcattcgtgaagatgcagtgtagcatccagaataaaataaccaatttacaccttaaacactcttctccagtaaggccactacagctgcctctgcttactaagtgcatttgaagagtcctctgctttatccgtactctatcctcctgaaaagaggcactgacctgaaagggaagcccaggagcttctaggcccagacttttgctttgtttctcaccatgtgctgtgtcaaaactgagagaatattttgatcaccttttagctaagagctatctcctgggcagcagcttaaggctagagtaaggacatttcacagtttaagagagagcagtcactccgccaaatggctctgaggtggccacaaagtgcttgacttgcaaaaaattgctccattaactagattcagggattttcaggatttatgggctaggctgtgctaatattactgtggtgcttctcagtataattgctagaggcctccagtgagcagaggaattgtgtgttcagtctgtcctgggtgacccttactgcgtagtcctagggagacaaagaaaacccactcaatccaggaggctacagaaatgatgtttgtggagatctcagtgggtatctaatctgtaacctcagggggagaactctagctggtctcagtctttgctggaaacagaacttactggatgtgtgtgtttactcactcattcatttatttgtttatttatttactgtgacagggtcttgctatgttatccaggctattcttgaactcctgagctcaagtgatcctcccacctcatcttccaaagtagctgagattacaggtgcatgctaccacacccagccatcattcatttacttattgagtgtctaccatgcaccagatgcccaggttaagcataaaggatatagagcaggacaatcaaaaagtctcagattcagaaggaggagatggataaaaaccagcaagatctaaagtagataatttgattatgataagcacaaataagcagagaatacattgatgtgatacagagggccatgtggggggcagtgtgattcctttagattgggtgaatcagggtgatggcttttcagttgacattggaagaatgaggaggaaggaggaagaagtggcagccgggtaggacagcaggtcttctctgtcccccsagttcttctgatgtcctgcacagaaacctgaggggtagagtagcaaaggagaaatccaagctcaggctgggaaagaagctcatggcaccaaggttagggcttgtgataacagggacctgcttcaagagaaagggaggtgggtggcaccattggtctcatggctgccacccacataattctaaaggtctcccaatgggagaacagccaccctggtaagtgtccagcatcatacaaggagtctctgcccattgtgrctcttgcttgagcccccacacttagccctcaccaagctgtgtgatttaggattcaggtgttagaacggagaaggcaccaggcctactgcaccatatcaatgaagcctttgctttggggaaaacagagctgggtacaaataccagtgccacccattcttccctccatgctctggacattcaacccatctgagccttaatcccttcatctgcaaagtaaggaccatgcagtcttcctggtagtgttgtaaggctcagatagaataaccagacagttccaggtgcatatggcactcagtgagaatccacttgctttatcctccctcactcccttccttcctccaggaataaagagtacactagttgaagaatatttctttgccttccttctttagcagctccaatcccagcctaacagcacaatgagcatcagatgtgcttttttgatgtttgaaatttatagtctctgttgaatgttggccaggacagcacttcgtcatttgaacaatttccattttccacaagctctctgtgattgatgacctaaccaggcacatggcattccgttccaccagsaatgtggccagtggggagatggctatgtcagtaacacctgtttgtggtagaccaacaatggcgccctaaaagatatatccgcatcaaatccctgggacctatgtgtgtgaccttatttggaagaggggtttttttttgcagatgcaattaggaatcttgagatgcagagaacatcctgtgctatccaggtgggccttaaatgcaatgacaactgtcttcataagagacgtatagggagmtctgacagatagaaggggagaaggcaatgcgatcaccactaggtagaggttagagggatgcacccctaagtcagggaatgccagcagctrccagaagcttaaagaggcaaaggatgaattgtcccctagagcctccaaagggagtgtggcactgcttatgccttggctttggacttctggcctccagaactgtgagagaataaatatctgttgttttcgatgggcgtgatggctcacgcctgtaatcccagcaccttgggaggccaaggtgggcagatcacaatgtcaggagatcgagaccatcctggcgaacacagtgaaaccccgtctctactaaaaawacaaaaaagtagctggccgtggtggcgggcgcctgtagtcccagccactcgggaggctgaggcaggagaatggcgtgaacccaggaggcagagcttgcagtgagccgagatcgcaccactgccctccagcctgggcaagagtgcaagactccatctcaaaaaaaaaaaaaaaatctattgttttaagccaaccagttcgtggttatttgtgtagcagccctagaaatgaagacagcctgcgagcaccttgccccacctggctgtaggtgacttttggtgccaccatttttgactcttgtggataaagagcagactatattctttttataagtaagtccaccttttacagaaaaattaatagccaggatcatggttttagaactcatagaatacactcctctcatcctctcattctttcccccacccattggcttataaacttgttcctatgaaataagtcagctgagttgagtttgtaaatgcatcttgaataaatgtgttgggtggggtcacaaacatgcagacacctgctggtgagtgttactgacctgcactctgaaaggcccctatattgatgatacttcttaatctcctatggctcttcttcagccctgggagcaggggagtgcagacttttgttcaacccctttcacagatgtgcacactgaagtcccagtgtgtccagtgacttgcycaaggtcatcagcactgtctggtggagctgggactcgaacccagtcctcctgctctcagctgtgggaaatggagacagcagttgccctggaagatgtttcctgtgctgcgtgtttgtggttgtctcaggatttgtgagacttactgttttcttgtgtcccctgtccctgtgacttatctttgtgcccactcagccatcaccacttccaacacacacccacacctgtggagagaatgcagcctcctagagctcatgtcatggcaggactgagggmagtagtcagttcttggtgctctctaatagggctctgaattgcagcctgggccgtgcccattcatttatgtattgtctatagctgcttctgtgttacaagaattgacagagactgggtgtggtcgctcacacctgtaatcccagcactttgggaggctaagacagaaggatcgcttgagcccaggagtttgagatgaacctgggcaacatgatgataccccatctctacaaaaaaaaaaaaaaaattagttgggtgttgtgatggaggctgagatgggatgactgcctgagcccatggggtcgaggctgcaatgagctatgattgtgccactgtctcaaaaaaaaaaaaaaatgttgacagaacaagttgattcaattatagacttgagtagttgtaacggagactataaagcctaaaatatttatagtgttaactttgataggacaagtttgccagctcctgcactagaggataaagattaacaggattgactccacatagaggagaggagaggaaggggcaaggatggaagcaaggagggagaagggktagagagaaagaaagagggaggggggtcactcagagacttcacaaagtaygttatttcctaaaaactgtaatgcccagtatctagtgattacctgtggcactgtcagccttctgcctgggaacaggaatcttgcaaagatcaaatrcagggcccagagccccaggactctgcattggcattcgtcagtaagttttgaaggaggcagacatctcaaaaccatcctaagcataaggcacccagctggtgatttgaagatagscatcttccccattactagttggcctcactttaaaaaatgttgtttcttggatagcatttttctttcacaagttggtttgctttcacatgtcaaaaaacaaaaccagggcygggcgcggtagctcacacctgtaatcccagcactttgggaggcgaaggtgggtggatcatctggggtcaggggtttgacaccagcctggccaacatggtgaaactccgtctctactaaaaaaaagaaaatacaaaaattagccaggcatggtggcgtgcacctgtaatcccagctactcaggaggctgaggcaggagaatcacttgaacccgggaggcgaaggttgcagtgaaccaagattgtgccattgcactccagcctgggcaacaagtgtgaaactctgtctcaaaaaacaaaaaacaaaaagcaaaaacaaataaacggaaagagagagagaggagagagagagagaaacacataccatttgccatatttgtggtttctcattcttgcgctatttttttaaacctttcattacattaggcctttatcagatattagcactggttcttcagttttccccctgatcaggaacttccctgaaataaatgctggtaagatcgtggaaagttcccaggagaaggatagaacaggtgtaccccagggaggctgagccagtacagagagacctatgggtttcacgggccctcagtagaactgatttcctctccttgtctcaggttgtcatcagccactgagcaagaccgaataagggatctcgtgaggctttggagatggatgcaggatctgttgcctgcgattcaaagctggtggaggacttgcttaggtcatgttaattagtttttctcagctctcaccaggtgtcattcatggaggttgcataaaagaaactcatacccaggkatgagctttttcttaaatattacctttctgaattttgaaatttagtgtagcattgagacatttaaacacatttttgaagcacaaaacttatttatcctagttcaaagccagatttggtttgacctgtcttggtggygttttctgtggttctgagatccaacccccaacttcgtcccttttgacctagtttatcacccatgtccttgggttgaaaatagtagtgtaatcstaagagaaggggcctgaaaggaagggaagagaaatcagatgtcagctggtgaggatgagaaatactgcaacaagggagcagcattgacccttgagagctacatgctaggtagagtcaagctctacttgccctaagtcaaaaatatcattgacttgtggctaaagcccagactttgaagagcaaagaaagcaaggatttaactgcaaaaatagaaaagtggctgacccaatgctgaggcttttaacaaaatttaccaaatagtttatttcagactgagaaagaaagagctcaaacaagcttaagcagcagcaaatgctatcagcctggaccatgagattgcatgtgccctgcagtgatcttccaccttgactgacattaaaactacctggtagtggccgggygtggtggctcacacctgtaatcccagcactttaggaggccgaggcgggcggatcacgaggtcaggagatcaagaccatcctggctaacacggtgaaaccccatctctactgaaaatacaaaaaattagccaggcatggtggcgggcacctgtagtcccagctgcttgggaggatgaggcaggagaatggcatgaacccgggaggcagagcttgcagtgagccgagatagcgccactgcactccagcctgggcaacagagsgagactccgtctcaamaacaacaacaacaacaacaacaacaacaamaamaaaaaaaaaacactacctggtagtgtttacagccttgagtgcccagaccaataagatcaaaatctctgaaggtgaggcctgggcttggtgctttttgatgatcctcaggtgatcttaatggtcttccagggttgagcactgtggggaaaattgaggccaagatgtggaggcatctaactggctcktgcatgttaagaactggatgagatgggaagccagacattagaaataatggggtcagggcaccacttacatggtattaatagccagaggtcttgaatcttcctccagactacagtgaagagagatacacatgttatctacctggtgatagataccaaagggaagcaaagtaccacactgaagcaaagtaccatggaaggactgctccccacttttgatgcatgataaagaccaacctgcctgcakgaagatgatggtgcacttctcctgaacttcaccatcatgatcacagtcaaagccagtgatgatggagtataatcacaccagtaaatgaagttcccctgctgtcttctgactcacttctaagtggcctggaccctggtggttaagaaaagtaaacccccaaagcagtcagtcattgtcggtttgctaacttgagcatcctgaaattaaaggactaagtactttaactgggtcacctctattagtgggtaaaaagctgtgtggtctttgttcacttccttaaaatgctgctatacgtgatggcaagcaacagaactagccacgagaaagcaacatggaaaccactgaagtcaagacttaatcctacctggttccccatcaataggtaaaacaaagtggttctgagcacaaactctgaagccagatgatcagcttttaaaaaaaaaataattaaagaatatttatttatttatattttattttagattcaggtggtacatgtgcagatttgttacatgagtatattgtgtgatgctgaggtttaggcatctaataatcctgtcacccaagccatgaacatagtacctgataggtagtttttcaacccttgatcccatcccttcctccctccttttggaatgcccagtgtctgttgttcccacctttgtgtctgtgtgtacccaatgtttagctcccacttacaagtccatgttgctgcaaagaacatgatttcattcttttttatggctgtgtagtattccatggtgtatatgtaccacattttctttatccaatacactgttgatgggcacccggttgatttcatgtctttgttcctgtgaatagtgctgtgatgaacatacgagtacatgcccttttgatagtatgacttatcctttgggtatatatcagtaataggattgcagagtccagtggcaattctgttttcagttctttgagaaatctccaaactactttccacagggcctgaactaatttgcactcccaaaaacagagtataaatgttcccttttctctgcaacctcaccgacatctgttgttttttgacgttttaatagtagccattctgactggagtgagttggtatctcattgtggttttggtttgcatctctctgatgaatagtggtgtagagcattttttcatatgtttgttggctgcttgtatgtcttttgaaaagtgtctgttcatgtcccttgctcactttttaatggggttgttttttacttgtcaatttgtttcagttcctataggttctggatattagtcttttgtcagatgcatggtttgcagatattttctcccattctgtaggttgtctgtttactctgttggtagtttccttttgctgtgcaaaagccctttggtttaattaggtcccagttgccagacsgacagctttgaattctggtcttaacacttcataactgggggatctaggggcaagttacctaacctctctcagcctcagtgtcctcatctgtaatggagggataatagaagcttccccccagggttatagtgagggttgatgaggtagttcatttaaagcactcagaactgcgcgtggcacctgtaaacactcccacccccagtaccttttcacaagtactattaggatgatgctgtttagcagcaattatcagcacctctcatctcaagttatattgctagtgacaaaacctttggcatttcagtgtatagctttccaatcttttccataactgtattttttcttataaaagtgagattatactgagcatactctttgctttttaaactgactatattgagaatatctttctatttcatgtaatctacagcttcatttgcaatgactgcataatggtgcagatatatcatagattatttaaccaaacacctgtggtttaatacttaagtctctctcttttttaaaagcaatgctgcagtaaatatcattaagtaaaagcactgctcattggcataatttcccctttagaataaattcctagaagtgaaatgtgttgttcaaatcgcatataaacttgaaagtgtttgctattctatatgactgccaaattatcctctagaaagattctaccaccaccagcagggaataaaaagtcagtttcccctcactatacttgacactgggtattacagtttttaaactgtaatcttttgtatttgttcttgacctaaagctgagctctgctgtttggggcttggcttctctgaacttggtgctgattcttgctttaactggagcttcctactggagcatcctaggtgggctctcactggctcaaacaaccctatgaggctcttcttagtcttctaggactagagcagggctcagccaagcacatggtgctggcaggacacttggagctgtccctataccagcagcaatcttttgtcttgcttatttaattacyttatcctaaagtacgtstttactagaaatttgctgtcctcagtgagaagcagtacctttcccttgttccctgctgaaccaccagggtcactaccagcagatcagagccacttccctgtccctgggggcatcgtcttagactttggtcaccaccaaagaggagacataagaagaaggrcaggaagaggtagcattgagcaagagctctggatttgccatcatcagctgaggattctgaattaggaaacatatctatttaggtttaaactacaaaatatgcaagggttcctattccgagcctctcagaaacatccctctggccacaggcaactgtcactggtgatggttattctctcagaagatgctgaggatcagggtgtctaaggagtagctttgctttaatctgagcttggtatattacattttccatgttagcctacctaatagggtgggttcacatagaaatactagaaaacacagaaggatataaagagcaaagatgaaagcattccaaatcctaccatctagatacaacctatgttgatatttagcatgtatgcasaggatagatgctatcctgtagcatgatcatttatatgcatgtgcgtacacatgcatttactttttataaaaatgatataatactgaacatgctattctgtagtcagtttttaaaagaatgtatctttttttttttttttttttttttttttagatggagtcttgctctatcatcaggctggagtgcagtggcacaatctcggctcactgcaacttctgcctcccaggttcaagtgattcccctacctcagcctcctgagtagctgggactacaggtgtgtgccaccacgcctggctaattttttgcattttagtagggacagggtttcacaggttggtaaggatggtcttcatctccagaccttgtgatctgcccgcctcggccccccaaagtactgggattacaggcgtgagccaccatgcctggtgcccccccctttttttggggtgggggaaacagggtctcactgtgtccccaggctggagtgcagtggcacaatctcagctcactgcaacctccgcttcccaggcttaagcaatccttccatttcagcctcytgagtagttgggattacaggcatgtgctaccatgactggctaatttttgcattttttgtagagatggggtttcaccatgttgcccaggctggtctcgaactcctgagctcaagcaatctgcccgtcttggcctcccaaagtactgggattacaggcatgagccactgctcccagccttaaaagaatttatctttaatggctgtgttttatttatacattttcagtcattcattatcaataaatactgattcaggcccagtatgtgttaggcatgattctaggcaagagagagaaaccatgaatgagagacatggtstctgcccttggggagggtgtaatgaagttcgtcagttttgtgctttgtggtttctttctatgcgttatgtttttaaagtcctcttccatcctaaagtcagacaatcactatattttctcatgttttcactttttacattgcctgagtccatctagaaattgttttggtggatgaaaaattttctacttttaaaccattggaggacagcaatgaccacaaaaggattaaatcctctttccttatagacaagtgggcacaacttggctatgcagtaattctaacatcagcagtgcaaagaagggaagtacagtgttgattcttcatgggagactgatggaattataatagacttctgttcttaaggtagaaaattatcatttttttaacctgaaaabatagagtaatagtctatgataaggacaaattaccccaatatgtttttaaaacattgcaattattaacaaagtggtagtttctttcatttaaaacccccttgggccctaaagatatagctaacaagaggaaaaactgtcaaaactcttattaggtggttgagtttattttctgctcacaattgtatcatttaaaaccctgagaaactgttttttggagagcaatttgtccctattagagttttatgtgttcaaatccttgacttagcagttctgctggtagaaatccaccctatgtatggaatcacaaaagtacgtctaagatgaacatagaggaagattcattgcagtcccgtctataattgcaaacaaagcactgagaaccacctaaattatctattagcagcagactgctaaagtaagttaagctacatctgtgaatcgccatgccgtagttgcaaagaatgtggtgggattccatgtgctgaatgaaatagtaaaatctctaagatacatcacgaagtgaagaaagtaagctgaagggcaggtcttttgtgttaagaataaaagaccccaacttatgttggtgtatccattttttcctgtaggatgcataaaggactaataggaattgttgcctgaaggaacaaagctggtagggatgaggtgaagagaaagtcaaatgttcattttattcctgtgtggatggtgtgaatttttctaccctgcatgtttattacttttatttatgttttgtaatgcttactccatttatctaggcagggagattatagacaattggtgtttccttctttatacttttctatattaaaaaatgaatatagatcagaaatgttcaccagatactggcatctaagaaacaaacaaaaacatgatttgtcaaagtcagaaaaggagtgtatgtctctgtttggaattatgctaatttcttggagtttgcgttcctttgttgtcatcagaatgctgcacattgtgttctctttctatttttgtgcacactatcttgttttgtatttccaaccacgacagctatgttcagttgtgccccatcccctcccctgttctgtggcctgcggtgctgagaactgcragcagccaatgggactgctgcttactgtgagrtccrtgcagtgtccacccccgcttcctgccctgagactgcctccaggcctggcacgtcttcctaagacaggcctatcaacccagtggatccttctgccccttcctcctcctgtcctccaactttagggagccatattctgatatccagagatcctggatttagagcatctcctccattcttggtaaattgagaaccttcccaactgctgcctcatctgcagtagttcctttcagatgaaaagttaaaatgggagagaaatattttgcatttgctcttttcattagactattcgatttcyatgtaaatgtcttctacagggattgaaagaaaygaatatattggttcaccagacattgctgaaggttccaacacagccttgacctatttttgtttgaaattgagaaatgctcacaaatgtaagaggcctccttttttggagattggagggatttgacatcaagatgttttgcattttcaacagctcatttgccctggatggcttttggcagataaatgtggaggtggcagtgtaataggtttcatgtgtccagagtggaattcacccagagccaaacaaaagctagtagctctgaacatgtctcttttcatggtaaagtactctggagtgagactgtttaagtttcaacccctgtttggccacttcttagctcaagggcacttcccttacagtagctaagtttaggttgtttcatccataaaatggaagattttaaagtatctacctcaaagtgtgatgaggattaagtgaaaaactgcggggcaattcttactataatgcctgacatagcaaggcatcaataaactcagttgccattattattcttaccattatggtttataccactaccatcattgggattattaggttcaaccactacacaactgaattgttgttgcatgagtaaattgcagttgtttagacaaaatcctaagccaaaaacttcgtgctaggtagaaaggaagcaccttcatttattaagtccctgcactctaccaggtgatgtgttagttccatctttgctgtatctcatttcaatcctgcagtagcattttgcaggtagttctatttcagtatttcagacggagttccaattgtttgatgcttactagccatgtgaccctgtctctttatcttcctgtgcctcagttttctcctctgtaaaatggggataatgatagtacctaactcattaggttgttgtgaagattaaacatgttaaatcacacaaaacagtgcctggcacacagtgaccactatgtaaatgtttgctagcattactttataactcaggaagggcacatgtgacagtctggaacgtgtgaagtcgttgttctccttagcactgtggaatgttagtgatgctggaggaaacttagagctaagctggcccaacctactcatttcacaggctggggatccaaggcccagaaacaataagggacttgtctaagtcactcagggagttcgtggcagagcccctacctgatacgagatctcctgactctgctcacgagacttcatggtgggaataaggcaacacacggagagggatgagatggagatcacattcttcgggagagtttgattctgttattcctgccatttgggactttttcagagtcctctaccattctgcctacctgtacagaaagtgctggatttttccaccacaaggggcttatcaatgtggtgtcataaagcgggtcttactttctcatcagagcccrtatcagaccacttcccttcttggtctttagaggaaaccaaagtgaagcactcctagcaaagaatttgatgttatgaccatcaaagcaaaagtatagctctatggttaaataattacttaaagggtcacaccgtgggcagaccttaaaaaacagacttaagatataacccatatgggctataaagtatctataaaggaccctaaatggaaactctgctgtgttgtgcatttgacttggcactaataggccagatatattaactgttgggtgaaattaatgataatattkcatctaaattctatgggatgtttcttaaggttttgggtgttaaattaccccttctaaaatccagtattgaggctcgaactaatcaatgtcttctttttcttttaaaaattctcttgaccatattgtttctattacaaatgaaacatgaaggtagaaagtagaataataagttacaagaagtggagaagggagtgtgtgtagtggaggatgagagaggttggttaatgggtacaattatacagttaggtagaaggaataagatctaaggttggatagcacagtaaggtgactttagttaacaacaatatattttagattttaacatagctggaagagaggactaaaaatgttcccaacacaaagaaatgataaatacacgagatggtggatgtcctraacaccctggttattatacatcctatgcatgtaacaaaatattacaggtacccaacaaatgtgtacaaatatcatatgtcaataaaacaattaaaagtaaataactacagaaaacaatacaaagctggcagttccttcttttacagatagatggcaagctcaagtccaaataatcagttgaagaaaagagaagttatgtagatggaaatgctggtccaaactaagggatgaggaataaatagagttgtggaattatccacttcacctggtgatgttgcgggttaaatgggtacatggctaggcagaacaatgtagaaaacctaccttacttgttcttctgaccaagccttttaaggctgtcatttaaaatggctctgagttctgtttcttagttttgtaggatcagaaaatcacatgccaacttagctttcagctacttatctacaaacccaagtgtctatttatttttcagtggatggacactgcaggggtcttagcaagtaccatctctccatttagctaactacataggaagcctgaatagaaatcaggattatgattggtgatcttgaagacagagccaggagagtgagttttaatatctgatggtgttgagatgagataactgatctcgaacagggatgtgtctgctgagcaaactcagcattacttgttagctggacaggcgattggacaaagctgagtgagcacctcttcaattttttttatgcttgattactcaggttttcagtttttagacagactatttttcttttttttcccctcagatgtataaatagcattgaatctgcagtagtgttagaaaggtaattataacccaaccatgyctgagatgacattgtgatttcttaatagaaaaagcttgttgggtccccacttgcaagttgatttttcataatttaattctcaaaatgtcaccttatttcttggtgtaacccagataaaacctaggtatcctggcaatccagtttcagcatgaagttatattcaaaggaacacaggctagttggccaaagtaatttcagtatccttactggaatcttctggagaacatcagaggggattcattttataagccacagtaaaatatctcaagattctcttttcctgatttcctggccttaatatctcagccttttcattttaaactcttgaactttaaactgtctctgacccctttcagtgctttacttcttcatctcttctttccttttctcgatcatttttccccctaaatagcatccccacccattccctttccaagtgcaactatataaaacagtctgtttctcgcagtttttcagtactttacctctttctctgattcttcatttcaaaagcctaggaatcctctggcaaaaagtcacttaaaaggtttggggcaaggrmacaagattccctttagctcacatggaaggaagtcaaagctgaattatcttcatctagcaatagaaagaataaagattgcaacgtttacaatttaatatattttctttaccctcctcttgtctaaattctgtgatctcatgatggcaagagggccttgagtaggtcttctggtcccttcccactgctgtgccctggggcgcgaggtatcagcgcaagctagaatgggggttcagtggaggaaaggaaacaccctatttctgcttctgactaccttccctgcttagcctctttccctgtctccctgtttctcacacactcagttgggacacccaccttgtccacagccacagcctggcatctcctagtgctccagttgcagcacagtcagcaggagagaagagggagtctcaaggagcaaaaaggtggaaataggctttcctaacaacaggtgcttgccatgtctgtcttctcatcatatttattgaacagaatgtgcttcattctctacgggtgctctttaacaatagtttacgtgttatgttacgaacatgttatgattataacatgttctatcatgttataatccttccagaaaatacttgccaggaaaatatataatttatagaaagtgaatgaaagtggcttgttagccttcccagatagtggaggaatctggaagtctttctaatggattgagatcacgtcattccagatgtctcttgaggcacactgccccgaatggttgctactgtcagctcattatgcttttccctggaatttccacttcccccgcctttctccccagaataagctttccatgattctttcccagaattagccttttcaactctttcctcatatgcatagcaacagtaatttatttcatgtgggttaatgtctttagcattaggacacttctggttttatggaytgatggccaatgtgtttttaataatgtattttgcttctattgaagtcatgagtacaaattcgtaattcatttgaatgagggatatggacaaacaggaacacaagtggaagagagaaaaaagaggatagtacactcagagatactcagtaagcataaattacatgtattcatcatacaatattctaggctttagagatgtgtcagccaagatccttgtcctcaaggagcccatagtttgttagagagagaagatgtgtaaatagttaagtgtataaagtgctacagtgcttgaggtctaatgtagaaaaawccacagcctgtggggagggaagagaaaggagggagtgatgcaatctatttggagggaacagaaaaatcttctgtatttgtcagtactctttgagttgtaagtggtagaaacatcactcaaactagcttaagaaaatgggagatttattagtgtatataatttaggaagcctggggatggttctggcttcatgcatgactagatctgggactcaaacaatgtagtaggacccttttttctctttcaactctgcctccctctgcatgttgactttattttcttcaatgtagatgcatttcttttatgtgacttggaaaaattgctactcagaagtacatcatctcagcttaatcctagtggtatgttttttcacttctctcctggtatccgtgtgtctgtccctagaaatgtctctaactggtgtttctcagttcacttagctatcccttggatcaatagctattgcaaagaaacgaggtagcatgattggcctaacctggctcacaaacaagtcctagtggcaggaatgagctaaccatgactggcatttccaccagagccatttacagtgagggtagatgtgtttccccaaaggaaagaagactaggcagatcaaaattgacagatgttcattaaagcttcatggatatttaaactgtgccatcatagatgaattgttttttgtcaaatgaagcagcagtgcacatcgattattgttagaggaagcaataagaacaaaactaagaggacatgaaccagccgggaagatcaggagwctgcaagtagtctttgaggttggatcatggtagggggccatggcttgagatgaagctgtgaaatagacaggagcctcactggctatgctagggaacctgctctttgcactgtaggcaatggggagacatccttggttttaggcaagggtcggaggtggtcagatttccattttagaatatcactctggcagcagtgtggagattgagttggagaagccaagaatggatgcagggagactaataaggaaaccactacagtaatccagctggagataagttctgtaatgtgctaaagatgctaatatggaatagtctccatgtccaggtaggagatgaaggaaggagggttaaggcaatactcaaggttatagtggggaagcaaaagatgtggaaactggccagcagaatcaacatgacttggtctttcaagaaagtaagtgtctaggatgacttagatttctgacttaagtagtgtcatttgctgagatgaaacatagaagaaggaacaggtgtgaaggtagagggtgggggattgcttgagatggtgactgcatgtgtttgagtttgggggagtgactatgaatagttggcagttcagtatagggatctgcagctcaaaggagaggtagagttgtagagtggatgagaatgaaggcccgaagagttactggttttgtcctggttaagggaaggagaaatctggaaaccagtgggctatcccggtgaggagcacagctcagacctcagccatcaaacaagtrtcagaaactgcaagtgagttccttaatggtgtcctatgcaaacttgttgtcgtttgactcatatctaattctgagcgtaggctggttgcctcttgtccacctagaagtgactttaagaccatcactatgggctgggttcggaggctaacacctataattccagcactttgggagactgaggtgggtggatcacctgaggtcaggaatttgagaccagcctggccaacatggcaaaaccccatctctagtaaaaatacaaatattagccaagcgtggtgacacacacctgtaatcccagctactcgggaggctgacacagggaaattgcttgaactcaggaagcagaggttgcagtgagctgagactgtgacaacagactgagactctgtctcaaaaaaaaaaaaaaattcactgtgaaagggagctcagctagtcaaagaatcctgaaatagctgtggatgcacagtgggtccttgtcatggggccaggcccagggtcatcagttagaatgcagttgtaaacatgctaatgctgctgcctggttgtatgtgctaacaactgcttagttccaaattctaacccaataaggagtttcctcaggggaaatgtatgactacagcacaaatgggctcagccttactgctttcccactgttaccccttcctgcaccagcgctcttctggtccgtgtgactaaaagccaaaacaccactttgcctaaccccccagatcctattagttttgagtctcatcaattctgtttcttccatttgtccttctctttccattctgattggtacagctctaagctaggaggcttgttagttcatccatccttactgcacaaccaggtgaatggaacatcctcctaaggcacttaaatgatatttgaatccacaggtcagcaaactaggacccgtgggccaaatctggcccactacctgtgtttgcaaataaagttttattagaacacagccacactcattcatttaaatattgtccaggactgtttttgaactacaatggtagcattcagtagttgcgacagagactgtatgtcccacaaaatctaaaatatttacttttgttttataggaaaagtgtatcagcccctattaatccaccttatgtatgaatgccagattaatgttcctaaaatgccatttcaccatatcattctgtagcttagaaccctgcaatgacattgcattgtccatgcaataaaatctaaacttcatggccctccatggtatagtcctagccaatctgttgagtcattgatctctgttcctaaaggcaagccctacaaccagttagattttcctcctcattgtccctggaatatgcagtgcatttctacccttgttcacctagttccttttgcttggaatgtattgcccatttgtatctacctaaatcctactcattccttttttttttttttttttttttttttgagacagagtctcactctgtcgcccaggctggagtgcagtggtgtgatcttggctcatggcaacctctacccactgggttcaagtgattctcctgccttagcctcccaagtatctgggattacaggcatgtrccaccacacctggccaatttttatatttttagtatagatggggtttcgccatgttggctaggctagtctcaaactcgtgacctcgggtgatccacccacctcagcctcccaaagtgctgggattacaggtatgagccactgtgtgcccggccctaaatcctacccattcttaaaggactaacatgaactctacatccttcatgaccatgtcagttacagtgatcaccaatgagcctgctgcttgagcatgtaaaggtccactgcccatactgcctggtaagttttcttctgctcagagaatggttcaccaatatgatgatgggcaactctggagtgaggactttctgatggaacaaagtcacagctgtgggaaagcctgggaatggtttggaaatgacaagacatgtaatgagaacacatgacactcaattaatatttgtggaaatcttgagtcatcagcctctcatatctatgacatacatcttggttctgtatttaaatgtaggacaactacatatcttgatagccagtgggaatgactgacaaagtccagtaagtctactcttgagagattctagaatgtagagatagcagcyggaccaggaagccctagctttatcatgtgccatctctgagatgstggatgtgggctgttcccactgtgcctcacttttcccatccactgtcatatattttatggtcttgcacacactctgggattaagtaacatcaattatgcaccattgattggagttctttggtaaatggtactacattcctaaaatattcatgtgtcttactttgtcagggagattatatccgtgacttagatatcatattctagtggcttaagattatgagctaatattttgtaaggtctgggcattgcacagaaaaccttggttgtaatacacattattattacattgatttgaatagcaatggtacartcatagccccggaaacatagcgactacataaaataaaagcttccgttaacactgagcacagcagccaggcttccgcattgttgttgtccctaggatttggctgttgtattgtcaaatgccattatgtcttatctaataagtttctccctgcatatgtgagtaaacgaaaatgctccagtatagtaaatgtctcagcaaaccactcctgtacgctttggaaacagaacattaacaaggaaactatcatgagagcagacctttctgttctcatgaatcacattcatatgatgtttattgtccacattggagaagtatagagaagaaaaatatgaagggtacactctaatggaaaggttatagtggaaatgcaaggaaaatatatccctttacaaccagcttctaggcattacctagaagtaaaattatgacaataagactaacagcaaataacattgagcacttactctgtgccaggtattgttctaggccttttacgttacatcatcttatttaatccactccacaactaagtggtttggatgcagttattatctccactttatgtacgagaagaccaagacccagggaggtagaagaacttgtcagaagtcagacaggtagtgagtggtagggctgggagttggacccggacagacagattccagatttcatatttatcgtaacctcagctgccccacccacatgaaatgctaccccaaggctagtggcagcaaatataacccatttcatttgcattgtttggtatgtccaactgggtgatttgtcctacaaaatttgaaacaacgtctgcttatttatgtctgtgattttgatcaaataaatctcacccagaatttcccactgtcttattctatggtatttgcagtttgtaagaacctctgtcttttggattgagacgtttttattctttgtgtccaaattaacactgcacagaacatggttctctgtgtgtgtgtgtgtgtgtgtgtgtgtgtgtgtgtgtgtgtctgtgtgtgtgtgtagaaaccgtcttttcttttggattaaattcttgcagcctggctgagtgaggagaatttctcccactcttcgagcctacagcagacatgttaggagaatgctgctgcttgcaacacacccagagacggtggggcaggtgacactgcgtgtgtgcccggtgtctctggaagtgtctatacagatgtgtgctgctgctgctgctgctttctgccttaaaatttctggagccaacacccacccactcttacagcctctgtctctttattttcaaggaaaaaagaaagaggcagactgaaatagaaggcaagcgacaacagcttgacgagcagatacttctgctgcagcattccaaggtaagcrgctgatcccaggaacctattccattattagacatgcagatcacactccggagagctgggcagtgcctgccctgccgtgaaggygctgccgccaaccaaaccagcctttttcattcaatcaggaaaccatctcttggcttttcttgtgaatttctcaaattcagggcattattacagcattccartttctgcaagcataagattacagtgtgcatgtggacagggtggagggtttgtgcgtgtgaagtgtggtggctatatatagaaattggatgagaatacttcacagggtgggtgaggcagcatttcaggattgtttctcccatgcataggtgctgggtgtgtttgctcagagaccccaaaagatatatttcacggaacgttctttttattcacttaaaaatattagtatttcctttcttgatatggagaaaagggagattaaacgatgtgatctgataaaagaacaacactgtgtatttcagattattcatttattttatttgtactttaacaattttgaaagtgttctgtgagagcaagcagttggtcaaagatggctttgaaatgatttgactcagacgggtctccatggtaccatctaaaaagagagagagagagagacagcacacaagagctgtttattttttctttaaaacatgatgcacttaagcatcgtaattgattacagctcaggagaaagctctgtcactgtcacaaggaccccactggttgcagaatgttgcttttcacatgttcagagaataatgtgaccacattccaatggccagccgggagttgttgcttgcctttgactgctcctgggctttttggcaggaaaaccttctcctgcttacctcatgttgctgtgacattgcctgcacagagctgcattgctcagaggactgggtgggaaggtggtgctgactttcggggtgatgctcggtatgaattatctagatttttttcaacaagataaacctttatggctacttttcctgtccttttctagaaaacaggattgtgctaaatgaatacccaaaatgagaaccatcagcaagcgagttactgattgaaaatagcagcatgacctatatctgcttagcatgtttatcagtttttgccatttaccttaaccagagaaatgtgcttaaaaggaagaaaagcagcatgatactaaggatattgcctgtttctctctgttcatcatataaattcattgacagatctttctttgtaggagcttgctctgtatccccggtgctgttgctctttccccacaacattcctgagggaggatggagggctaaaattagtatcctcttctcacagagagggggccttaaaaacacctaatagaactgagtgaattgttcaaggtcaatctgcacagagctaggtctctggctcagagtacagtccattcagtacggtgcttgtaagagaccaacatgtactaaaacctcagtgaatttctggttaaaggtgaacttttaaataagaggaccgaatgaaaaaagagaggctgctttgggctagacagcctcactttaagctcaacgtagttctttgcttttgtattccctgaatccagtcagggaataaacatatgtcaaaacatcaagggattttttttctttggtctcccttctcatgatcctgggtgccaaataagataccaagggctcatttattgctgatgtccagtgcagtattagtatattctgttcatattacatctattcatttttttatttgtttgtttgtttgagatggagtctcgctctgtcgctcaggctggagttcagtggcatgatttcagctcactgcaagctccgcctcccaggttcacgccattctcctgcctcagcctcctgagtagctgggactacaaatgcccgccaccacgcccagctaatttttttttttttttggtatttttagtagagatggggtttcaccatgttagccaggatagtctcgatctcctgacatygtgatccacccgccttggcctcccaaagtgctgggattgcatattcatttttcgtctatgcatccattcatccatctttccatccatccatccatccatccatccatccatccaatcaacagaaacaacagtagaaattaacttggtcttgtatgcggaagmagtgaggtttttctcaaggacttggaaacaagggaatcagctagttctttatggctatcttggtaaaattctcacacagttgatgagattggctatctgaaggaacacccaacactcgcaccatggcaaccttgctattgcagggcaggaggtgggtgaggtggggaggactggaggtgatggtaacttactaagtggaggtgagtgcattgtatgtctctgggaaaggcttgtgtggacagaatgagggtgagttatttgccttgaatactgaaaaaggaaagctcagaggttccaaaggtggcagtggttgtctagtactayctgcagagagacccccagctttgggaggtcctgaatttctgtatgctggtgaggtggggtcagtggtaaggtgaggagggtcctcaggccacagtgaggcccaagtgaaacttccctcaggaccttgcctctctttgttctgaattcatcctccctataattattcagttattttgatatgaggaaagggttgcctgattgaaggatatgatcactttaggcactaggaaggaatatgtttcactttaaatcaataaactggtgactgaacttgaatagcatgggactttttccctgtaatcatccagtttgcagcctagtggcctcgcccctggatggaagtacattcgtggaggttatattttcttctctgtgagcctctccaaggagtcagccagttttctcctggtagcctgttagccaccgtcagtaacagtcaccatttttttgagtgcctaacacgtgcctggtactttaaacacataccctcaataatgaccacaagacagttattactctgtcttacagctatgggaacaaactcatgaggtcaagtgatttgcccaagaccatagagactataaatgagggagcctgagagaaactcctgggctgtctgctttcaaagaccgagctctttccaggccacygttctctttgaaagaaatgtttcctttggaataattcatttagtgagatgccagttaccatcattgctgtctctcttactctaaatatattgtgatggactccagaaaatttagatcatgtggagacatgtcacagtgattattgaagttccttgaagtagagaatattaggaaatatgtcagtaatcaatatttgtttcactaatttgcaaaatcctagatattctctaagaaaaaaatattctccttgcattagagttagttgtcatgtttataagatataattttcatattctttatataattctcatattctatgtcttaagataaaattctcacatgtggcaattatcagatagcctgtggacacttattctcatgcaatgagatgaattatttagacagattcacctgtctgtggtcaaagcaaataaatagaatgcaagatagtagttttggcattcatatatatttttagaagacttacttattgcaatatttaggaacatatagtgagcaactctacaaaatggaatatcatcactttgtatatggacttcgagcaaattccacaatacagtaaaagactaaagtataaaatggtaaaatactaactgctacatcccagtgattaggaaacctcaagatactttgaactccaggccaaattaaactcagatgtatttttaaagcatccttagctatacgtagtgtggtgtaataatttctaagcattacaagtagaactagtaagcaatttttatagctatattatttttgatgattacaaaaggaaagaatgtataatcattgcaaaaactaaattaaaaagtacagcaaaatataaagaaaaaacatatgtactctatacttaccattcagatagaacccatgcagaggtaaatccttctatacttttttccccgatatatttctgtagattaagatatgtaaccatcattcacagggctcaccaacctgtgggtaaaatgaaattatattaacattagcattggaataacattaacctttacctcttttttatgtgggttctttttaatacccatacaaaaacttataatttttataaaatcccatggagcattcttttactttaggataactgactttgatgtcttccttgaaaagaatgtctccatctcaaactcttagctattatgtttcttatacttcaatagcattaattcatctagaatttatttacagacgaggtatgcagtaggaatataactttactttttactgatgctgagctgcttgtctcaatgtgatttattgattaattcatcctttccttcactgatttaaatgtcttctttatcacctacatatttctgacttacatttgagtctaccatttatggattatttttattccattaatctgcccattcctgtgccagtattgttctcatttaatccctatagctttttaatatattgtaatatttcataagacaagaactatcattattcttttgaaaaattgtcttggctttttatttcataggaacaattatttatttttattgtttttataatgagacttgtgatgatatggatttttttaaaataaatcagctactatatcatactagagcagaaggaatttaatatttccttctgtcccttggttgaattrccagagatttgtctattttattggtctgttcaaagtcccagcacagagtaggcactgagtacctactgcaacatgaattccttggagacygtcatatttacaaaggtttgcctgacagagttggccctgtcagaatcaaattgctaataccacgtcttcaatacataaactgcctttgaattacttattcatgagcggggaaccctcactagagttttcttctaatccaagctataaaaattgtcattatatttggaagaccacagccttttcttccaagaaagctgaatgaaaaaagatgaaaggctgaattgtgaccctgtgaaatatttgttgtcaacccactaaggtcatttgctgaagagcctgaaggtatcagaagacttgctacaaagatattacagtgtctttcccggttttgaacatttagcactaattttagactttttcttgttactgggatgtgtgaaagacttatttcaaattttaaaatattgaacagataggcacagtacacagtgtaaagtaaccttagatctcctcccttgtttccatacccagagcttgaatggaagttaaaacctgatttcttctatcagaagtcttgggtcggcttctccctgggtggactgaagcatataacaaaatctcaaaaccaaaccaagatcttatttattgagagtcaagaaagagraaggaaagagtgggaaggataggggaagagaaagagggacaggacacagataaatgactgaaaacacaaacacagctattgcctcatgctgagtttaacccactttctgttagaaaactgaatttaggccaggcgcagtggctcatgcctgtaatcccaacactttgggaggccaaggcgggcagataacctgaggtcaggagttcgagaccagcctagccaacatggcaaaaccctgtctctactaaaaatacaaaaattagctgggctacttgggaggctgaggcaggagaatcacttgaacctgggaggtggaggtcgcagtgagccaagatcacaccactacactccagcctgagtgacacagtgagactccatctcaaattaaaaaataaaataaaataaaataaaataaaataaaataaaataaaataaaataaaattgaatttagccatattccaaccatcatccactagaatagccaatatcagcttcagccagattacaaatgaatgaaagatccagagtaaaaagtaaaatcatgaaagtacacaaaggaatcacaggtgaatatttttatagtgagggtaaggaagtcttatctatgtatgacatcaaagccagaatgtgcaagtaaaaaagattgccagwtatgactttataaaaataacaaacatctgaccaggaaacaacaggagacttattacaagttctcattcacctcctacttccccaatctgccccacccagcctctccagacatgcctcactcttcaccggggycacctcaaaaagtggtatctaggctgggcacagtggttcatgcctgtgatcccagtacttgggaggctgaggtgggaggatcatttgaacctaggaattcgagaccagcctgggcaacatagattccatctctacaaaaataaaataaaaaataaaggaaagtaagaaaagtgacttcattgcagttaccttagctgtagatgaaaaagattgggttagatgatctctgtgatctttttttagctttagtgatccaagattttatatttgctaaagtacagtgtatgtgcatgattttccaagaattcctcacatgtcagcctccgtggatgaataaaagatacagtcctgactgtgagaactcaggggcaagtgggggagagagagcatcaatatggaacccaccattagaggagctgaaaaatagttttccatgttatgaagtggatcagtggcacctgatgattttgtaaatcctatttgagcaaaaaagaaaaaaggattcttgggtgatcttacacagaggcaagatagyagagtgtacctcttggcttcaaatcccagatctacagctcactcggtgtgataccatggataagtcagttaatgttagcacctacctcatgggatgcttgtgaaagttaagtggatttacatgtaaagcacataaagcagtaagagttctataagaattatcattattgtcaccatyatcacccagtactatggctgcaaataccatttatgtatatatgactgccaaattgagaatcccagtcttccatgttcaactgcttttctgacatgtccgcttagatggatgtcactttcatttagaagcctctgaaacttaacatgcccaaaatgaaagattttattttctgcttttctatcatttgttctactcttccctgtctccagttgatgataccactattcaccctttcactcaaaccaaatatctatgcattgccctaatccttccctttttctcagcccacatctaatctgttacaagtcacactgattctacctccagaatgtaccaccatgccttttgattcttctgtctctcttctgtttcaagctaatatkctctgtcacttgaaccatgcaataaactcccatcacttgtacttwgtaatcctgccccttgcaatgtgttcttcctattgggcttagaagacacagcaaactccttaacaaggctacagaatcctacctaatctggcccctgccttcttctccatcttcagtttgttctgccctcccaccccaacctcacttattatggtccagccactcgggcatttgttccggtccacaaacacaccaaactctgtcctaccaccaggctggtacatttgccagtccctccacctggaacacccctccggatctcagatctcagcttgaatgttcaagtcatcagagagacctttcccactttaaatgtcctcccctggtccctctttgtcacattgtcctgtctacctcttcctaggcagcatcatagtctgagattatcttgcatccttgtttattgggatgaaggcttgagtgagagtagggacttgcctgtcttcctgagctgtgacttcagggactggcagagttcttggcacctaggaaagggataagagagccactgctcctgagttggggacacagaaggagaggatggggagttcttttagattatggtgtttgaccagccattgagaaagcttgtgtattcttcaagcatttggatagtcataggtcctcatgctgtgctactcaaatcgtggtcctcagtctggcattgccagtgacagcatcacctgggaggtcgttaaaattcaaattcccaggccttatgcgagacttagagaatctgcatctccatgggtgggtcctggaatctgtgtcttaggaagttctcctggtggtccttatgcatactgaagtttgggaaactcagttcttgctttttgttttccaaagctggccaggccagtagagccagaaacagatttactttgggagttccttctgtcctcctttcagaagcccctgtcaagtttccctttgtccagctgccagctccccacctgctccttccttgtattgacttgccatgatgacattcrtttgacaaatgtgaagtttgacagtccttagcaccttgggaggagtttgagaccagcctggccaacatggtgaaaccttatctctactaaagctatgatactatgttagctatgatacttttttttgatgtatgttatttagacaataaaggccacaaacagagaaaagttttttttaattttaatttttttatttctattgagctctgcttccgctaaattctgaaacactgaggcagccaatacaagctagcacagtataggggaccctgtgctttggatggtgcactcagtatacaccattccatttggagacatgttggagacaacataagggggatctggagtcagttaaggaagscttttgaattggtgatttcccctgaaagcatgactttggagccaagtagaaaatcaactatgctttttcggcttcttaaaaatgtctaaacacctttgtgaaacaggattctctgagaccaggcccactgccttttccagttttttttctttctttctttyttttgagacagagtcatgctctgttgcccaggttggagtgcagtggcgtgatcttyggctcactgcaacatctgcttcctgggttcaagcaattctcctgcctcagcctcctgagtagctgggattacaggtgctcgccaccacacccagctaatttttgtatttttagtagaaatggtgtttcaccattttggccaggctggtctcgaactcttgacctcaggtgatccacctgccttggcctcccaaagtgctgggattacaggcatgagccaccacacccagccccactactgcctttgtctgttggagcctctcttcctggctcctcctgttgggatgttcttaatgatgtcatgcctatatcaagaaaagagatggaagtagagggacatgcacctctgggtgaccagagtcaccaggctgctctggccagagctacctgctgatggtggcagctaagttggtgagaagtgaggggctagacccttcatgtgatggcaggaggcactgtgtgaagaacagcagagagaacattccaagagcagccatttacgttgcaagaagttgtggctgcagaacatccctgctggtgtggagacagccaggactgtccatggctgcttttccagaagggtccacaccaacgccaaggcttccaggatgtctatcccccagaatcctaaggtttttactatctgtggtttggacatctttagcacaggaagcaccctgaaagtgtggtccctacccctcccaaataattagagagaaggaaagttgagaatttcccagttcatccatttactcattcattatagggaattgggctacaattccattgactgaatgaataaatggatgaattgggaaattctaggtgacacagtgaatgtgaaggtggataaaggacagtcctagccttccaggaaccagcaggctacagggggaacagatgtaaaaagaaagaatttgaggatagtatgaaagggccatagagtgtgtctcagagccagtagaggtggaaggcttctctggtggtattttacttgttctttcttaggtaaataaagcagaggccaagggaacaggatggacaacaacaatagtaaacatttctatagtactaagtatgtgtgtggcccttttagcctataaactcctttaatcctcataacaaccctctgagctgggcactgctattttctccattttacagatgagaaaactgaggctcagtgaggcgaaggagcctgtccaagctcactcagctggtaaatggcagactggttccagagctcaggctgttagccactgttcagcatggcctcttgcagtctctaccctcttcctgagagtaaatttcagagccaagttatagttcaagaaaagcaaagcaataatcattcttctacttcagaattgctaccaatgaacaatttattttgtgcctacaacagattaagtatctgaataaaaatataaaaacatgaattgattaaaaaatggcctctcataatgtgcaaaacagggtctgtyggggaaattttgagaggtttttgtggagaacaatggttctgaatgttttgtagaaagagcaaccgatttgccccaccctttcccactttccaatggaaaagaatctctgataaagctttgataagcaaccaacgtaagcaaattgtactgccctcttttacacatgattttatactatcatacgatgccctataatgtaaaaactgtacattttaatacctaccctggtggtagatgcacactatttatacagagcacattcaacaggcagcatgtcaccagtgatgcatagctgtttacgcatrttgaggtgtgggggtggatcctgtctataatcactgtaagagtatagttaggaataattctatgtgaacaaactcaagtctttaagcctaattattaaaaaattacaggtcaagyaccataaatttgcctatgtgctgcaagagtaatcaaagagatctctacaaacaatgatttgtaatgaaaaggcaagaataacatcaataaaaaccatggtcacctgaacccacactgatgatgtattgtcaacacagagtctctcctggaagtgcaggaattccaggttgattgaacttgctcctgggcatggagcagggtgtctacagcaccagatgacccctggacttctcaatagaatggtgaatcaggaccattagtgaagtctaacttactaatactaagtgttggtaatttttttttgagacggagtttcgctcttgttgcgcaggctggagtgcagtggcatgatctcagcccactgcaacctctgccccccaggttctagtgattcttctgtctcagcctcccaagtagctgggattacaggcrcatgccatcacacctggttaattttgtatttttagttgacatggggtttctctatgttggtcaggctagtcgcgaactcctgacctcaggtgatacgcytgccttggcctcccaaagtgttgggattacaggcgcgagccacygtgcccagcccagtgttggttatttttaaagactcatcagttcataataaaatgcccttaatgccgcatacaaatgagagtctatggaattgtgcatccttcgctcataagagcttcagggagtgctccaagcctccattccctggctctcagtctttagaagagttctttcctttcacctcgctcaccctgcctgatgagatcaaacgaaattctggacagaggtgatgccagtgagccagggagccaaagagccaggtctttattctgtgttaggtggcttaatagtcattgctcctgctgttcctttggttgcttactatttctgggaagaattgttcatgtgccctgcatcctcactgtggtcccctctggtgaccactgacctgcccatgggcatggtcactggtccttagccatgatgtacagggtcagtagctgctgccgtctgccatctagggaccatataagtggaacctgaatcaaaattatcctctcacatctacctctccttgctcttccttttagggaatttcaacatgcttttttctggaactgttttcatttcccttctcaaagcagtaattgctgcctccaaaccattgacctgaaacaaaagctttttattccactgtactgtatcgtagtacacttgcaaacatgggatgtatggtttttttttttttttttgacagggtctcgttctatcacccaggctggagtgcagtggcacggtcacagctcgctgcagccttgacctacctggctcaagcgatcctcccacctcagccttcccaagtagctgggactacaggcgtgcaccaccacacccagctaattgtttaattttttgtagagacaaggtctcactatgttgcccaagctggtctacaactcctggaatcaagcaatcctcctgcctcagcctcccaaagtgttgggattacagacatcagccackgtgcccatctaggggcatatgatttttataacatttggagattattactgaagatgattgggagtcattaaagaagggagtcattgaagaagagtcttgacaatctttttaaaacactttaatatggaccagatattaggtggtcttaggaagttttttaattaaattacagttgcatagaaaaatgttcttaatttttagagactcatactgacatattgttgggtaaaatatggttgttatttagtttaaaatcatttgatgagaaacatatgggaaaatatggcaaaatgttcataattgttaaatctagatgaggttacatggtcattcattatacagttctatttttaaatttttttaataatagaaaatgatatagagataaatctccttgggtgttgatctagagggaagtagggagccatgttagtgaggaggtgaaggcagcgattcaggcagcgctggtgaggggtggagctaaaacagcaccactgcagagggagaggacagtgtggactgaaaagtatcatcttgtctgttgtcttccctcacttccacagtccaaagtgcttcgggagaaatggctgctgcagggcatacccgctggaactgccgaagaggaggaagccaggaggcggcagtctgaagaggatgagttcagagtcaagcaacttgaagataacattcagaggtaggtggcttccagcccagggaacccatgctacagtttttcagtgcagtaaccactgctctcctctaggtggcctttctcaatactgttaccttctcctgtacttgagaattttcttcctaaacaaagcacattgatgttgtttaaacttttccagatgacccagagttatgacacagagtactaataattttttatttttatttttaacttttattttaagtttaggggtacaaatacaggtttgttacataggtaaacttgtatcgtggggatttgttgaacagattatttcaccacccaggtattaagcctagtacccgttagttatttttcctgattctctccctcctccctcccttcaccctccaaaaggccccagtgtgtgttgttcccttctacgtgtccgtgtgttccatcattagttctcacttataaatgagaacatgcagtatttggttttctgttcctgtgttagtttgstaaggataatggcctccacctctatccatgtccctacaaaggacatgatctcatccttttttgtggctgcaaagagtactaattattgcactgggctgtaatacagcacagtgatggcttcatgggcccacaaggtgttgtgagcagcttgccccttcactaggtgctccctttgagttcttatattagctttcatctttttcctccttcgggtcaggttgttagctgttattgctgctgtagtgagtctgttttcaaatttgctgtatttggtcaattcgaaatgtgaaaactgtagtcaacagtcttgggattgaaatgaagagtgtggaagtgctgagtgagagcacctctgtaggttatgtgcccgtgctctaaaaattaactttgtattgtctgctttcactgctcagagagtggtttctttatggttctcaaccaggatctgatcacttcaatctgggagataagcgacctgtctgtgggcaataactggccaggctcacacaagagcaataatgtaggtttttacttgggagctatagccactccaggtcccaggacacctagccagagagatatgagatagggatggaaggtggtaagcatagatgccttagaaccaaatctgtccctccaacccatcccaccaaattctacctgaaatctcaccacctggagcttcatctctgtcttctgagcttatgagctctttttttttttttttttttttttttttagatggagtctcgctctgtcactaggctggagtacagtggcacaatcttggctcactgcaacctccgcctcccgggttcaagcgattctcctgcctcagcctcccgagtagctgggactacaggcgtgcaccaaccacgcccagctaatttttgtatttttagtagagatggggtttcaccatgttggccaggatagtcttgatctcttgaccttgtgatccacccgccttggcctcccaaagtgctggaattacagacatgaaccaccgcacctggcatgagctcttttaaaataaagggtaatagctaagctgctaccagccatttataaccaacagcaaattaagactctgagggcacctgtaatagtgtcactaaagggaaaagcaagccaagtaaatcccaaaggcatacgtcagcctatgtccctactttgcttaggtcctcacatgtcttaaagagctttcagagcagcttggctaaacattgtgaaggaaactggccaagaaaaagtttggagggtttgtgtgtacatatacatatgtatactcacacacacccgtgtacatgcacatgctttttcttagaatacaaaggataaaggctaaactgttaccaaccatttatatcatatacatatatatakagagagagagtaggtgttattatagacagaaggcagaaaggatttggaaaataggataaaattagttacatgaccttttctatttttctttttgtttcttttttttttaagagatgagatctcactctgctgtccaggctggactgcagtggtgcgatcatagctcactgcagcgtcaaacttctggacttaagctatcctccgacctcagcctctcaaatagctgggaataaaagttcatgccactgtgcctagcattattattattttttttttttggtagagaaagagtctcactatgttgcttaggctggtcttgaactgctggcttcatgtgattcttcccactcagtctcccaaagtgttgggattacaggtgtgaaccaccgtgtccgtcctattctgtttttcttaagtgtcactgggaaacatggtcttccaatcaaattggcagtttaaccttggcttraatgcaaatatgttgttattatggtccaataggtggtaactcgcacttgtagaatgagccattgcgtgtggaggctagagtcttaaactgagactcagtttctgggtaaattgaccattggaaggaggtgttgtgggttaggggctggtttattattcaggtggtcatgattatactcaaagaaaagttgttaaagttctttttatcctttacgtcctttacgtcaatggaataaagagcacactcaatgtatgcaggcagtctcacccatttagagctagaatcccaagccagaggaaggaaatcacaatagcctacaggggtggatggtgaggcctggattcaggggccatttcttgtgtcttagtcatgactttgggccaaatgggcactggatgtgtgctgagatgagctgtgctccctggagctgctttctgtaggagcaggactgtggtgagcatcgtttcctctgcagggccttctgagggaggagtttcttctaccctggaagtcagcttctgcttctcttcatcttgctggcatcttctctaccacaatggttattagtrtctttaatcttcaatcccatgggaagaaagagctgttatctctcttcccataaaggacactcagtcacctaagacatttctctgtagttgaacatagcttagttctcactcacagaatgacatttgaatagttctaaaggctcaytgcaaacatgagcaccctacggtgttacaaagtccctgtggattggctggcatggctctgctgatagggctgagctcacctacgtgactctaatctgcgtgttgcctgagtccactcttgtttaccctgcactaacaggctaaccatgatgctgtctctttctggcaatgggagaggtacaagagggctgagcagaaacaaggcctaggctcagactgcccacaagccatctgccaaaccaagtcaatgagcaagcccaaaaccaagggaagagacagccagccaacttttagtggaaggaacacagatcagggaagggtgaagaatggggatgaataattcagttttccaggagcatgattgttgaattgaaaactgcaagcattcaggaaaatggaccggcattagggaaactacagaaaagacatttaaaaagaaagaggactggctgggcacagtggctcatgcctgtaatcccagcacttagggagaccgaggcaggtggatcacccgaggtcaggagttcaagaccagcctgctcaacatggcaaaaccccatctctactaaaaatacaaaaattagatgagtgtggtgatggtcgcctgcaatcccagctacttgggaggttgaggcacgagaatcgcttgaacccgggaagcggaggttgcagtgagctgagatcatgccactgcactccagcctggcaacagagtgagactacatttcaaagaataaaaataaaaataaagaggactaactaaaacaatgcaagaatgcagagagaaaggaagaagagagtaagagagaatatgagtgacttcaagatcaaatttgcgatctgatctttatataataggaatcttgaaaactataagatcagatgcagaaccattaaataaaggcattttaagggaaatcttcattactcaaggcaaaacattaatctgtagatctttagatttgggccccctagtctaagtcacccccagcaatcaattagattctcctaaagagatacataaactggttgcaaactataaagtatattagtacagttgtgccctgaaggtattttcgtccttgttgttgaactaagaatagcttgaagacactgaaggaggaatagagaatagtaaccaaagaacaaggaacatttctacaaagaaagactaagggaaattgggccatttagtttagataacaaaaggataatggtatcataactcagaacttcaagtgtatgtaggatctaggccatgtcttaattctttatgtgcaggccattttgaatatggcaaagacttcaaataaagcatgcaaatttctacttagatgtctatttccctagatacctcctagaagaaagaacataatcaccttttaattcttattctgtgattctttacagtgccagtaactgtacaagaagttccaggtttacagacatgtttttttccaaaatgttatttataaattggtggtggtttggaagggcgaatgttgttcctctgccagaattattatatgtggtgcttagcttttgagggcagcccacgaagaaggaaggaatggaggaaggaaggatggaaaaatgtaactagaatattaaaccctgggcattagaatcacttgggaaggtttttaaaaataagaattaccaggcctcattctaggaaatttggatttagtgatccaagtaaggagtcctgtaatctgttttttaaaagggtgttccagataattctgttgtatggtcaggttcaagaatgattgcagtaaatggaaaaaaggatagaccataaatgaaatcccattttaatacctagaaaccccccaaggagagtgggaagtaaatcatgtttataagaaaactggcttcacacacaaggataaaggacaacccaacccttgattcagactgtttctgagccttcctactttgacccaaggatatgtgaaacctgctttggggattcctgtaggtgagagtagctctggcttagagctgaagtctctcctccataggccccacagtagagctaagctttcatttgaagtggattagaaacagccttggtttaccaggctaaagatgatccaggtcaggaaaactgtgtgctttaccaaaggccagaaaattctaccattcttccaagatttcttgctaaaattcaaagtaatgtggtcttgaaggggtgacaccaaagcagctgcaaaggaagaggaaaacccggctgccacagtggagaaatagattgtcattcttttgcacagcttttccctgggtaatgtcaggattatatttttggctccctggaaaccagaattaaaataggctaaataagattggaattgttgaaagcaaaatctgtagacgtttccttttttgaattttttgaatgtccacatcttctgtatgctttgcttctttttggagtgacgtattgagaaagcccaagagattgtttctggcttgggcccattgccagccattgtccgtgccattattgtgtgtggtgggtccctggaggccacatgtggacctcgggttgatactttcggagattgtaggtagttcgagccacactagccctgtttacttcatgtctgccccaagcatcaagtcttgttgtttaccttgtcactttcccacttaagattctctttcatttcactgggttttactaaagtgtttgaaatacagggtttttaacttcctttgattagtgagaaatatggggaaaatttatctcccaaccttatcagttgggggcagaccaaccccagtgaagatgagaaacttcatggagtattaaatgaaaatgggatgagctgtcacaaagccaggatgttaattctagctctgctgatcatttgctgtgtgaccttgggcaagtcttttgctctcttcagtctcagtttcctcatatcttcagtgagccatctctcrggatcttccagctctggtattctgagtttctctaatttgaggagttggttagagatctcttttctcaacagtgtacctgtkccgagaaatgttactgttatagaaggaagtggttttggaaacgggtcagagtggaggaaagaggttgagttctcaaaaaactaaaggctaggtataagtaactgattcatcacagagatgactaattcatcagaacagctgtctgttctaaaatatgtcacatcaaataktcattgaataaaatattgaagtctcaactgctaacctagagagagccaagcagcttttaaaaaatcaggatagaagtgtacttttcatttccacattggacctgtgattctctgagtacctgtgtgggtctctggtaaataccagaattcacttaattttccatattgttaggaggctcaaagccaaaggcgtagagacattaggcataagcatatgtatcttattaagcatctgtatgttatgttgtggggtttggcaaccaagaagatgacagttacttacaactgttctagaaaaggcaaccactgaaacattcattgaaatcacaaaggacacttgcttgagattcattgtgttcttcacatttgctatttttaactccatgattcactgttcttttgagcagggaggggaacactccacagtggcattccacatctgtgcacttccagccggggtccccaccccacgttcagccacatttgcagcccaattattgtttccattcttttgtttccttccaaaataaaactatatatgctatgtatacagtaaactatatagtagtgtctctatattgtgtaatatttcctgttttgtcactcccttctgggtagcggcctagcttttctgcctccatttaattcattaattttctaatttaagccttgtaatactcccatgaggtagtgatgatgatgatgatgatgaagagagaagagaagcacaggaggtgaagtaacttgctgccccccctaaaaaaattcaatggaaggacatacaagatgaatgaaaaataattttaaaaaagtgaaagagcaagtatttgaactcaactctgcctaattctaaagcatgttctcaaaaatcccaacagaagttgttattttaagctaaatttttttgagacctctgatattgagtgaaattacactaacgtgcacctcgtgatgtaggaggagggacaggtaatgtgattctccctcctcaacctccacacatgcttcttcagaaggcggtgcatcagacgcaccatgactctggaggtgccggtcttcagcctattgtgggtggtcatcatgatggtgagactgcccccttcaggttctttcatgaagtgcaggtttcattttgggcttggctcctttctgtctcttttggaagccctttgttcctgattgcactttctagcctgtgtacagtctaaacctctgcgggaaacagtgtgtgcttctgaaaagggctccagcatagcaaactcactagaaagccggacctcagagcttgaccaaacttggctggagtcctagttctgtatttacaagttgtttgatcttggacaagccatgtaaactctctggacttaagtgtcctcgcctgtacattggggaaaactatacccaccttgcagtgctgttgtaatgtgtagaggtcaggtgtgtttgtgaagtgccaagaacagcaggttgtcagtaagaatagtgctgttggctgggcactgtggctcatgcctgtaatcccagcactttgggaggctgagacagatggatcacctgaggtcaggagtccgagaccagcctggccaacatggtgaaacctcttctctactaaaaatacaaaaaattagccaggcgtggttgcaggcgcttgtaatcccagctactcaggaggctgaggcaggaaaatcacttgaacccaggaggcggaggttgcagtgagccragatcgcaccattgcactccagcctgggcatcaagagcaaaattttgcctccaaaaaaaaaaaaaaaaaaaaagaatagtgctgttcttattgttgtttcttccatccccctacagcagagtttcttaacagctgtgctattgacatttagggctggatagttatttgttgtgagtggctgtcttgagtattgcaagatgtttagtagcatccctggcctctacctagtggcttccaggggcaccattgccctttcccagtcatgataataaaacatgtctccagacattgctgaatgttgccttgggggacaaaatctctccaagttgagaactactgctcaaaagcctggcattatgtgtattgatactaagatgagaatctcaccaccgagtagttccagaatacagaaccctaaaaagatttatgaagataacattagtgattctcagtgcaaaatgacaaagtgtttcagttacttgaaaataaaaggcttctcttatgcactgagccatgaaagtctgttcagagttaaaaagaaatagttgcttttttggtttttgcattcagtattgtgctgcttttgcaaaggcaataattttatgacagttcataaaaccatggaatcttagagtatgcataactgacatgttatgcggatcaactcctatctgattcttgaatttgcaatgaacgtaatgagtgggagtgaaaaaacagtctctccccaaagcctgaaagtgacaggaaactcatttacttgcaaaataaaacccaagtatatactggaacaactctaattattacagaggatcctcctttgggatgaaagttttgttccctgcagctcctaccctctctctggtccctgccctatcctccaaggaccacacagaaaaagccctcttcactgactgaaaaaatctagatgcttagggtttgtggtcagctttgcaagctggcacaggtaagggaggaaacactctgaaattgcagtscagcatttcaacatttcatgtgtgttacttagcaacaatagcaggaggcctgccagatgtaccagagtcatcgtgcctcgctcaggttttgtaggatccattataatcatctcattattggtctggcaaattgggtttatagtgcccagaactatgaaaatagtagttgaatttcttccatacactgaggccatgtaagagccatatttgggaaatacatgcatttcccagccctcagaacaattgctgcaatggaaggaattctgcaaagtcaacttttttggtagccagttccaggctttttggcctatgattgccacaccccaagttttctctctacaaaaagctttgataatagtctttttccaattttaggtcaccttgcatagcccctctggcttgtaacgtggtcatttccaaccgttctacattcttgatgaaatgaaaacagcaagcttcctgttgacatactcttccacagttttcatgaattatgcattttgaaggcagcagacaagatggtgtctcagtcctttccagcgattctccagcatggaggtcttatttggtacatccatcacaagggcccggagccaagatgatctcttgagcacaatccccacttcgtgtttccccttttcactgtgtaggccacagggaagagtactgtgggacccgaggctgcttgatactcatcaaggcccgcttcctccagccttcctagcttctctttccctcaggtctaggcgtggagccctccaggacagcgaacgggtgataaaatatacaaactgtctctgattatgggattttggctccttagccaatgcatgcaaggatggtagaaaaaacactcatcttccttctactatcctaaaagcaacttccgacatcaagaatttttttggatctctcatccaaaggtataaaccttaacagtgggaaattcagaccaggtgagaggaaagggttacacactaagagatgacttaggtttgggtagtttcatcaggagaggtctgcctgcatcctggttcctgtccttgttttgggaaactctttttagcatacttggagtacatattcagttaaacttgcaaagtgaagaatcagagaatggaggcctaaatgtgattcacctgaggccacacgcagagtgaggagataccagtgtgcttcctgcagaagcatctcccacatctctgccaagcctttttatctcctttgaaacagaatctctaatggaataaaccactccagggatcctagagtcttgtgtttgttcctcctatgcagaaaggcaaaggaaaaaattaaataatatctgaataccgcccagtgcacagagagtacctgtgaaattacagggacattcagccagcaaagaatgtccccctggccagggtgcctggaggaaggcttttaagcattaccatgctgtacagcatggggctgccagcttgaccagattctagctggaaggatcaggcatctttaaagaccggtagcattcagggccattgctgggccacatggctcctttgtgcaattagaaaatgcagttccacagggtaggcagcacttagaaagccactggctggacttcacctccctttgttcccttggctagcatcttgggcaacaacattctgtacaagcatgcaccatggccctgctggcttcttggtctccacgtgcctccttcttgttggtcattaaggttatgccattttcccccattattaagtaatgtcaggtaaggtctgaggagatggagatgaagacttttacaggtcgcaggggaacactgacatgtcactcatcattttgtgtgtgtgtgtgtgtgagacagagtctcactcactctgtagccaggctggagtgcattggcagaatctcagctcactgcaacctcccatctcctggattcaagcgattctctcctgtctcagcctcctgaataattgggattacaggcacccgccaccatgccaggctgatgtttgtatttttcgtaatgatggggttccaccatgttagccaggctggctttgaactcctgacctcaagcgatctgctcaccttggcctcccaaagtgctgggattacaggtgtgaatccccgtgcctggccatcacccatcaatttttaaatggtggagtagctcccatgatggatgttatgaaagggtctatgggtgcatatgaaagggagtggtcattactactcagtccaggtaraactccctggatggagggtgaagacaatgtggtttgagttgttaggtaaatgtttccttatcatttttcattatatgttacatttacattctgttcatccctaagatataactccttaagattacatctctcagatgtaaactccaccagagtaaggactgtcttggttacctactgtgttcatttcctgagactgatgtaacaaatttctacacgttcgtggcttaaaacagctccagaggccagaagtccaaaatcaagatactggcagggctgtgctttccccagagcatctagaggcaaatccttccttgcctctctcagcttagtgggtccagacattccttggcttgtggctgtgtcgctctaatctctgcctttgtcttcacatgggcttctcctcttgtctctgtgtcttctcctttgtctctcataaagacccctatcattggatttagggccctcctaaataattcaggataatctcttctcaagatccttaaattaattacatctacacagacccttttatccacataaggtcatattcataggttctgggggttagggtgtggacatatctttctagggccatcattcagtgtactatatctgagtgcctagattactgttttacacctaggaggttgctcaataaatagttttcaatttaatttatatgtttcagccttagtttatccataagcttgccatgaggttcagaaaccatcatttatatccagagatggtataaggcagtggttaggggcatgaacatccgcgtaatacttgctgggttcaagttcagaatctctgcttgctgcctgtataatttgaggcaagttctttagcttctctctacttcagtttcttcttctataaaaagaaataataataataataaagatcaactttattggggaggggtgactattaagtcaagatatgcaaagagtacccagaactgtcttggactttgtgcccaataggttttggcttttattataaaaataaaagaatgatatgacaatgtacaatatataaacaatctcaaattgtttgattttatcagactccctctccactttcagaaacagctgagagggctgtcactgcactgagattagcatggcattccagaactcgggcccrgtaagcatccaggtccaagggtgccttggaggggtacacctcacctttgcagtccagggcagaggaaggcagggaggctaggagtgcagcactgagagagcagtggccactgccttacaaggccaagaagcgtcccatctccccaacaactgtcaggttccttcctgccctggraacagctctaatctgtctgtttaccacctacctgccagccttcagcaggaattccaggactgctgggcctatcagctgaagtagaggatgaaaaagaacaaatccaaaggcagaagaaataggacaatatgatagatggatttgacaagaatccagaccaattgtgggcagaccaagttgaaaagcgtgagaggctagagttatctcagcaggggtttcgttttgttttgttttgttttgttttgtttttgagacagtctcactctgtcgcccaggctgaaatgcaytggtgtgatcttagctcactgcaacctctgcctcctgggttcaagtgattctctcgtgccttagcctccagagtagctgggattacagttgtgtgccaccacacccagctaatttttgtattaacaccgtagagatggggtttcaccgtgttggccagggtagttttgaactcctgagctcaagtgatccatctacctcagcctcccaaagtgctgggattacaggcatgaggactgtacccaaccatctcagcagttattttaaaaaatgtttagccttctgatgagaacacgtggacacgtggtgcggacaacaaacactggggccagtcgagggggctgcggggagagagatcatcaggaagagtagctaacacttaggtggtgggttgatctgtgcagcaagccaccatggtacatgttcatctctgtaacaaacctgcacatcctgcacgtgtaccccagactttaaaataaaagttgaaggaaaaaagttcacttttctgctttccagttgcttatttaaaaaaaaaaaaaaaaaaaaagaagcatctggctgggtgtggtggctcatgcctgtaatcccagcacttcgggaggccgaggcaggtggatcacctgaggtcaggagtttgagcccagcctggtcaacatgatgaaaccccgtctctactaaaaatacaaaaaattagctgggcatggtggcgggcacctataatcccagctattcggaaggctgaggcagggagaactgcttgaacccaggaggcagaggttgcagtcagccaagatcgcaccattgcactccagcctgggcaacagagcgagactccatctcaaaaaacaaacaaacaaacaaaaatgcatctaagttgtctgagtgatgtcctgctcaagtccataagggacttgctttattacagaaaagtggccaaacccagtaatattgaaagtatggtccagggactgcttctggtcaggcaactgtttattaccagtctgtgacaaagacagaaattgccagtaaggtgtttagaaactttaatagcaatatgatatcccaatgggtgatcaatggacccatcttactgaatagggtagagacaagtttgagtgtcgttgcactcacgtggtgagctgcatgtgtcgtgggctgagtgctagtattggtctgtgatggattgggatcagacccttgtccatgaccataaaatcttgagcaatattgcagcaagccaaatggcaaagatgactatgtgccccaagaccacacttttttttcctatagtttttttaagagagacacggcctcgctctgttgcccaggctggtcttgaactcctaggctcaagcaatcctcccatctcggcttcccagagtgctgggattacaagcataagccactgtgccaagcctccctaaatgtttaaatcttgtcattgccaccattctgcaagatttacctttgaatctagaaaagaacttggagtctttctactaggcctatccccacaccacttcccatcatagaggtgaagaacctgaggccgggacacaccacaggactctcagaatgacacagccagtcagattttcctggcacaaaacccagtgttctttcaaagccaccattcttttcctgtaactaatgcaaaagcaaatcttagcccatgacagggaatcacagattccaaatgagtgccctcagaatgactggtttccttgaaagcagctgtttcataaacatgactttgcgggggcakctcaggccttccatgcagtggagtctgctggtcttggggctgctctgttaagcaaaggatgggaaccaaaggtactgacattttaatattagccacacagatgtcttggcttgtaatctggagaaaatcagtcagtgtcccagctgaatctgtaaataggaacgacaataagatttgctctctctcgggacatcctaagaatttttgtcaggctagaagaggcagcctggagagatttgtttgatctgggaaagcagaagtcaaacttggtttttcattcggtaagatccactgtggttaaaatgtggtcagagggctcattcagcctcctacttcaggtcgaactatacttaccttctcttacttttaaagaaggaagggagattctgtaaatgagtggcttttcttttagtcagtgctgtcatatgccatgacaatattgtatttaagtctgttctcacagtgctaataaagacatacctgagactgggtaatttataatggaaggaggtttaattgactcacagtttagcatggctggggaggtttcaggaaacttacaatcatggcagaaggggaagcaaacacatccttctttacatggcagcagcaaggagaagcgctgagcataaggggggaaaatctccttgtgattcatgcctgtaatcccagcactttaggaggttgagttsggtggatcgcttgaggtcaggagtttgagaccagcttggccaacatggtgaaaccccgtctctactaaaaatacaaaaaattagctgggcatggtggcaggcacctgtaatcccagctacttgggaggctgaggcaggagaactgctcgaacctgggaggcggaagttgcagtgagccgagatcacaccattgcactccagcctgggcaacaagagtgaaactccgtctcaaaaagaaaaagaaaaagaaaaagaaaccattagatctcatgagaactcactatcacgagaacagtatgagggtaaccactcccatgattcaattacctccccaccaggtccctcccatgacacatggggattatgggaactataattcaagatgagatttggatggggacacaacraaaccatatcaaatattaatagagtctggcagggaggaagcatgacttcatactggtggtgagtcagaaggggcatcttcatattttaaggaaggtggcacttagattccaagtgcgtcctgtgtgcagtggagtcatatgcagctctaataaagaacattattcaggccaggcatagtggctcatgcctgtagtcccagtttgttggcagcctgaggcgtgaagattgcttgagcccaggagttcaagaccagcctgggcaacatagtgagacctcatctctacaaaaaatacaaaaattagccaagcatggtggtacatgcctgtcgtcccagctactcgggaggctgaggcgggaggatcacttaagtccaggagtttgagtctgcagtgagctatgatcatgccagtgcactccagcctggacaacagagcgaggccctgtctccaaaaaataattaattatttaatttaaatgttcgaaagaacattatgcagatgcttctcaggcttctcttcagatggcaaaatctcactggttttcaaatatcctaactgaaatgttcagttccagctatcttttgcttcatccagtaattagtttcaagtttttttttgcctctttttagatatgaatcccatgctaggtaacaaattatagtgacaggaaaatgtggatttttccataaagtttaaatattcaccactcaaccttttagcagaaagctctgggaccaacctagcataagtatagagttgagggttaagagtaagcattcttcccttcgtcacttatgtggccttgaaccaattagttaagattttgtgcctcattttcctcatctgcaaaatggaaataatcataaggtatactttggggattagtgtgaggggcaaatgagttaacatgtataaattgcttaaaatagtatttggcagccaggcttggtggctcatgcctgtaataccagcactttgggaggctgaggcaggtggatcacgagttctggagttcaagaccagcctggctaagatggtgaaaccccatctctactaaaaatacaaaaattagccgggcatggtggcgggtgcctgtaatcccagctactcgggaggctgagacagagaattgcgtgaaccccggaggcagaggttgcagtgagccaagattgcatcactgcactccagcctgggcaacagagggagactccatctcaaaaagaaaaaaaaaatagtatttgacaatgacgatagctgctgttattatcatgacccaaatgctatatttgcttcaagcaaatggaatgattctcagaccaaattttttcaccaggcatttattagaaggaggtttcatgtaattctgaattatgctccgaatcatattcacttcattcaatatgaaaagcaagtatagatttacagtttaattgttttgagacagggcaggattcctaatcacatttttagaaatgacttttgtgtctcatattgttcatctcctctatcctctcaccaagattccactgtgtttcataccagcttgttcagttgaacaaggtggagaagcccatttactgtttggattaaatttttttatcaccagtgtatgaggatttgcattaaataaattataggtaattacattaacaaaccaagaagacttacagttaaagagggcaaaaatataatttacttwactgctctatgaaatctatttgtggatttctctcttctcaaaggagaattaatcagagaacaactttgttgttattgttgttgttgtcgtttaagaaaaaaaagaaagaatgaatgaaagatcacatagtagcagtggtaccctattcaccttgcaacagttgtactctgcgcacctgccccaggttatagcaacatcaaggtcaagctcccaatatttcaagtacaaataagacttcacctgtgcacaaacatgtgcttacacacttccatcctcctgaattttctttccagactrttttacagataaggaagcagctctcaaaagacctctctcagacatttgaaaacacattttttttcagagtgctaaattcatgcttcttattttatatatgttagaaataaacacataaataataaacagtcttgcctggactggttcatgttcaattcataggcrctgagtattctttattaggacatactcactattgtttgttgaattattgcacttttaagaaatcaatctgaagattaaacattaggagtctcgataaaaaacaagtctctatactttatgaagatcttaggaatttctaactgactttggaacagccatttgttaaaaaacactttcccatcccaaactccactgactccatttttcttctgcactaactctcccttcctcctcccccatatttggagcagcgtctctatgtcccattcactctcctacacctgccaaatcaccagtgactatttaggggctaagtgcaaaggagacttctaaatcctcactttcatcaactgttgagcagcaacggaagctgctgaatgctccctatttcttcttgaaacacactctctccttgtttacttgagatgacactatccttcctctgtccatctgggaaatattggtgctttgaggttcttgacttggggctcctttcttcacttctcccattctctgagtgacattgtctgttcccatggcttctgaaatataggcattctttgatctaattttttctccagacctacccatatagccaactgccccctaaccatatccatttggatccccccagacacctataactcagcatgctaaaaattcattagtcattactttctctgattgattccttttcattgattcttaatctcattgaaaaacatcaccatgcacccagttgcccaagtctgaaatcaggacattgtccttgcttcttttcaccctttcaaatcctctatctaatcagtaattttatataataaaaggattcttgattccttctacactttttctttcccacttccatgacagtagtccaggccaccattatctttcatggggattgatgcaagagcttctcacctagtctcccttcccctagtgttgtgtccttctgacctaacctctgccacccagcagaagtatctttcaaagttcatatttgatgatgctactctccagcttcaaaccctttacctgttttccttggactataagataaagttcaacttccttaatttagcttagagagtcttttatgatrtgacctcctcttacttctctggccttgtctctcataattgtgtcattccattgctgaccactccagcaactacctgccattccttggatgtaccaagctctgtctgtgtcccgttctttggatctactgtcccttctccaaggaacgttcttcagctgctctttatgtggttaactcctactgaaccatcaagtctcagctgagataccactttccctgagccctaaaccctggtttaatgtttcctgtgggcatatttaccttagagcttactgtgtcatagtacattggaagctgatttttttctctatcctcctctagcctcagctgcctaggggtaaasacactacagtgttcacccttgtattctcagatcttagtacactgccaggctcaatgggttttcaaacatatttacataaagaaagaaaacaatgacaaaagtrcagatgacatgcccatggatactctggacataaatgcttgtaatatttctctctgtaagcgtttccagtgggaagttcagcttttgtctcaattactctgattggcatgcaatcatgacaagaaactaaaggaaggagattgttttcttgacatttactgagaagtatagacaagtactgccatgaacaaacattcttgctaacaattcttgctctaaattggttgatataacatccacttgagtcaaaatgattaagtaggtatccattgagtgtcatrcatcgcaatggcaaagcattggagttacagaaaataagtaaaatcatctcccttgctcttacagatctgacagtctaggcacccaatagatgggtaaacaagtactgagagatgtcatacttgtcctcaagatagtagaaattcaagaaagtagtgaccatggaggaccttaggatttgggcttttaccccagtggtgtttggctgagttaatctttctaaaatgtattcatcattcaatcaagtgcttcttctggaggccaagcataattagagatacagagatgaaaatgacagtcattaccctcacaagacctataatctacccaataataatgggaggcaagcctttagagttttttaatttggagttttcagagatttcctgaagcttctggactgacgtttctattgtacttgagtcccatcatttgacattagaagatctccttccaagaaatatttcttaccaccaaaagacagttaactttkacttcagacagaacattctkgtctgcacccagaacctttaatacctgaatcttttaaatcagtgatggtctcttcttctaaaaagtaaaaggtaaatcaaattcagtatgtctcaattaattggaagggagtttcaagctcataggaaatgaactacgaagccatgttgggatatgaactgaatggttgctattgagatggagcaaatgtacctggatatcattaggtggaaccagactggaaaatgggggtccttccttgacctcagtgaagatttggccctttcagcctcaagtagtatcccagctccagaactggacctgagttactggataatgctgtcattaggaaactgtgaccacctaggagttggactgctaaatgggcaatgtcagcaggytgttacagatactctatgcagaccaagcttatttggctcttctcagctcagccacctgttgtaaacagctgagaggggcttagctccacgtggaggttgtcactatctctggtatgttgtctctccctgggaacggacatgagtgtggaaacagggaggacacagttgattcctgctttcactgagtcactctgtccattaggagaaacagtccaggcatggccagccaaagggaggttcttcgcaggatcttctgtctctttgaagatgggataatctcaggcctaaccacagaagcagttctggagaagagtcagaatagcagattggaaacagctcacaggggcctctgaatgctaagtggagggacttagaatttatcccagaggccacagaacactattagaagtttcagaggtataataaaggccgttgtgaggttaggatgctggttcaatgtcacaattagagcaaggcaggaggtagagaagtcaagggcagactgggaaccagctgggcaggccactcattttggttgaatttggcaagactgaggaagacaatctaccaatagaggatggatgagaacaccagaaagcaaataaaacaagtcattcaaaaatcccaagatcatcgtggctgggccagagaaagaatcagacagaagcagcgcacggctctggagagttgcagggagaagcattgctgcatccgctgtctccttttctttttctttttttaaatatcagcaatatcttggatctgaatagagttctatcacagattagggtttctctttccccagggttcccaaagactgagcaggatcttattacagatgcagcgaaaagggtacgtttttcagtatcagactgacctcatctgaatctcagcctcacatctcattaactacatgggaccttgggcaagctacttcacccatctgcaaagtgggaatcaatgatatgtatctcatttggctgttgtaaatcttaatcaagttaatatatgtaaagtgtctcatcagtgcctagcgcatagtgagttcccagcttctatagcaccctttcatctttctctccttacagcatcagagagcttgtcctctgtggctcccgtttctctctggccagaggcagagcctccatgggagcatgggagggatataatcagaacagcagcattctttcattatgacgtcaattcagccatccctcaatttactgagcccctgaaaggccatacagtgagccatcattgtaatgaagtaaaagtagctggatactccaggaagcccttctagtggcactttgttaggtgagatgtgtcagcattgacttcttttgtaagtgctacttctgttgaattcaatgcgttgaaaggtggaatgcattgatgaatgtattcagtgccttggccacttctcagttagcttttagagtagaggacctcatggccacatgacagagtctaactgtcagtttccagacatttactgtgcccttggccctgcttggactttggaaatccaaagatacatatgaccgacgcctgctctgggaggaattccctgtccatgtggaacacatctatgcccttctggtccaagtgagaagagaacatgaaggagcaagtgtgcatgcccataagtgccggtccctactcagttctcactcagtcccacagatacccaggtctactttatgtaggtccttgtgttggtttctggcattgctgagatgacagaggccccagtctctggagcctcagagatttcatggacacctttttctgcttgagctcatgagccagatatcactcctggcccaggtcactgggttaccagatgcacgggtgaaagagctgctcttgagcaaagggcctgggacacacatgccggagaagcatggtgagccagccgcagggaggaagagcactttgcaggagcatgctgtgcggggtcttgctgctgcttttcagaagcaggagagccatgagccttggggttcacatcagcaccgagactggcctttggtggcagggaggatatgcgtaccgggaggggttggccatactggaccacagggccactggttgggttgttcataattgatctttggggacacttactgcaacccatttattaggtgccccctctaaagtgatgatctcaatgaagatggttcacataggcccactacttctagaaggcccgaatccctggaccttcccaaccactttttctccctgttcctgggttacatggcttagctggatatttttgcacacagcattaagggcaagtgcactgttcctttgaaaacaacaagggaacaaggagttcagtgttgtggacatttaatgaactttctcctcctaagtacacaataccaaatcagcagaatcacagctgtctcctcccagctttacctaaattcccacatgtgctacctcagttagggaactatgacttcacctgccactagatggccctccatgtgcacataagccgctcccacatagcgaacttgcatcagattttctggatttttttttttttttttacatgtagacacacatgtgcatacacaatcttaacttttaccatccttgaagccaataatcaacactttagttttccttctggcattcaaatgatagaatgtattctcattctctggaaaatcagtttaacatcagaatctacagatattcctgaatattgtgggccacaaagcacatattaagatgaatttgaatttattctattaaatagtatgctttggtttatcttataaatgytgtatttaacagacttgtttctaaattaaatttttttaaagcactggaagagaaaggaagyacaaacatttgaatagtacttgctccatggaggcgggcagtgttctgaggtattttaaacattagctcatttaagcttcataactttgatgtaggtattccatatgcatcattataaccattttatagattgaggagaaaatcagattgcagcatgaaaggtgtttagattcccttttgccttcctgtcaattttcttacctataacatgggaataaaataatccctaattgctgtgaaaggatgttgtaaactctaaagcattacacaaatgttgttattattattatgacttgggtttcatgggaatataattttcttatgtgctcaggaggcttgtgatcattcattcattcacatgaaaacatttatgcaggtcccaggtcattgcctctgcatgagacgtctcataccgagatgcctgtactatttctaaaacaaatctagtctgtcttgaactctcttatagctgagggttccagggaagttgctgtgtgctttcagcaggtaattctcccttagtctcaggatttagaaatgatggatgtggtaggacaacttcaggggtgggacctctgctgaacacagaggtggccggtgctgatttcacataagccaagccagcgggaagaggcaggctgttttttaaaattattattctggagcacgatgtactatctctgtatccaagagttcacatttcaagtggactatcagatcatctctgtgacagagggctttaattaaaagcataagtctctgggtggattttaagtggcattgtttttctttggacgttatgcaagccacttctgtgctgtaaaagggcttttaaaatttggcttaaggaaatttgctttacccctcaggctttgatccctgcgtgtgaatcattttgtatctggaggttccaatttgcagtctcctgggtgtaaggaaaattctaccctcacagaacattttggatttgaaaactgagaaatctgcatcattctcgacataatagctgttgtaaaatagaattagggctgttaagtctatagggataaagttcaccaaagaatattttaaactttagttttagttcctaaagtttttgtctccaactcccataataaatgtactgggacagtgacctacccactcaacacctgaagctcagtgttctctgcactcaggccaggtggactcagccatcgaggccattgtccctgtccagcctcccagggggcacgcatgagccagggccaggatacagatacttctgcctcaacaccatctgtaccaccagaaaagggccccaaaggcccttctcactgccatttgtaaggcaaaatgtctctattttatctaagacaggaaaaaggcagagagatgccagagagaatgcaacgactgtgcccgtgagaaaccaacagtgcagggtggcgatctacccgcagcacatgcaggatgcagcgttagatgctgactcagtttctcagccatacaggagaaaagtttcagcatttctcaaactccatgaccatccttcagtcggctaccccaagccccgttttgctgcagccgggtgagggcagtaatgcagctcagtaggttaaggggccaggctgtccttggacttcagatgatatcagttcagtccctgggacatcttaaattagggcctcaagcttcaaattcatgccttggccaacacgttaccataaatgatcacagggagaagaaacagtcaggccagggatggtggcaggttcctgtaatcccagcattttgggaggctgaggtgggaggatcacttgaggccaggagttcaagaccagcctgggaaacatagcgaaaccctgtctctactaaaaataaataaacaaataaacttttttacaaaaaagagaagaaatggtcagtttacgttgcatttccttcttttcctcaagaagaggtgccccgtggtgcctgggacagctgggccatcacatggaagtggctgagaggtgggctggaaagaagaggaaaatccagggctcccaccaaccccagccaatctctagtcactgggcaacctcaatctacttctggtcatagttttacaattttgcgggggtaggggggatggaatcttgctctgtcacccaggctggagtgcagtggtgcaatctcggctcactgcaacctccaactcctgggttcaagcaattctcctgcctcagcctccccagtagctgggattataggcctgtgccaccatgcctggctaatttttgtattttccgtagagacggggtttcatcatgttggccaggctggtcttgaactcctgacttcaagcgatccacctgcctcagcctcccaaagtgctgagattacaggcatgagccactgtgcccagcaatagttttacactttaatattgccaactttttttcagcccagcctgtgcagccacacaaatgcaaaaaggttagcttaggaagttgtcaacatcattatactataaaaatcaataaatggaaccttcttgcttcccacagtagtccatgctaagcttggcttcaccatcccttgcttggacaactcctaattgttctttatggtttcactctgtaaccctttcatacatccaaatccgttcttttcacatctgtccacatggtctttctagaacatagccaatcctatcactgacttaaagcaaacacataaacaggcagacagacaaacaagaaactcaaatggctttctgttactttccgaatcagactcattagtgtggcattcaagagccatcatatcctgagcctgatcctccctgtcactttctttccctcatgagtgcactcagataggccagtcctacagaggtcctcattcactcacttgagcctgccttgcacatttctgcatcaaagcccctttgtccatgttatcatcctagcttgaaatgctgtctgaacacctctatgcyttgatcatttttctcttcaagatcctactgacatgttccaacctcctgaaatcctgccctgcctccccrcaagcagagttactcagactctcttctttgcattcctgcagcattttggtcttgcaatttgagctctactgtgcactgcattgtaactattcatatagcttcctccctcatgagatgatgaatttctcaaaagtagagactgggcagctgttactgaatatagcccaacacttgcttgataatgctcgataaacatgaatgagtgacccagaacatttcaaacttcccttccaagacctgaaagactcatatttctgggtgttttaagctctgtgatttctgctctggtcacctgggccaggaactgcctgcctctattttcatttcaggcctttctctctctgccagatgccttgatctctgagccgagtataccttgacccaaagccatgatgcagccctcagcttctgagaggaaggggtagggttcagtagttgcgcctctgagaacatgacagagaacaatagcaggaagcagccaagcgggaaacaatcagcccggcacaacccatgtggaggagcttcctgattggcttgatctggtgggagcaggaactcttacaataactctggaattatcccagtgggatgacaaatttctccactgaggagaagctgtcacctggtaatgtcaagcacggaaaacacagttagcaaaaaacaaaacaaaacccaagacaaagttctcttgaggaagagcagtttggatcagttggaagcctcccagccactgccatagcaccccatgccgacctccttcctagtctctgtttcaggtacaattaagtcgtcatctctaccttccggatagatatcattctgccgtccatggctcaaaggtcagaggtgctgtttattctttggtgtccttttgggtagtttagggaaatccatgctgtaggtgaccacaagagagaatgttcccttttagaactatattsattgagcacaggctgtgtgcaaatactcttctaggcactgtggatgccatagcaatacatgctgtttctgctttcatagagcagtgatttccaaatcctgtgtatcctatggaaagaccaagccaggcaaggggtggagtgacaggagctcccagtcagctttctccttaaaccacagcagctccctttgatcaagatgttggaaaagaaaaatctaccccaaaaagaggaaatgctgaaaacatttggattgggagtggtttcatttgctcttaggcaggacacactgcagggtagcagttaatattctaggctctagctacaagcagacctgggtttgaatcccagctctgccacttactggtggaaggtcataagttgcttgaactctctcaacctcaagttcttcatctgtcaagtgcgaataacagtagtagatattttaccaagtgcaaagaattgaataatgcttacaaaccatttagcatatcatctggcattgtctattacagtaaatgctcagtaaatgtgaactattttacccctgttgtttgacgttaattttttttcaatgaatgactcattgagatactaactcatgcgtcttgaaaacactaccagtctctccagagtaacctccaatatggacaacaggcaaaaatatggtgattattcccagtttgggcatttgtgaaagatgtggctgaggctgtatggatgcgtgtgcacacacmcacacacacacacacacacacagaggccgatgggaaaatctaactcagcaggaaagctatcacagagcgctggatttaggcacaatgagtaaacagggatttggaagagaggaatgcaccacataaacaattttcacaatctggtatgaaagcccagatgcttcctgcatgaaggggtgaactcagagagcgtcacagggcaaaatgaagtaaatgctgagactgtccatcattctggcccaattcctacatatctgtgcatcttctacttatggttttatttaggtgagaataaataagagtacctcatagtagataagaatagtacattacacacgcgcgcacgmacacacacacacacacacctggggttagatgaaattgtatatttggggaacttggggtaaagagtacagagccacacagcagttaccttctgcatcctcctgcttcagagaaagcaaataagaccagtttctttttaatctgttgtttttactaagtccaggattgatgttaatttgaatttgttcttttaagattcatttttgactgaaagaactgagccggaaggtctgcttgaggctacttccagttgagaaacaatttatgtgttcattgagacagtcatttactcaaccaacacttactgagaactttcaatgaggcaggttccttgctagatacaggccagctagatgctagaagccatcatcaaaggaagatgaaaaagtgatggtaattatcctctagaggtttgtaaactggagttagggaagggagcccaaaatccatgaatgagtgattaaaatacagtgggataaagttggtggtagaaatatgtccatgagatatggcagcaaagaagaagagcaccttcatgggaaaagtccaaagaagacttccataaagagatgatacctgagcagatgctttaaaaatgagtagtaattacccatgggaaggggaagagagagaacaagggcaatccaggcagaggggtggtatgagcaaagtcattgagccaaacaaggaaatcttcatttctgcaggtaaatgagaggctgggagtgtgtcatatccatgagctttagcagagagcccatgaggggttttcagcaggggagtgctattgtggtgtgtctaggcacattctggattttagggtgatggggctgcatagaagcagagagattggttagaaggttgttgcaggcatttaggagagagcctatactagggctgaagagaagcagctatgaaaagagatttgtggggcaaattggcttggtggctaataagacacttagttgacctggtgactaataagatacatgtacgtgatgatagtaagcgagggtcaagccagaggtgaagacaacatctaggtttccctcctaagtagaatggattaacggtggtaccagcatctgagctagagaatagggaggagcagctctatggagaaagatgagtttggtcctgtatatgttgtgtatgtggaccatccgggtggagacattcaaaatacaattgtacataaaggctggagttcaggagagatgctgaagatatagtttggatagatttaagcatgttcggtaggaattaaagcatgaggctggacatgagtagccaagaattaaatgttaatcaataagaacaataaaacaaataaacctttagtggtagagtaggagaagaggtgcccatatggagaacatggcgtcatggtctcttcatcatggaggaagagtgatcaaatatgtttttaaaaacgaagaagtcaaacagatccacaccaaagagggtccgctggacgtggcagtcatggacttgactaggagcagacgcagcagggcatgagggcagagggactgaggctgaggcatggacttgactaaaagcagatgcagcagggcggtgagggcagagggactgaggctgaggcatggacttgactaggagcagacgcagcagggcggtgagtgcagagggactgaggctgaggaggggtcaggatgtgaggatgttgaggcagtaagagatgactggccttggggaagtctggaagagggattcagcagcaactagaacaggatgcagggtcaagagaagttcacttatttttagtatggaaagagataattcttgtttattgactagcaggaaggaggcatcttggagagaggtgaagacacaggggagaggggatagttaatggggtatcctcccagatcagtctgcacaagctcaggtgcaggggtggaggcgctggccttcaacagacagtctgagtcagaggctggaggtcagaaggtgtggctggatgggactttttctcttcctagaaaaaagggacatttttagggggaaaaggagggggtttaagctattgagaaaagtactgctttgaaatgaaataatctcactttcctgtaatcaaaactctttatttctgatgaaacagactcaaataagaatcacaacaaagaaatcagtgctcagctcaagcctggaaatgatttcctacacggaaatccacttgcacagattctgatagtgtgagtcatgtgattccagatggagtaaatacacatgaaaaggagagaaaagctggtgtctccatgggctgaagcacacttatggagagagaaattttcatttatttgtatttgggcttcaatatgattacatcaccatcaataatgaaaagtgctgccatgtcccagctgtatacttagatcaagatataaatcagtccaatattgttcttttttctcactgaatatctaaatttgtatatttgaggggaaagtagaaaaaccaagccaagattttaaaaattacatttactatcaccatctccaagttacattcactatagaatcctttagaagcatgttcttgggtagctttgctttttatgcactcaacaaatatttattgagcatctgtatgtacagggaagaatgtgaggtacagtaacacaaaatatatagtcctatctcttaataagcctgcacttgggagarggtatagatagggttgggaaggataaatatatttttaacactctaatacaaggcagagtgtaccaaaagttagaaatgctgtggagaatcagaatgaatgaacataccaggctgggttggggggctgggggaattatggaaaacattcctaaagagatgtaatttgatttgggcttttattatgatatctgttttcagacaatggagttgagagtggggagtccttcctggctttgtcaggagcagtttgaggtcttggctgaagacaggaaggcataaggctggaaaggggtgggagcagaacatggagggtgtgaacttccagccgaagaagtttgatggggtttgggaaggaggtgagagggagccaccaggaaaggatgtgagctggacctttggaattcttaaagggacccttgtcttctctgccatatttctgtctcagggatgacgtgaggaaaaaaaaaaaagaggaggaaatgggcttgagtttccactgacaccttacagtcaaggaaggccctgttctttcataaggaaaagtggaaatcctctgtttacttaagggccattaacatgttttcatattaaaataccaaatgatctgccgtgactccagatagactcatctaaataaaaggaagctgtttccttacaaattgagtcacaaaggataaatatttgtggagtgccatagaaacaaatgcgctgtcttcctgaaatgtggaaaatgaattttgtagcattgatttgcatgaaaacaatattcttcccagtgttctacctagaatattgaaatggaggtattaagatagatgatagataggacagatagattgctagagagctagattagatagatagatagatagacagacagacagacagataagatagatagatcgatgaggttaaatattcttaggatggaagaaggggtcagataatcacatctcagacagatctggaattccaggcagcaggaactaatgaagtggtctcttcagagttttaccatgggacgaattcacccccgattagtttttattctttgagtcacttctctcaagacaaagatctttgggcaagagttcagttggcctagcttagatatgtttctactccttggccagggatgtgagccttctgaccaatagtttcaccaaatctacaaggaaccctagagagacttttttcccagtggaggagctggatgttgttcctaaaagaaaagggcagagggaccctgggcaggcaaaattttcagctgcctgccaccttakcccctgtscccacactcacttytgaaccacatgtgatcagtcttctcttcccaccacataactgaaacttcaaggtcatgggtgagctctatgttgttaagtcttatttataggagcgatcagctcgctgcactgcaaggctggaaaggtgtttaaaatgtatacttaggcatgtcttggctctttctgatataattcagctggcaaaggctctggcaggaagccagacggacacaaatagcgcaccaaagagatgctaagacatgggtgattataattgtgcaaggagtagaaacttctctgctgagactttggatgtggcagagatttggggagtagaaggggggcaaagcacagttccagccaaccccatttacaggcgttgattagcagtaatgaattcacaaccttgcaattgctcatttttttttcttctgctgctgagtcatggataagactctaagctctgattagctgtgatccctaattctcagcacaattctaagagcattccttcaaattcaacaatatgtggtaagtgtcttgtattaattaggattccatgtggatgcaaggaacagagacccacaataacagtggcttaaacaagatgcttatttcttttttttttttttttttgagacggagtctggctctgttgcccaggctggagtgcagtggcgcaatctcggctcactgcaagctccgcctcctgggttcatgccattctcctgcctcagcctcccgagttgctgggactacaggcgcccgccactacgcccagctaattttttgtatttttagtagagatggggtttcaccatgttagccaggatggtcttgatctcctgacctcgtgatccacccacctcggcctcccaaaatgctgggattacaggcgtgaaccaccgcgcccggccaagatgcttatttctcccttcaataaaaatccacaggtctgcagttatgtaaacatccacaggcatgcagttaagagctgtttggtggctgtgccctgtgaattccttagggacccagacctgttccactttaaccctaaagactgatccttgtcaacagtgaccaagatggcagtttgtgcctcagctgcatacatgtgcatttcaggcaaaggatgaagaaagaactggagaagaaagggctaaagaagattctaggagctgacatatagcactttcacttacatgcctttggccagagcatgtggctacaaaggatgctgagagatgtggcctttactctgtgtggccatatgcccagctcagccacaggaatgacattgctttgagagaaggggaggatggaaattgagcaacttagcagtcccctttccacttttacttgtgctgaattcataaacatgtgggcagctttcctctcctctgagcagcaaacacttcttctgaggttcttgttttggcaggttggccagacaggcaccccacttgactgctcaactatgaaactgcagttcyagagaagagaacaggtctgaattaagcaccttaagccagttggtcagcatctccttttattcggagagtagttactgagattcaaacccatgtcaactgagtagcaatgtgtttggctatagggtagggcgtaaccctagtctatgtctctcaatagtgagttatttcataaaggctcagcccatcgtcaggaatatgctggtcttgcgtaagcctttttcagaagtgttcatagggtcctgagaattttgtgagcacttctttactgcttctcttgcctcctcttttagttggtgctgagttcactgcatgaagggtcccaggagtcctctttccccttggtttttctactcctttccttttctgctctttctaccacctcctactgctggrcctctttgtatctgtactccaccatggaaaataagttttgtttgccccagatcttcccatttcccagagtggagcctttataattcatgatgtttactaaacttgatctctgccctttcaagggatggaactcagataatgaaagatatagggagggatacattgcttaaatctgtgagtgggcattacgatgggcctaagtgtcccaagagggattggcttgccatgggaggtggtgagctccccatgtgtggagaagttcaagaaggtgtgaaataatcgttgggtggaggacagttcaaggacttcatgtttctggagagcaattaagttcaatggcttctactcccagtctgacctgtgcttctgtgagcttgaaaaatatatattgtgttgcaatgtgcattctttagggaatgaaggtaaaagggcaagtggtcatgggaggatgtcaaggataggggcaaagggtactggttccccagccagaccaccagggtccaaattctggctgcacatcatctctgcaaccctggacaagtcagtgctctttctgtgtatccatccatctgtgtcatgggagttgcagatttttttacttcatgggatattgtgaagattaagtattataatgtacgtaaaacactcataacagttccaagcacacagtaagcactcaataatcctaatccttatgattattattgttacatatattactgtatctagcaaaaacaatattagaattgttagtattataataattattatcatcattgatggggaagraaaaatgaagcccacctgagttcacagrcaagaccctctccaaacagtaaaacaattaaaaaccaagttgtatttgtctgtgctcctttggattcaactgaccaacacccaggcaaagggaaaatatattggcttgctttttttttttgagatggaatcttgcactgtcgcccaggctagagtgaaatggcatgatctcggctcactgcaacctctgcctcccaggttcaagcgattctcctgcctcagcctcccatgtagctgggattataggcacctgccaccatgcccagctaatttttgtatttttagtagagacggagtttcaccacattggacaggctggtctgaaactcctgacctcaagtgatccacccaccttggcctcccaatgtattggcttttgtaagtaagaagggcaaaggagtagctgaggatctgggaagcaggaactggagattgaatggcacgggtccccagcagccagcatgctctgtcttcccttctctttgtttgggccttgcaggaaggtaggctctcagcagagccttgaaggccaggtatttgagagccaggcaagtgaagcagaaggagagcatgagtgagccattgggagtggggacggaaacggcgagaacctatccaaggcaccgtgctgagctatgaagctggagggcagcgcaggctgtgacccaaaaaggccacacaaggccacatgctcctgagtgacaggagggacatgtgatatgctgggccttggcccatgctgtctcctctgcctggctcattttctcctcttttctacctggtgaatgcatccttcaaggcccagttaattcatcatctactttgtcgagtttttctcaccacctgtatcagttgagaattgcattyagctatgatcacaacagaggcttaagcccataacaagcaatctggagccaggcattccagaagtggtgtactctttccatcgtgccctctgggacccaggcaatgtctctctttctgcacactcagacatactattgcccctgtggacataggattactgctctgcctatagcatcatatcccttgcagtaggtagaataatggacccccagagatgtccacaggctaagcctcagaacctgtgaatatggtaggttccatggcaaagaggaattaaaattacagatggaattagagtttccaaacagctgactttaaaatagggagatcagtatcctggattatctgggtacactttgtataaccacaagatccttaaatgtggaagagggaggcagaaatcagaaggaggggtggctgcagggaaggtcagagagatgcaacagtgctggttttgaagatggaggaagggacccacaaggcacggaacgtgggtgacctcagggagctgaaaagggcaaggaaatggattctcccctagagcctgcagaagggaacacaacgctgccagcaccttgattctagcctggcaaaccccgtgtcagacttctgacatacagaaatataagataataaatgtagattgttgtaagccactaagtttgttgtagttgttatagcaggaattggaaacgaatgcgtctctttagcaccaggtccctgtacctggcaggaaggaaggaaaggcaaatgtcacttaagccaacgctcctttccttttttttttttttttttttttgagacagggtctcactctgtcacccagactggagtacagtgttgtgatcatcactcactgcagtcttgaactcctgggctcaagtgatcttcccaccttagcctccagagtagctagaactaagggtatatgtcaccatgcccagctaactttttattatttgtagaggtgggggtcttgtcttgccacgttgctcaggctggtctcatcctcctgggctcaagcaatcctccagcctcagtctcccaaagtgctgggattacaggcatgagccaccgcacccagccctcctttcccttttagggagttgtgtggaagtcccttcggatcatttttacttacatctcattggccagagctgtcccatggccagctttatcttcagtggaagctaggatacataatttttttcaggtgggcatgttgccatccccaaccaaataaggattctgttagtttggaagagggggagaatagatattgagaagascactcagcgtccccaccacacactcccaggcagaaccaactattctacagcatgttgttctttcctctattattgctatttttggtttgtattgtaatttatgtgttcacatggctgtttgcattacttgaccaagaagtctcatgagcagacactgtgtctgatttatttctccatccccagtgctcagcatagtgcctgatacagagaaggtgtttgcatgaagttagatggatgaatgtctaaataaactttgaaataagagcatgatcgatgcacttcccagagcgagagttcctttctgttttcttgtgaggatgatctattggggttaggtacattttataagaccatttggccatgattgcaacctcatctccagtaaattaaacctacacagctgcagtgtgtcacctttccttatggcttattacagtttgctttttgctcagaaggaactgagcaagcaggttagaggctgttatgtgcacctgccacagcctacggatcctcaattaaccttgcgtgtaaattacacttcctgcccattctttatttttagcacagcaacatctacttggctcttccagagaagactgcattagatttcagtcatgaaactacaaaacagtggcgtctgcagcctggctgggatgactgttgttaaccccatgacactctgttccttgsgaagctgctttgccccaggactcaggttttcctgagaaagagagcagcctggactgaccacaccctcagagcctggcccaaggccacatgtgaacttatagaaaaatctgctattggatctgacataaactctccatttccttcattcattgcatttgggttgaaactcagttgttgttatcacaaaggtttcatttcgttccttttttttctctccctctctcttcgttccttctcagttacacagtatcatgacccaaatctttagcacctgaaccatatagcgcagagccttgaaacccatagggccagggcaccccgtggagacaggccagccagtgggcatcaggtcgcagagaattcttaaccacttaaggttgcttcactggaagaagtgagttactgagagacagccattttcggttttagtcagccatttttatcacgatcttgtttgttttagaatcccctgtagtgcctagctcggagtccaaccaaacaagctccataaatgttgattttgaatttaaatagatgttggggtgctcccatttccccttcactagacacatgggaagctgaggccctggcccctctttcatgccacagcctgggagatgctgccttctcagcagaaagcctcaggaggtattttgaaaagggaatttgttgttttcattctggttagataagttacaaactaattttttaaactgggaaaatattgaaaattrttttttaaaaatgaaatcacctttaattccattactcagagacaactatcactgacatttttctgttttttcagtcttaattctcatgaaggtgtgccctgtttccctccagatttctcagaggattcaggattagggaagggaggagagggtgccttatgttctttctaatcgtttagctttgggtattattgggatatatataaatacattaacacacatataaatatatgtgtatatatattatataactggcatatacattattgggatatatattagtaggatgtatatatatatatgtgtgtatacatatatgtgtgtgtgtgtgtgtgtgtgtgtgtgtgtatatatgtaaaatgtatacacacttctatttgacctgtaccagttcattattaccacaataatgctaactaacacgccctcaaattcagtggcttaaacccaaagtcatttattcttgcccacacttctgtgagtaggctgggtatttgctgatctaggctgggcttagctgagtggctctaatttcaggtgcttctgaactatatagctgagagccctgaaacccatagggccagggcacactgtgcctatctatgggtttgcctcaggtctattccatgtgtgttctttctgtggtccaggctgaaggggcagcagctgcccagataagttattgtcttggcattggaaggggtgcaagaggacaagctcaactgggcaagcacttttcaagcctctgcttgtgtcttatctgctcacatcctattggctaaagcaggtcacatggctgcggccagtgccaagggactgggaagtgtaacccatctaccataagcctagagcaaatcacatggtcaagattgacatcagtggcttggggaagcatgtactcttcccatggaagtaagggaggaaggaagggaatatttttgagaataatgtaatcttttttttttttttttgagatggagtcacactctgttgcccaggctgaagtgcagtggtgcaatctgggctcgctgcagccttgcagcctctgtctcctgggttcaagcggttctcctgcctcagcctctagagtagttgggattacaggtgtgcaccaccatgcccagctaatttttgtatttttagtagagacgggctttcaccatgttgatcaggccagtcccaaactcctaacctcaggtatacgcctgcctcggcctcccaaagtgctgagattacaggcatgagtcatcgcaaccggcccaagaataatataatctactgcacaccctaaatatctgctaaagtactctgtactttgagatttaaatcaaatctgctcaggccaggtgtggtggctcatgcctgtaatcacacctcwaataaataaataaataaataaataaaacctgctcagagcccacctggttggtagtatcatccagtctacacagggaacctctagtccagagctcctctactcattgaattaattcagtttctggataatgtgactgtctcgtgtgttgttcctatttcacactcatgtctctttacttactccccccaaaataatttacacagatgtgtgtagaagattttgctgaacatctggaccagcaaagaagttttacatctttatgttcgtatctctagattggccagccccctctccataaattctctttgcgtctcgcccacacacagcctctcaagttaaagcttgctgaagaattcactcttgtctccaaaattctgaaagtcttatcttggctgggccacacctttgcgcaacttagctcagctttttaaattcattcaatgtaggtgtattgagcatttgtgccctctgtctgaggaatttataatctagtaggggaaattaataatgtatgttactatttggggccagaaaattctttgctgtagggtgccatccggtgcactgtgggatgtttaccagcatccctggcctctacccactatgtgccagtaacaccagtcccacccccttgagctttggacaaccaaaatatctctagacattgctgaatatcccctgagggacaagatcacctcagttgagagccactgctctaatatatggtagacttgataagacttctgataaaacaaaataatgtgctaagaaatgttcagagggaagcgatgttatttcctggcagtgaaatctgtgaacacctcatgacaggtggcatctgagctgagacttcaagaatggttgggagtttgagttgagtttcctagaggaggaaaagacatggggtacatgtgggcaaataagagtggctctatttgactaatgcatgaagtgaaataggcatgttgttagagtggagctgataggtactgggaggctagataccatggggacttataagctgtaggacttctacttttaccctgagtgaaatgacaaatatttcagagctgtgttcatttggaggaggttaatttggatatagggcttgccttcataacccaaagtaattgctgcaaagattatccctccagaggtcacttttctgacacccaggaaggaaacagaaaggccatctgaggggcacagtatgtcgctaaataaattcatgcctggatcttggtgttccttacctttcagaaaaccccactctgaactccttattttaggtctaagtctaatggccagttcccgagagcagattaaaagatggaaaaagagggccaggcacggtggctcacgcctgtagtctcagcactttgggagcctgaggcaggaggattgcttaagcccaggagttcaagacccacgcaggcaacatagtaagacctcacctctacaaaaaaaaattaaaaattagctgggcatggtggtgtgtgcctttagtcccagctccttgggaagctgaggtgggaggattgcttgagcccaagaggtagaggctgcagtgagctatgatcgtaccactacactccagcctgggtgacagagtgagactctatctcaaaaaaaaaaaaaaaaaaaaaaaaaaaaaaaaaaaagatggaaaaggaggaaggcaagggaggggacttatataggcagacacagactcagcagcaaagcttccagcacaacagaggggaaagagaccaaaagaaaaaatgaatgaatgagtgattgaatgaatgaaccaatgaataaattcagatcaaataattcaagaggcacagcaatctagagttttagcaagagaacatttatcccttcattcttcctgaagacattgctgcatatcagtgccatcctactctgccaatatatgtaatgtttaacaaggtgggggatgtggagaacactttagatcccatgtggtaagagttgctcaatggttaggaacagggtctagagtcagagcacctggcttgaatccttgcttcaaggctctgtggcactaaagcctgctttactaggttacttcaccttgccaagccctactgatctcatcggtaaaatggggattccctactcacagggtcattgggaagtttggataaaataatccacatgaattcttagctcagttcctggcacagaataagtgctcagtaaayackggtggtarttattatcatttcactgaaagaatatggctgttgagactttccccaaatcatagctgcagctgctattctggaatatttccagagtctcctggcagtgctgaaatttcccttttataaaatacataggatggctgtgaaaattgaggaaagttccaaaaggcaggggcagttgcatctgtcttcttcatttcccttctttttggcagtagaatccagaccacagagggagaggacaccaggctcccaagggtactggccaccagctatttcttggcaacatacttcctttgagcaagaatggccctttactttttgaccaacctgagagagcacttactctgagccggtcaggagaatatgaagctattttccttctgatgttatgtcctatgctatgtaaatataatctccctccaaataagaaaggtgcacatgcatggtgttggcagggaaacatcgaaacatattgcatagtggtggctgtgaaccagtggaggcagtgctgtgttgatttcccttgaccaatgtctgcccagtggcagagctggaaacacaagatgctgtgtaatgtaaaaccttggcctggctcctcagcgtaatgtaaaacaaaggctgccaggaaggtacaaatcgcccaacaggaaggagctgctctcttgcccgtggatggcaggacaataaagtaacttgtcctttgtttgtgtgttttccaggctggagcaagaaatacaaacgctagaaagtgaagagtcccagatatctgccaaagagcaaatcatcctagagaaactgaaggaaacagaaaaatccttcaaggactttcagaaggtgaagaaaaccaaaacgatttctcaaagttatttccatggggaagtagggcctagcaaaatggtgctaactgggaaacaggccagtgggcattgatgagaaatctgagccacgaactctatgaaatgaggggcagatgtgtgaggaccaggggccatcctgaagctaagcatgacatatctttgggtgtgggaccatctggcctgctgcaaggcatagggaagagtcattagattaccccatctgcctgctctccggatccctgatrtgccttgtgcctgaaaagccttctcttattggactctagaattctaaaaccaattctgatgaagcagaataaacatgctctttgtggctttaattatagtttgctttttgagtctttcattataaaaaggccagaagcaacaccttatgaagtggacaagaattccaaatacaaagagtgtaaatacatgacattttactgtatatagaaacagatggtgcctgtaatcccagcactttgggaggcyggggcgggtggatcacgaggtcaggagatcgagaccatcctggctaacgtggtgaaaccctgtctgtactaaaaaatacaaaaaaattagccaggtgcggtggcaggcgcctgtaatcccagctactgaggaggctgaggcagaagaatggcataaacctgggaggcggagcttgcagtgagctgagattacgccactgcactccagcctgggcgacacagcaagactgcgtctcaaaaaaacaaaaacaaaaaacaaagacaaacaaacaaaaaaacaggtggtgccgtgtatcaaagagtagagtccgtaaaaccagtaggctctgaacaaacatctcaggacctccctccattttataactgtttctgctgtacctatgagtgacagaaaagcaatctaatgaaatcaatttaggatgggattttctgatatcattctccagcatgaccaaggatatttgctagatcattgaaataaatctctattgggagaaatttagtataaattgggaattataattttggaattctaaataaattgtccagaagaaaagagatcgttgcgtttccccagcacagtcaaattctgggctggggcatgggagaaagatgggttaagtctttaaagatgggaaaagatgggattgtacccccacatgkagagtaacgctctgccttgtttttgttcctacagggtttctccagtacggatggaggtaagtgctctctgcccckactgtagatgaatgttttaatcctggtcagcttagggggtttcattaacaggggcttaaggaagaggtactgtgttgatttgtaaaggcatcagaagaagtagcagcgctggttgcaggccactgaggaggtccacattccaagccttccctgcctctcttcttcaggaactatctcttggctcactgtttctcctcttacaaaattggcctggctcttctccttcccattagtcccaacactcactgcttgggcctctcttgaaaggtacccagcaaagaagagtactaacatcaggacctggtcccttgtagggatgagcccatttgtcttggtggttaggtcctcaggttgaaacatacgtgagaagtttaagaaatttggggaaaatatttggtgtttgggaaacctttctacagcctctggattttctttgctttctctctctctctctctgatcagacaactgtcgtttctttcatagaaacagggctgggcaaaaacttccctccctgtgtgggatagttggttcagagcataggaaggtaggagtggggtcctggcttcctggtggcaagagcaggtctttcaccttctctaccttccctacctttcctctgtcctctcctctccttacctggactgtggggatgaacttgagattgtgtacttctcacccttcaccttgctccctatcctcagctgcaaacccatgattcctactttcatttggccctcagctagacctgctttacaatgcagggacttgttggaaagaccagatattgtctgctcccctggctcttagaaagtcacattctagggctgggtgtggtggctcaggtctgtactgccagcactttggaagactgatgtgggaggatcccttgagcccagaagttcaaggctgcagtgagctatggtcacaccagtgcactccagtctgggtgatagcaaggtcttgtattaaaaacaaacaaaaaaggtcaacctctagactaggaagatgatcaggagccaggataagaattggcatcagtgttttcccagcgtcatttggaaatatacggggaaaggtttaaaaatgtgtttctctggattagtcaaaggtatttgcatgaaggatagttctgactttggcaaaacaaacaaacaaacaaacaaacctgtgatttttaatttttttttcccctagcaagagacctggattttgtctccccaggtgatctttaggaaggtactaaattaaacttcatgctctgagtacatgtaggcagggccaagtcatgtccaagctagcaaggactctaggaaaagcggacctacaatacttctaggaagtctctatggtgtgaccaagtcagggcacttgttctgtgctttgggggtggggcacggattgaggaagtggccttggggaattgtgggtacagcatggggaggatggcaggcttccctgagtctgggaagacctgaggcatgccacacaattagcaataatacagtgcatgtcaggctgggatgaagtgtgggacactgacccatgaacacctacccaaagagtgcatgtcggccttttatgctttcactttttttttcccttcccttctcaaatcaggaatttccctagacatctctctgatacttagggaagggaaagaccctgtatgtcatgttcctgaggagtctgtgtggggcatggagacctgtcatactctgtgacttgttaacaagcaaaaatgcagccgcatcataaactctcaccacctctttcatttttacctcaaacttctttcattttcttctgcattgcttcccattgttttcacttatccacctaagccatttgtagaggtggtaagaagcctagtcataactgaaaagagcctgcagggaaagttgcccacagactccatcctccaggatgggggagctcaggcttaagaggatgcaaaagtcttagggatctcatttcttgggaagtggcccagggaagagtttccgtggtcttacctgtcaccctgcattataattcctgccatctgtggttatcaccaagcctgggtgacctctttatctgtcataccacatctattagcaaagaaagaagtttgaaggcgggaacacatacatcccagaatgtgattgatgtatatagagtcacaatgtggtgaagcacatcccagttgagggactttgggatgtctctttatcttctcattcttcaatttcaaaggccccgagttgccaagaccctcttagaatcatccaacttgctacaaaaaactaaccagatattattatagaacaatggtgacttaagaaacacagttaatttctgatgcgtgcagattacagaatccaggtccagttaggattatgtaactatacagacactgcagataagcagcaaaagcatcccaactcgtgaggtgctatgagatagctgctggtgtctgtgtgtgtaatgaccccatctcaggtaacctaagtgtgtccctctatgcatggcagaggaaatagaggtaccgtactgctggatcaccagtggcttttgattgcatgatagcctgggcaatcaagaacaatttattctattcttgagtagaatctcctggtcatatacattctgacacccactctcctcccccgccaacacacactgttgttatatagcagaacgctcatctattgggtgggttggttttcactgtcttaggcataatgtcttgtacacctataaattgcatatagtatatatctggtgctaattctgttctttacccactgaggagggagctgatgcaaaactcttgccagaacaggcaaaggaaaatgtctgtcctgggcctatctcagtccttggtgtatgatatggatcttcttaggttcccatcccataccagtctgtggtggcttagagcgtttcccacatcaaaaccttcataccagttattcgcaaacctcaatcttcagttgcctgtaagttatgtgtttgtttgtttgtttatttattttgagatggagtttcactcttgtcgcccaggctggagtgcagtggtgccatcttggctcactgcaacctccacctcccaggttcaagccattctcctgcctcagccccccgaatagctgggattacaggtatcagccaccgcatccagcctaagttatgttttaagaagagttttcatcaatttgtttctctggctttagctgtttagattcttcatagctactgtaaatatttcagcgggattagaactaagaagcagcactcatctttaatttctactctataagttactgctttccaccttctctgtcagtggggagaatagtgttagactattctgactttggcaggaagagggcagcttattaattgaggccacctgaagaagtttttcccattgaagttttggcaagcctgtttgttactctttgtgctggcctatcagacacttcctgtctatataaccttagggtttagtacttaatcatatattgagggggctgctctgtcctctttctgatgccccattctccactcccttatctttctctcgctctcttttttttttttttgagtcagcatctcactctgtcacccgggctggagtgcagtggcgtggtctcagctcactgcaacgtccgcctccagggttcaagcgattctcctgtctcagcctcccaagtggctgggactacagacacacaccaccagtccaaatttttgcattttagtagagacagggtttcaccatgttggccatgctggtctcaaactcctgacctcaagtgatctgcctgcctcagcctcccaaagtgttgggtttacaggtgtgagctactgcgcccagcccattcccttatctcttaacagaagccatgtagcccaaccctctaagtgctgtagacttcaagcttgtagccagtaaacatctggcaaaggtaactccatcatccattcccatctggcagggagctatctcctggaggaggctgagacataagccctgggaatcacatgttctttcagatggaaaattccctgtctgtaagtagtttttttttttttktttyttttttaaactgctaaaacattgagtatgcagacacacatgtgaccagtccatgagatctcacatgggctccagcctccatcttatttgaatgcagaaagtcaaattcaccaagatcccattccacagatttctggaaattatcagtgaatcwtggaagttctacaaatctgctctggtcatcccttctttcctaaactgaccctctagtcctagattactgcttcactcttcccacggacaattgtcacccacctgcccctaccccctcaggactactgacctcaaggtgctgctctttctagttctgccttgtgctgctttggggcacagacccttcctacagccttccacagtgggaattaaaggaaagagaagtctgtgacctaagtttaagaatcatggaggtggctcacgcctgtaatcccagcactttgggaggccgaggcgggcggatcatgaggtcaggagatcgagaccatcctggctaacacagtgaaaccccatctctactaaaaatacaaaaaattagccgggtgtggtggtgggcgcctgtagtcccagctactcgggaggctgaggcaggagaatggcgtgaacctgggaggcagagcttgcagtgagctgagattgcgccactgcactccagcctgggtgacagagtgagactccatttcaaaaaaaaaaaaaaaaaaaaaaaagagagagaatcatggaggtgcagttcaacatggagaataatgcacaacttcagacatgtggcttcactcacagcccctgactcaaatccaaaaccatcttcagggggtccctgcaggctgctttccagccatctcccagcccaccatcatctcaaaggctcaatttccttccttgcagtgaggggtgccttcaaccatgtctgccttatccaggatccaagctccaacacatataaggcacctgagagggaaagcaacttgagcctcactccaccctaagtcctgctgttctaatcttcctttctcattccttctccccaaatggttaatatggaaaaatctatttttttttttttgagacagagtctcactctgtcacccaggctggagtgcagtggcacaatcttggctcactgcaacctccgcctcctgggttcaagcgatcctcctgcctcagcccctctagtagctgggactacaggtgcatgccaccatgcccagctaatttttgtatttttagtagagacggggttttgccatgttggccaggctggtctcgagctcctgacctcaggtgatccacccgccttggtctcccaaagtgctgggattacaggcatgagccaccgcgcccggcgaaaaatctgttttcttagcgatactctacctttgcctatgaacataatggtctaatgtcaatacattctggattgttcagactcatttgcaagtcagaaaagggtctggttggtctagaactgaactaagcctagtccagtgtgtgtttgcaatcctcttcagcaagaaatgaaaaagaaagctgctagaatggaagcagtacgagtggggatgcagaggaggggtcagtgatgagaaatgcggaggattttgaacagaggcagaggctattgaacagattggataccagcagggggaagagtgaagggtgctgctgaggatcccaggtgaactgcagtgctcgtgagccaagatagaggacaggagaagcagcaggtgagcagagatacaaggtccattttgcacatgttgagtttgaggtgattgtgggatattcagtatagacctacagtgagcagttagatgtaaccattgatgactgatggacgttccaggattttgtgatatggtcgtgatgcaaggaagggatcacatctcatggtgcccagctttcyggaatcttcctgctttcactttcccacttctttctggggtgtacccagatttgtcttgtcttacctcaggggtttcctcctttcctctgataccttggcatgcttgctaatgttcatgctccccatgtctcacctccctaaagaggcttgtcgaggtatttgcccaagcaaatctaatgggctccttcttttacatagcaacattccctgcaactgggctaatggtgggctcaaggggtattgtcatttagaatctcaggactttctagctgaaacaccagcctgcagtattgaaaacatgagatcaattctgaagtctgtttatttgttgtaatgcatataaaattggtcttttgaatgaatcaggctcataaagctatattgccagttcagggaatgaaccccataataatcagacacagaaagctttatttccggttcagagaatggatctgtttttcagtactgtttaatgtacatttctagttccatgttttctatttgtcaatcccaccaagttgataatggctcccacaagcccatctctgaatcttccccccgtccctgaactcattgtcctcctagaatctagagatttctgatgactcttctaatacatagagccatcctggggcttgagctctctggccaggatccctcctgcctcagctactctgctgaataccagtcactgggcaaatgcttgtctttgtttaccctgatcctcctgttcagtggccgcctcagcggtccattatgtagggcagacaagctgctgtctcggcagtgaacccattgggcctcccaacactgtgactaattgtattccctgttctctgctaccagatgcagtaaattacatttcctcccagcttcccgacctgccaatcctctgttcacgaacagcagaaccatcacctgggcaggacgggaccagcagagcggctggtaagtcctggggacctttggacgctaggatggtccaaggggcttgcatttcactgagctttattaatgagatgagtgccctgctatccttacatagggggagctcaccttcagcccagcctcagatgcagccttcacagtggccacacaaggcaggcaccggccccagatgggtaaytgaggaccaaatgggaaggagttctgaggaaatcatacggcatttcacctccgacttcgggggagtctttctttggtgtttgtggtccttatatctgtgtttattctcaaagttaatctgtattctgcctccagggattttcattttcctcattggaaatatacaaattgagagagccatccatgatggaagctggatgggaaatattttcaaagcctgtggtatctttacagaatcctttgggaattgtgctatttgtatattatgaatacatatattcctaagtcttcccatttctggaattatttcttagccactgtggtatatttgggaggaaaagaagcaatttaaagcacacatgttacttgctaatgtgtctcacaattggaaattttacaaataatatatttatgagtgttgagtgtagggagaaccatgctttgctctgcttaatgcagacatgcctcagaaatcagaactggaaggatgcaagcaataaatctgtacacgaacccttatgatctacacagaaatgtgctgagggctgggggttaaatggaaaaatgaattgcccaaggttgcatggttagttacaacataggtgacttcaaatatgagtatcagattctgctttgcatattctaggtaagtgtatgtttaaaataaatcacataatggcagattttttaaagtaaaacaatcatggatgtttaagccagaggatatcttttatataggccaacctgaatatttcatgaagcaaagaatccctacttattttaatacaaaagtaaaataaaaggcaagtaagaattaacatagttgtcacgtccactggctaatttaaatatctgttgggcatctctgtaaacatcttagcagattacttttatgtacagactcacagagtcctagagatggttgggactgtaagtggtatctggtcaatccagagccagttccacatcttcctggacagtgacaggatggataaacaggaacctgcaacctgcagttatgcttcaaaggactcactggcagtcactttaacattggactctttaagtactccagggtacacttctgaggtacacttctgaggtcaacttaggtaaaatgtgtttaagagtgacaccccttccctctggttattagagacatgggtgttgatggctcctgatagttgtgggtaaacaacttctcaggtcctctgcacaagttcctgcacttcaaaggacacaggatatgatccaacatatggatcagcttatgggagggtagggacaatgtatgagaaataattttaagagacagaaaaagaatttgagcagtgtgggtagtcaaagagtttaaagttcaagagtaacacatgaatgtgattgtagtgctgtgtaagcagcaatacacattattaccacaacccagctccctttatctttgaagatcctgcaaaacatgattttaaaagccaatgcattttcaaaagtataatgtgatcagaatctttttcaaagtaattttacatatgtttctgctgattagttaagagttaatttgcgtaaatgcatctactgtgggattacatataagcagagctatggaaggaattgtatttgttacgatgaactcctttgtccaggctgtttagggaatgggatgttcagattcatgatcaattatggttaatggtgactacacagagcatgtgtggcttaccaaccaagggtactcactagaattctcctagatacagtccatcttgctttaggaatgtccttttggaaatttatataacctcagggacattttgacaaatgtcacttgtcattactgagtagtataacaaatatcctggttgtttggcgtttggaaggtttgggactctgtataaatgggaatttatttagaatcattgcttttcagaattaggagacatctattccaatcctttatccaaacattgaatccttaacatagcagccctgtgaagaggtcctcaaaccctggtcacacacctctgtgattcatgtttaatcttcctccaagtttcccattccatctctggttggttctgactattgggaaattcttcctctgatggagccatcatttgtctgccttcatcatccacccacttatccttatcctgcaccctggagctactcagagcacatctaagttctaatttcccttcaagtgtagaaagtcactgttatttcctgtttttcccagatcctcactctaaatcccctttgtgctcacagtcccagtctctccagctggtattgagatgatgagattgcctttagacaccctccgccatccctgtccctcccctctgcacgctcttcacttggttgctagtcttcttgatgtatcatgctcagagctacccaatgccttcagagctaggctgctcacccccaaaatagagcacgacgctgcagaccacatggctgactttgctggcaatgtggcctttcagcttcagttttgaaaggcctcaaagtcatttcatgtgtgccactgctcagcctcactccgtttatccatagaattgttgtttctgagtcatttcagttgaaatgttcagtctgtttcccctagctatacatatactacttcacctgttcatacatagaaggacctacagaattcttttgttttttaatctcgaaagacaaaaataagcatgagctatgcacttttctgtcctttgtagatttgctatgactattaaatttcttcttgttagattgtctctcaagaatgttgcgggtttcatggaggcactgaggaaccacagcaggaagtgggggaagggaatgatgtcatgggatttgacagggctctgacattccctcccatttcaaacacgcgcagttcctccatcctcatgtttacatattgtgtttccacatcagatttcacttgaatctaggcctcaacaagttttgaatgtagaaaaccctcttctctattgttagggtctttgtagctcatgattatggtatcctcatagcctcactttgcttctcagtttagtaccccctcaaatctgaaaaagcaatcttttattattttttatcatctcattgctaaaaatgttgcatgttggaaccaaagtcagagccctgtggcacaccattagagatctcttggccctcaataaccctaaattgacatctttggggtatgatcatgcaaccactaacaagttaattgtcttaacacccaaggcacatgtttctgtgtagtccacaggaatataagggattttgtgataatccaaatactctggatcttttcaaatgcaatttgcctattctttccagagaccttgaacagaaaagaaaatgagattaatctgcatagtttctgcttgattaacccatgctggctcttagtcatctctggtctttgaagattaactttagaatttagctagccatgatgtcaagctccttcgatgtagtttagaatcccctcattctcatttttgaaaatcagacctttgagtgtcagcttccagcacctttcctgatgttcaagattcttgagacaaattcaacaagggaactgggaccctgatcccaaagcactgagagcctttatatccctgcagtgctatgttattttccaatcttctctgctcatctgggcttcacttccctttctgccactttctttctggcactttacaggctgaaaactctccttcttgaccaaaaatagaagcaaaatcagacacaagaaattggcttgcctttattatccatcaacatcacacccttgctgacttatttttgttactactgaggtgtcttggaaaaacaattgattcacagaaatttttgatcactgttttttttggggggagttacaattttttattgatacataataattgtacatatttatggggtacatgtggtattttgatacattcacacaatgtataatgatcaaaaaagggtaatgaggatatccatcatctcaaacatttatcatttctttgtgttgggaacattcaaaaatcttctagctattttgaagtagacaataaattattgttggctttagtcaccctactctgtattgaacattagaacttattccttctatctaactatatttttgaagttggagattgtgctttcggatgagagggagaacccattctgaattaatttcctcatttttattgtcattggcatcacaatagccatttttacatttccagcccaaagataatatgtgaacacatatttatatgtataaccatttgctcgaagggataagactacccatatgtgtgttcattcaataagtcaaccatgtgcattgcttgtctatcacatgccaggtgcaatgccaactcctggatgtttctgttactgagatgaccctgaccccccatggatgacacttatgatctgcttctctcctactgtactttacgcatcactgactcgtgaaccacgcagggtgttcacagcaccataaaatatcaaatctggataactttcattgtacaaatgagaaaatgaagccccaaaatggggtgtgatctggataggaattcagatcctatctttctccctcctcccatctccctgactaatgacagcggaacatgtggtgcttatattttagatgtgggctctcagcctgttcctcctcccgtaatcacagtgagtgaaagaaagtgagctgggaaaagcctgaatcaatgattgaactttccatcctcctggaatagtcttgttttgtatgctcttggactgatsctcaaatgtattcatgtccattgctcttcccgccttgcttgtgtcggttactcttgttccctcttctctaggctccctacagcccttgcagttgctttcactctgccaaaggtgaaggcaacaggcaacacaggcatgtgtagagccagggggataagtctgaatcagaaccaaacattctctgctcctcagacccatctctctgggccctgcagagcaatcgcttctctgctcaaaactaccaccttggtttttaggtgggcaccttccccagaggcctcacactccgctccacacctgggtgttttcagaacctagagactggaattctcaacctcaacttaatgtctctactccttcagggcgtttccctattgatgaaagaattattagggagcaagaaccaagaaaaccaaatgcggaggcccaaaatcaaagtatccatgcagtcattcatctgtatccctttgaataagctagcaacattcgttcttactctctttaataaaaagagcatattaaaataaaataaaataaaataattcttaaaaacagcatattactcagctgtctcgctggcttcttggaaggagtagcaaatatgctttatatactccaatctcattgtcatcagtatatagggtttggaaatcaataattaaatacataatttaataaaaacatacttccagatttcagccagcctatcagtgaaacttccattgaattgtcttctatttcttttccttcttccccaggtccttcatccaggaaaatttccagagctttccttcaaatacttttctgtatgtccatgtatgtttcaagatttctttcagggctccccagaaagccctcacccctcaacagcactccctcctcattttttaaataagatgaacaaaggcagcaagccctttgaccctcatcattatacaaattgtagtgtacctctgacatggagaarctggagagaagacagggcaggttagagagtatgctctgtgctttgtggttagagacaaagggatgataagtgtgagaggccattggtataaacttttggcagcaacaggaagtagaagagtttttaaaatcttgtgcatcaaaaataagacattgcactgaaaacrtaagtcttatgttcctattggttcatatgcactctagttcatgcttttgtatattattggctgagaactgaagcaaaatataaatgcttactcataaagatgacatttaaacattcacacctcttgcatggctttctaaaaggcctagataacattctcatatatgtatccatgaaaacgaaatattgcctttgggttaagtcagagcttctcaaagtgttcgcctttgttctctttactggaggaaagagtgaatgcagaaaggaatgtagaatcacactcttaagtgtgatttgtggttcctctgaagccttatgttttatctaggaaaaaaatacatatgcattttgtgacataacatatctaagtttattttattataaaattatattaaaattcttaaaatattctatgctcatattctaggaatattggaagaatagtgtacaacatgtaaatataaataggtaaccctagtaaaaccatgtcacatgtggttcagtcccagagccatatcacatttaaagaactacagcttaaaattgcacaccaaaaaaccattaagaaggtgttctgttctttaactatttctcctgaaggatattaaaagggaccttggccgggtgcggtagctcacgcctgtaatctcagcactttgggaggctgaggagggtggatcgcttgaggtcaggagtttgagactagcctggtaaacatggtgaaaccccatctctrctgaaaatacaaaaattagccaggcttggtagcatatgcctgtaaccccagctacttgggaggctgaggcaggagaatcgcttgaacccgggaggcagaggttgcagtgagacaaagtcgcaccgctgcacttcggcctgggtgacagagtaagactctgtctcaaaataataataataataaaaaataaataaaagggacctaatttatatctccactaagtaataattctcatattcacttttctttcctccacatatcacctgctctaaagcatcatttaccaccacaaaatactccttctctatgcatatttcatacagtttttactctctttcccactaaactccttctttctcatttgtgtattatgtggatatacttaacctttccagcaaagaacttttcatcatcatctctcctttcttccaggctctgattctagaacaggcaaagattaaaatgacagaaaattggaccaacaatgatcagcattctcattggtgggaagagggagagggatatctgtaaacatccccatgttaataatttgtatttttatcctatcacatatggatataaaaatagaaatattttgttccatattctgtattgatcgcaggccagtgtgtggatttgttcacagataactgaatgtttgcagaataataagatattgtacctacaaactaacaattattactttccttatttataactgtgtcccatgagtgtgttaatagtgataagatatattctaatcccaaactgctttttaaaataagtgttatatttcaagaacaggcttttggagtccatgcaaattttaaatgcctattctattcttctgatggcacattttgtgagaaatcaggaactaactgagataaatgtttatttggatacacagtcattgtgtgtgtccatgcacctctatgacaaatgctggttggcctcccattgtgtcacttgaagaaacttgagatctttatgctgaacaagtgaaactttcaaaatggatctgatgaaaaccaaacatgggattttgtttcataatctttttagttaagtgttaaccaggaacagagtgtatcttattatgcaagcagatggaacaatatcatcactgttattttttcaaacaagttcaaacattaattactgtgtgtaccatttcattggtgtcatattatacaaagtatttgttactagattacaacaaccatattagactcttgaattattagcctttgtttgagagatgtgtatattgggtacctgctatacaaatggctctaaggtaggtgctgacagggagggggcatcatggataggtgttgggcaagaaactaaccctcaaaagatcctaaaaatctatgaagctgatgaaacattcccacagataattatacaactgagtggtaattgttaagagccttcagagaagtttagaaaaagtattgagaaaattttaagagagggatgacttagagatggaaggatcaaagaaagcttatggaagaggaggcagttgaccttggcgttaatcaatgggccatatttggatatgtagaaactcaaaacaaagacatttcaggagaagggaatcttaacaaaagcagaagatatttacgtctgggatggtgttatttggttgtgctaaatggaaaaggagcactagaacatatggttgaaaagatagtttggatcttcttaacacagggaacttattcagaaagaggtagggactcaagacaatgacaagcagatgggctagatctctagaagtttggaggagcaacagaaggctatctaggcagagggacagcaggcacacagatgagcagccgtgggaggaagttgagtgtcctgggaatagtgagaagtcgttatggccacaatgtgtaaagaatgagagagcccacaagacaaggctagaaaggaagtttgcagacacatcctgaagggaactatatgccatgctggggagtttggtgtttattttytaaagacacaaggaaccaacagagggtttatgactcaagtaactgtgggcaggatggagcacaggctggcaggggtcggcaaaatttttgtataaatggccagattttaactattttagactttgtggaccatatagtctttgtcacacattaawtgktttctttctcttttctctttccytcccccatcttttcctccctctctttyttyttytccytcctcttcttttttyttccttytccttccccttctcttcttcttcttcttcctcttctttyttttttttttttttttttttaaagaaacaaccctttacaagtgtaaaaccactcttagctcctctggccatacagaaacaggctcaggctgtctttggccctctggccacagtttgcagtcttctagactagagcaagaagacagaagtgttaggtaaaataaaaagcaaggctgttgtgcagagagcagaggagggcctggactaaggccttggtgacagaaatggtggtgaggagatggatgagatatatctgaagtagaatgatttactgtcagtgagtgtttggctgtaagaaagtaggaagaaaagaacaagtcaggtgtgattctcaggcctgtggcttgagagactaggtagcagtgctgctgttatttggcatggagactgtggaatagttttgatagaagaagctggagtcagtttggaagctgctgagtttgatgggttcgtggcacatccagataaagggcacctggagcctggtggctctatgggcctgatgcacagtttcttcccatccaggaagactgtgaagaaaccagtttggaagtatgaggtgtcacaagagtctataggacaggaaagagctgtccttagcaaccccagactggcagcaagagtkgggatgaattagaaaggatacaagactgagagacaggggcaaggggagggggagaccaggtaggaagctcttccaacaatctagggaagaggaagtgaatgtcttacattgaccagtagcaatggaacaaaaagaagacaacagatgggaaaggtattaatggaacaaaaagaagacaacagatgggaaaggtattgtgggcagcaggacttggcactctgtgcatggaagatgaaagaggccttctgcgatcattgtcttcaaattccagtgtcctatgtgatgttacttctgtcttgttcttttcttagttcttattttaggtacctagtttagtgactgaagtactcacagggcacataatatgaatgctcccatgctttttcaattgttgaaaatattctgttgtatagtacagtggaggatagccatgacccacctatgaaaacctttgtggaaatgtagagaaaacgaaaacacttgatgaaagaggttttttyatttatttaaaattttggacctggaacacattttaaccaagggtttgtaaattgtctgtcagcctgggaagccctcagtcaaggtagtttgcatgttgccagcctccatgaaattcttcacactaagatctaaagtctcttgtgcccttattttagcagatcttccttaaatgtgtgagtgccattgagatatagcaaccgtgcatctgtcttccaagtgcattaaactgctgtgttacaatacagatataaccatctttattcacagtgcgcacctcactctaacactcaagatgcttggcagttagaatagaaagggcacaaaacctttttttttgtctgtttggcaattaaccattcactggctttttttgttgtaacatgcacttcctttctcttgttttcattcaagctgtgtacgccatggaaattaatgtggagaaagacaaacaaacaggagagaccaagattctctctacatctaccattggcccagagggggtccatcagaaaggagtcaaagtctatgatgatggtaccaaagtagtgtatgaggtgcgctcaggaggcaccgtagtagaaaatggagtgcacaaattaagcacaaaggatgtagaagagcttattcagaaggctggacaatcaagcttaggaggagggcacgtgtctgaaaggactgtgattgcagatgggagcctcagccatcccaaggaacacatgctctgcaaagaagctaagttagaaatggtacataagtctaggaaagaccattcttccgggaacccagggcagcaggcccaagcccccagcgctgcagggccggaggcaaacttggatcagcccgtcaccatgatttttatgggctaccaaaatatcgaggatgaagaggagacgaaaaaggtgctaggctatgatgaaaccatcaaggctgaattggtcctcattgatgaagatgatgagaagtcattgagggagaagacagtgacggacgtgtccactattgacgggaacgyggctgagcttgtgtccgggaggccggtctcagacaccacagagccctcatccccagaagggaaggaagagagcctagctacagagccagccccaggtacccaaaagaaaaagcrctgtcaatgctgtgttgtcatgtgaccacttctttcttctcctttcttctgggcagcctgtactctccaccactcacgtagacctcactgtaccactaactgcaatactgtgaactggaagcaaacacctgccttgccttgcagttgaattgctttgatctctctcattttttttccttttcctcacctgagagacaacgtgcatgtgtgtgcttcattctctccaagaacttgcttttcctctaaacctttccttgtgtcttcaagagtgaatcacttccttcctgctcgattggaatggactcttcgtatcagccagtgatatggtagccttaactcacttgactggaattgaacccattggcactgggggtttcattttgtagtgtgttcctgtaacgtagtcacacactgccatgtctctggtttctcacttgcctcctttgctgtggatctttgtttttatatcttgtgtggcaaaatgctgttggctctakccggttgctagtgtagccaaaagtggaccttacttagtctgtccgatctagggtgatgctttttgctgccttacataagcttccagattacagtattgtgcattcatggctttctttctgttaaaactgaaatgaagtcaatgtagaagaacccagagcttgtcacagctgaaatgtagggactgattccataacctgcccatcagcggttgtctctctttctatggtttaaccgatgaaccctttatataagaagcaccattttaaaatttctaaggacatgaaacaaacattgtttgaagcatcagtagcaattgatctccaaacttaggcaaattcacaagccttgtttctattctcttaaaaaaatgtaaatttttatattgtttcttttttctggatattttctggtcatgttaatctattttcaatgaggagatcatcttgagaagtatctttgcagtgaccatatttctaaaacagtctgtccaacctacaatggttgccatgatgctcccacttcatcatggatggtgctgtaatgcattaactgttcatctcctccccagttgattacaaagccttgcatccatactcttttctttctggccccatgagaaagagaatgttttaggtaacttcaacttgtaggtttatctgcccttcaaaaaaaaaaactttaaaaaacttttaaaaattaagaaagacctatcttctcaatgttaagcacttaatttcataacaaatattaagtggcacatagctgagcttcttagggcattgttttgtttttagcttctggagattccagaagagcaaagaatattttttatctagaacacaatgaacagtttttgaaataccttctcagcactcccccaaagcaaaaagccacatatgtagtaaaaccaaagggaaacaatttaataaaataacaatagtatagtaatgaaataaagatataacatgattactggttttaataagagttatcttaactttaagttatttgcccatttatagcattgttatgaattattcataaaattatgtcccacagtatatagttttgaaaaaacatatgatatactacatccagtctaacttctgtggaaagtagatcagaaaaaataagatagtcttgagagaattttattatagaagctgtctaatttgacctattttgcttgctcagtgctaaatctattgcttttttttaatctcctggcttgaaattatatttacttcaataggaaaggtaaaaacatcagtttttacttttcaaagttaattttctgaaataattgcattttaatgagcacaaaatgggtcattttatttttattatactcatcttgtttacacctatacataaacagaaaacgttaaagaagagaaaaataaaggagctaagttctgctgttgaagattatttcatccaaggcttggttttgaataactgagggaaatatctctaaatctcaagttcatcaaagcagctgcaatggaataaaattgctattttatcgagaaacctggtttggatgcttataaattccactactctcagcttcattttcctgagtacgtggtcactgaagcatcatttagacattacataaactggcatgcagataaacctatttacatagagggagaaaacagtttcaatgtcttggacaatctgttattttaatgatttacttaagaaagaaacaatctgaaagcttaccatagcttatcttttctactcacttggagattcaagctattcaatgtgagttttaaaaagttaagcacagttagtgagtgaaatggtagaatgtagaacctttaagcttgctggttgataaacagaatcaatcttccaggacagataattccctgaagggacctatccttgcataagtgaactagttactcatacagaaaatgatctgcacatcttactacaacactacacacaagaactaaaagattaatgattatctgtattctcttcactaattactattatgggggaataatgattagcaaattatatgaattcgagttctctctatacttttattagtaaagcttatcatttaatggactgaagtaagatgtgttacctttattcgagctatttgtagccacactaaatgaaggtgtgtttgaatatggcgcatatatttgcatatgtcccatcattttcttgtcataatggggaattcaggcttagccagtacttctatgggatgagacctataatcccacctatagcagcaagtaactacccttcatgatgatagtgtacatggagctgtgattatgaacatgctgcctttcctgctgccattggcattctctctgtaaattttattatgtgtggtatcacactctccaaaaatgcagggtatttggttacataaccaaactaattaaagaatcagtaatgaaattgcaaaaccatgatcttttttgagctaatgattagttgggctttcctttaaaataatataatcaggccgagtgcagcggctcacacctgtaatctcggcactttggaagtccgcggcgggtggttcacctgaggtcgggagttcaagaccagcctgaccaacatggagaaacccccatctctactaaaaaaaaaatacaaaattagccaggcgtgatggcgcatkcctgtaatcccagctactcgggagactgaggcaggagaatcgcttgaacctgggaggcaggggttgcaatgagccgagatgtgcactccagcctgggcaacaaagagcgaaactccatctcaaaaaaaaaaaaaaaaaaaaaaaaatcatataatcagttcccttttaaatagaaagaggaggaaaaaaaaaaggaaaagggggggtatctcatttgtatacaaatagattttcaatggcatttaataaaagattctttaatggttaaaatgataaagattaattctacatatcttgaaaaatcttaatgacttctgtattcttgacttcttaaaaatattttctttcttttagtgtgcaataagacaaactaaggggaattttttcagcttgtatctcttttacccatattattttccttgcataagcaaaaaaataataattgcctctaaaactgatttgacagtgttcagtgacatcatttaatattggtgatggggtggaagagaaggtagggaatgcccttatggccaaacctaaaacacagtttccttgagccttctgagcaatcttagaattattcagaagctttcaggaaactcaaattctattaatttgatttggttcctttccaaaatgttaatagacatgtatttgcttaaaacgtctacctattccatttaatttcctgctgataaatgtattttatctacaagcaagtagaatattttgttttggttaaagtcaagtttttataaaaggaggggaagtataagagagagtttcctagagatacaatatcatctctggagcaaaatgttgaggccaagtgtaaaaacagactatttctctttacttcctgcagaatttcatttcaagggaccacagcacacccttgaaaattaccatttatttaatgccagttgaaccaatgggtagcaaaagaggagggagggaacatggtcatagagacaaaatctaactactataccaggtcttcctttgtaagaaatattagccctgccaatataaaacgcagatggacatagacagaataagcatcgaggactttttcttatttacttgaaatctagaagctcagtcatctctgctcatccctggacccactggagagttttactcactaacaggtcctttcctggaagaaataacctcatctcctgccatattagtttacaataaaaatcattccaaagtgagccatttcacattgcatttttgccacatgcacatttgctattgaaaccacagattctcagcataagtaagacataggtgtttcagaaacttcataaatacacgatctttcaggtgctcctcaatttcttaatcaaggtatattgaactccagtgattaggatagaacctgaaaacatcctttgttctattggatagtacaacacagcaagagcacacagttatttgtataataaaacaacttaattaatgaggaagatgggatgtttgattcctgctaccaccagttcacttcacaaaggccttcttctggtattaccaggaaaactttcctgcattttctagggaaaaagaaaagtcgtttattaggagcacaatgcagatatgtatctgtgttttcatagcttcagcaaacttcttagtaaaattcccatttcaacaaaaaccaaaatactgattgtttgaatgtagaaaggtatagaataaagactacaaaggggaattttaccagggctccttagaccagcttccccagcataatttttatataactcaagtaagcctctgcttcccctctcctttccagtataatataagaaggtcggaactgtcgcacaaaagaacttgatttcaatatgaaaatataatatgtaattttggggactgcagactttctgcatcaaagatctggacagccttaacttttataaaaataatttttcaatgttctcttttactaaccaggaaaacaagatgttttctgaaattaatgactttttctattttgggtctgttttctaagtttttacaggttgaggtataaagggtcgtcttctcctcatattgcctcttcataatcacctggggctattttttgcaagtcactgcatttttacaaaaaataaaaataaaaagtacatctcacaaatcataaaattctccctagacttcagacagtccttctggagtgaaagaatagaaatacagaaagaaaagaattacagggtggctttctttttattttcctatggttaatgtactgtatggtatatatgtttacagaatgtatctgccttgtgatgttaacaaaatgaatgacaaaaaatagtactgatgtgccatttgacagtttgccttagcatcactgtttatgttcttcttttctgtcctttttggtaaaaaaaaacgcaggttgtattccaaagctgtattaacacaacattctcttccccactcctacccagccttyttcagagctgtgaatttcattacaggagcattgaggcagaaccttgcaggtgtggcccaaaggggctaaagtgggcataggttgggatttacttctgcccgtctaccaaccaaacacgtatctgtgttctcatataagcctgcaaaattttacaccctgcctttcagggagacaggccacatggagcrcatgacctcttgtagtcrtctcctcacagtccttcccactgtgagagaaggaaacttgcagacccccaactggatctgggagcatatttttaagcacagttggcattgcttgaaaaagcaagagagatggactcaaattctatgattgagccatgactgaggaatgtgcccattcgttatagtcgaagatgagtaggatgatatgggtgagaataggagtggctgtagaaatggaatattttacagttatgtatttttttaaggaatagtatttttataatgaaatctatatacattatggagcttgagttggaaaacacccttgactgagctatttcttcattccattaaaggtaactttctggggagtcctatagcactaggccaagccttgggggcatgaacaaagggcctgtcacttggccttgcactgccattacatgagatccagtgtttccaaataggccttggttggaagattgagctttctatacctgccattaggtagattagatagatggcttgatagctctctgggctatacttttaataatatataataatctttgggaaggagatagctattttaaatgcaagcaaagcccagaaactatcaaagtccaaatctttcacatatttaaggagtaattgccacatttgaggttaagggaccacttactatggtgcatttgagaaatatatatgaaacggtgagtcagagccctctgaccatcttcagtctacacataagcagataaaccaccaatataaatcttataggggccagacgaggtggcttatgcctgtaatcccagcactttggggggccaaggcaggaggatagtgtgagcccagaagttcaagaccaggctaggcaacatgttgagaccatgttgtttagtctctactaaaaaatataaaaattagccagcatggtggcacacacctgtagtcccagctacttgggagactgaggcaggaggatcacttgagcccaggaggtggaggctgcagggggctgagatctcaccrctccattccagcctgggcaacagagcaagactctgtctcaaaaaaaaaaacaaaaaaacaattatcagttggccttctacataacacagggctacactgtatttttagagttaagtagatacaggaaaagattgtctttatccataaaggagattctgaatttttagagttcctgaatattttcccccaagtttctgtcaaattcctgaagtcccttccctatcacactcagtttcctgaagctcttcccctacacctgctcctctgtctggctaacagagttgtcatgtctcagaaactactcaccactcttgtgagactctcttcccaagcatcatccttcctcaggatgaggcctttttctactacccaagagatcaagaccctttttctaacaagacaaggttatatctactccattttcaagagaaataacccctctggttcccatgcaaatcgcttaaattccttcatcaccagaatctctccaacaggcccaactccagcccagctgtgaacactgctgtcatggagacaactccaaaatgaaagaactatgcaattgcctgaaggtgctaatggagagccagtttactctaatctcttattactaaggaacctctcggtttcgagattaagtgggcagggagacatccagtcacttagttttgcaatgacaggtcttgatatacacagaggccaccaggcaatgcctgatccaaactattctgtatgtagctccaactccaattctgtgatatcctattctggcaggtgggaagagttctattctttgcagggttctggaacattctttcctgctctcaagctcctgacttaggagagtcaaaatcatacaggggttccagaaaatgttgtgtctgatgcagcttctcagtgaatgtaggttgttggtgaaattttcagctttagcatctcactcggggtgagtgatgtctctgtaaatactttcatttgtggttggttggtgggggtgggggtgggagcctgtcgtgcttactctgaattagcttactgggctagctgctgtactttgtaacctgaagtgtactttgactgttctgtttccttcagatgaaaaacaaaataaaaaccgacttcagaaaagacactaccagcgacagctgatgctgtacttgtagcttctctctgttcctctgtacagtattaatagacaataaactgccttttcactgcatctacctctgtgtgtctgtgccctgattctttccccttctcacctgccactagcggacttcaggccagaccgtgttgggagcaccttccgctgttcactaaaactaaacactaacccagtgcctctcaaactccagtgtgcttcagaatcacccgggggtacctgttaacagtgtggaagcttagtcacacctctggaactcagattccgattcccaggtggggcccagtagcatgcatttgtaataatgtctccaggtgattctgatacatgtggtacctggaccgccggtttgggtgccccttggtgggaatcctcatggcccacctgttgtagttggtttctacactaatccaatctcccaacatgtcctccctctaaccccctttgcaygtctctctccacaactgtcatccttttcttgttccttgcaagctcccagcagcagcccagactgtgatcaaacttgggctgccccttaggctaagtgacagggttcatctggtgcagtctgctgtttaagagcatctgaagacacgtggggactttgtttctcttgttcacctctctttacctggaacagggtcagcatagtttttcaataaatggccagatagttttggctttgtgggccaaatgatctctgttacaactactcagctctgctgcaaagcagccatgtatgacatttaaatgaatgagtatggccatgttctaataaactttatttacaaaaacaaatgctgggtccgatttggcctatgggcttataatttgccaacccctggcctcaaacagggcctggtccatagtaagtgctccaaaaaaaaagtttcaaaaaattattgcatgaaagaatgaatgaagagtagatatgatgcctaccacctgcagagcagtcacagaaaatggttttctttgaggagattaagtaaatgaatcagttgggagttctcatctggttgggttccatggtagattttttaaatgtctttatgcatggaaggtaactttaaagatggaaatatgagtggtgttttayagattgctcaaaccgccaggttaagattgacaagagtttcaaccaatagaacgtggaggaaatgcaagaacatcttgtcctcatcaaaagtgctggggataccagaactgggtgctccctatgtacctaagcatttagtgcagttgtttgtggagctatgttttgtcagattcatcttacacagtgaatggcagggctttctttacattattctctttgttaattgaaatactttttaatgtgtagttaggtaggctggaaccatgatagcacattacacatcccacagttctagagcataccaacgggttcaaatgtaggagcatatggaaagtcgtgtgcttacattcatccctagtgttgttgtgaagttaaaggaaattatatttattaaaagcactgtgtaagctggaagtagatgacaaatgttagtttagttataatgagaaagtgtctgttgcccaaccagaggcctcatgctgtccaaatatagagattataagctgttcaggtgtgtttcagaactagtatagaaagggaagctkctttggcctcctttagatttgtgactagttttgtagtacattgaaccttatgaaattgccattttgtagatccataatattgactattgacagttccatatagttcaacctcataattcgattctggggattatatctcatcatggagggcaaatgattaccagatgaactctaaatatagcaggaggaattagatgagaaaattagaactttggaagggaatgtagttcagtactaccaagtagacctagacatttcacctgatagggtaggatttcctttaatctcacatcaactttgtaatgtagccattgaggttactgtccttttatacatgaggaaactgagttatagagatagtaagtactttggctaatgtggcagggctaaaaatccgtgtggggtggaggagggccaagttccaacctcagttgtctttacttcctcccacacagagagctatgttatgaaagtggtgtggaggccgggcgctggaggccrggtgcggtggctcatgcttgtaatcccagcactttgggaggctgaggcaggtggatcatgaggtcggaagatagagaccatcctggccaacatggtgaaaccccatctctactaaaaataaaaaattagctgggcttggtggcacgtgcctgtaatccccgctactcaggaggctgaggcmggagaattgcttgaacctgggaggtggaggctgcagtgagctgagatcgcaccactgcactctagcctgggtgatatagcaagactccatctcaaaaaaaaaaaaaaaaaaaaagaaaagaaagtagtgtggagatgcccctragactggagacaaaaagatttagataatgaggttatttatgcaagaaagacccaatggcaccagttcttattttgcacctttacctactcaagcaaatgctctgttaattataccaccccctggaggctgggaggcatctctgcagcgcttccttaccaaaggagaagcggagggtaaaatcactttgttttcttatctgttcatcaggagtcctgttgttctatttgacagtttttccttcaccattcataaaaaggattaacaaaattgcccaaaacaactctataaagtctaggagtggcacgtcagtctckgaaaaagcaaagggggttttgttattgttgctgatgatggtattgttactatttcaccactgtcataacagcaaagaggaacagctgccctatggtgttatgcaaatgccttttgatctaggctatatcatccttgtgcagctattaatagaccacatcatctccccagcagcccccaagccctagcttctgtcctgcttttctcaaacagtattaaatcttgcattttatcaacagcacaaaaaagcaaagatttgctatttagaagtggacacaggaaggggaatatcacactctggggactgtagtggggtggggggaggggggagggatagcattgggagatatacctaatgctagatgacgcgttagtgggtgcagcgcaccagcatggcacatgtatacatatgtaactaacctgcacaatgtgcacatgtaccctaaaacttaaagtataataaaaaaaaaaaaaaaaaaaaaaagaagttaaggttgcaagatcttaagtgatcatgtagggcagaagtcagaaaatggttatgcagattctgggctgaatctggcctacagtaaggttagtttacctgcacagcaattaaaaatcattttgaattcattgccaataataataaattaagagagttcttattttaaaagtatatttccgacttctcttgagaattcagtctctggcaataatagcctgttctccccactggcaattgtctggagctgatggtggttgctaactttagaggagccatattccgttgttcatcaccaccaccaccaacaccaccaccatctcctattatttttaccaccttctattattcttactcttggcccacttcctttgtctgtatcacctgcctggcccctattggcatttgagcatgtgacscctaatctaccatcattcactcattttatggctgggtcaaataagtcctaggtggaaatgggacttaccttagcaagataacagcagactcagaactaaagtcccctgaactctttggatgaatgaggctttgtactgtgttgggattcaaatcttctaagggcatttttagttttgaacaggctacaagcagaaagctaatgccagaatctagtgcttttgctacagaggaacccatgtgacttatataatgatgaattaaccttaggttaaatgaacagtgtaagtttgtaaggaactttagggtatcctgtgtttcatggtaaaaagtttcattcccaggaaaataaatagatactttgtagtcaacacctcaatagttctggaggcttcatgttccttcttagcaaaaataacaagaggcacagcccatacttatttaaattgaaatgtgatcttccatgccttcctaatccttagtctttgattgtgttcctgaggtcatgtggttgtagaatactactattctgtattgtccactttttttatcttcctaagagcaataatcctcacagaagcttgataattcaaaggactaatgaaacagagatctttactcccagggcttgtcataaatcctggccaatatggtgaaatcccaactctactaaaaatacaacaaaattagctgggtgtagtggtgcgtatctgtggtcccagctattcaggaggctgaggcaggagaatcgcttgaatctgggaggcggaggttgcagtgagccgagatcgtgccactgcactccaacttggcaacacagcaagactcctctgtcttaaaaaaaacaaaacaaaacaaaacaaaaaaactgatatgatttagtgtttgtttgttttaaggaaagactaattttttttttttttgagacagtctcactctgtcacccaggctagagtgcagtggcatgatctcagcccactgcaacctccgcctcccaggttcaagcgattctcttgccttggcctctctagtagctgggattacaggcgcatgccaccatgccaggctaatttttgtatttttagtagagatggggtttcgctatgttggccaggctggtctcaaacttctgacctcaggtgatctgactgcctcagtctcccaaagcgctgggattacaagtgtgtgccaccgcatctggccaaggctaattacatttaagatgataattgtatttcccaaattaaaaaaaawatttccaagtcactgaatattaaaaacacgagctgtgggcctattctcttcaggccagggttcttaggtcaacctcagacaacctgaamgtgagataaattctgcagttagtgtgaattattcagactatcagaatctgccaaatcaaattccatttcttcaagaacttatttccagtcagagtacaaagatagagtcagcttttctacttttcctgaaagactgcctaaattctaactatagctcagagactcagtgtgaggtgctgtcacataccttaactcagtttttcctcaaacttcagacttttgggcatcatatttgttatttttgtcctgtgtgtaccagctcgctcctgttaaaagaaggaaatagccaggttagagaggtgtcaaaaacatagctccatctctttaatataatcagatgggagtgaaagagaatcaagatagcagtaactttcttgctatgtgagtcagtgttacataatgccatgcccacttacccccaaaatttaggaaacactgtcttgcctccttgcatcctcttaaaaaaaataaaaatcccaattcctcgtttcaaagagactagggttagaaatagaaagtgacttgctcaaagccacaagaagagcagagacacagagctgggattcagacccaggcagggtgacttcaaattctttccattgcaccaggtgcctgtcatgctgttccttttataaggattgaatcgagtacatcagtagcaaacttaaactctccagtaagatcacgatcgtttaaacaaacaaaagtaacatctgttccagctaaagagctgtctctggcataagcaatttttcaccgatggaggctagatctgattgggctcttgctgagttaattgagcaaagttacgtggccagatgtgagttttcagatagaaggggaagggaatgcaatatacaagcacatggggagactgatggaccaaatggctggctccactataaaacactccagcgtttagcctttgttctgcctcctgggcgttagcaagctgactccygcacagaagacttcttggttgactcttgaagagtcagggatttagtcaatgcaagctgtaaactggctcagcactagagaagcagcagacatgagtagaaaaaggttctcccaaagacagctcagcttcacttttctcttctctcttcactcctttcttctctcctcttttctactgaatgaacttaaacatttttcagctgagatgcattcccacctgcagggtgaactgaacttttaagaagcctattaattctcccaggaagcaccaggctgcagctctctggttctcatttcttgcttgctatgtattagaacctgggacattttctccaaaatataatgctatgagggcccccactccagagatcattatttaattggtagggtgaagcctggcacatttattaaatggttccaggtgattctaatggagattcagccagtgttggaaacagcagcacacgggtgcccagggctggccgcagtgagtccgggctatgattcttgcctcaattctgcaagccaagaaaaacgggctttggattcaggaacaaagcaaagcccaagtctgtcattggccagctgagtaatcttaggcaattaatttcaattcaccaagcctcagtttcttcttctgtagaatgggaataatacctaccttgcaaggcttctgttaggaatgtttcccttctcctttccttcccattacaaaagaaatatatttgaggcagttgattgaaaaaaaaaaacagcagaaaaagaaacagatggagaaattaggccaagagaaaaataagatgaaattagaaaactccatctagcttatattactgaacgtttacttctctcacttgtttgagcaattcagtttgtaaaatgtaccacataatactactttatcaaccaaaccacttaattctaagatcttgggtctattttgaaaacaacaaaaacatgatgtgayagaagcagcattcttgagtgtaaagggacccatggactgagctttgtctcatttatgcctttatcgtatgacttagaggaagtcatttttcctctcttggtcccaacttgctcatctataaaatgagacaacgtgattgtgggtgacattctgagtggacgccaacctcaggagtatttttctataatttaaaaagaaaggagagaagaaaaagagaaggagaaaaggaagaggagcgagagaaaaggaaggaagaaagaaggaaggagggacagagagaaagaaaaggaagaaaggaaggatgaaagaagggaaggagaggaaggagaggaaggaaggaaggaaaagaaagagaaagacattaagaggaggggagttgttccttgaaggtgctgaagtccctggcctttagaagccatcacatcagccatctgctgtgcctggccctgtgaagttactagtaagccacccgtcactgccttgttccagggtcttgaaaccctgtggctattttcctgtgtatgaaattcagtggggggaatacctgcctgaccaaaatttgtagttccccatggttgaaaataagagtctgaatcttccttttaaatatatgaacagaatcgtctttgcctgccatctttgtgccctcactttctccttggagacttggcaaacccccccaccttgagggagaatactgcagacacgtgccactgctcccctattctagatgttttctccaaaggaacgttgagtttgtgagcaacaggctgacagtgcttctctccacagacaatgtttaactctggacaaaatacaggctccttctcttgttctcacttgtgactccctgctccatgaatgtccagtgtactgggtctgaaagcagtaagccagttctgctctttaatagctctgtgtctttgggtcagacacttagcctctttgctctgtaatacaccatagagagttgtcttaagtataaagatccaggccaggggtggtggctcaagcctgtaatcccagcactttggaggccgaggcgggcagatcacaagctcaggagatcgagaccatcctagcctatacagtgaaaccccgtctctactaaaaatacaaaaaaactagccaggcatggtggcgggcgcctgtagtcccagctactcgggaggttgaggctagagaatggcatgaacccgggaggcggaacttgcagtgagctgagatcacgccactgcactccagcctgggtgacagagcaagactccgtctcaaaaaaaaaaaaaaaaaaatcctaatatttccattgatccaaagaattttagaagtggtagatagaaagttaggcatagaaactccaagttgaatggggttagttagctgaagtttggctgaagagagtttgttttcatgtcttttcacctaccaggagaaaatttccctcattgaatgttggaaggagacgtgggaatttttggataatttcctgaggcagtggctgggtaatggaaactctcattgtgagcgtacaagcatccatcctcatcactaaggcactctcctactcagtaagaacagagaatcactgctttgttctctttctccagaattaagatcaaacccttctctctggaattcaacatttgctaaaatgcaacaacttcttctccatcacccccctccgcgaaaccttagttcccactgattcccaacataaatttttctttttaattaaggatcccaccctggccctcactggccattttcaccccttccccacacttggcccatgctgttctgtgcacacttggaatcatgtccctcttcccctggagaagccttcatcctgctcagcccagctgcagtgctttcatctcatactgccccctgcacccacccacctttcgctatcagccctcctctgcacactgcactcctgctgtctttaccatacggctgacccttcagtggggctcctctgtattcattggataaaatactaattttttagttccaaaatggatcagtagcagcacctttgatctctgaagtagttgactttcaccctgagacacagacttatagaccatagatgaaaaatgacaatcaagatataatgcataagttgagcacggtggtatgtgcctgyaaatcccagctactcaggaggctgaggcaggaggattgcttgagcacaggaatttaagtctagtctgcrcaacatagcaggaccctatttctttaaaaagaaaaaaaagatgtaatgctatcttttggctcccaagagtcagtaggaaggatgggagaggaggggacaggagcccttgccagaaaaggaaattgtagttttattttctcccgtatgtcagaagagaacagattggtatggtgtgcaggtagccatgggtcttctcttaccaggccagaggagaggctgaacttccctcagcagttcccaagcaagtttagcagcagaatcatagacaaattgtcttcctatgccttgcagtgtgggtgcttgtttactatttgagggaaaagtgtttaggcaaacaggtatcctgagggtgaccagctgtgcaaggattaggctactgaagcacaccagttctggctggtgggaatggaactggagctccccagcagggctgccaagtatgattgttcaggttgcatactgcacaatcctggaaggctccattcacatcaagtacaatgtgaatggtgctcttrgagttgttcagtgcataacatgcatactacacctgctcaggcaaaagcaacctatccgttctttggaacatatagctaaaattcaaccagaaacttactttataatcatagcattgcacatatattaaacttgctgtagcctgtcaagttgcaggaatcagtttataccctgaagactatggacttgacttctaggaaccggtaatgaagacatacttccagggaccaggcatattcttccttgattttctccagtgaagtttagcatggtataaacacatggtatggggtagatatttcatgatgttgtagctgggatcatggagcagaatgaaagggcagaaccagttgctcttttctcaggggcggcattgcccaagcatgaattgttattgagtggccacttagaagaaagatttctctgactggggtgaccatatgtcccagtttgcacatgttttaccagcctaattttcagtaatgttcagttgggatgatgaaccatatggtcgtgtgacctctggcatggagatgggcatctctgctttgtcaactactccacatctgcaaccagcctttccttttattgatgccttggcaattctccatgatacagacacaatgctgagggcacggcaagactcctgtacgcaaactgttctgaaggatcagagtgttgtarggtgacagtcagcctcatccacatcaaagcatttcctttttttcttcaccatttttgatcagtttcatattcctgtgggtactaatgaaaaggaacagcagaaccactatcaagtccagtacttactaggcagatagagacccactggcttctggcctgtgccacttgctgctgcccacactcatcagtggaggagaattccctactaagttttcagtagttataattgccaccaacattgcatgggagagaggagcatgacttgaagtcgtttgcaaatgtatgttcatccaacaacagccaagaagcatacccgagactgtgcaggtgctgcccaagtcctgaacacattactgcacagttgctcagagttctggttcgactgctacctcttgtaccccagtttcttcatgtgtagaatggcaaagagggttaaatctcttacaaagtgttttggacactgcctggtaaatactggcagaactaaaatatagctattagtaagaatagtatcagcagctttgagagccagggaacaacccctaagaatggtatgaagtagggatcagcaactatggcctttggagcaaatgtggtcctctgcctgttttgtaaataaagttttattggaacagaattatgtccacttatttaagtattgtttatggatgccttattgagtagttgggaaaaaaatcatatggcccataaacctaaaatatttattgtctggtactttaccaaaaaagtttactggcccccaattaaagcataagtaagatactcaaaatctcattcctattcctattccactagcagttactgagcactgattaaatgccctgaactgtgccaattttttttttttttttgtaagacagagtcttactctgtcacccaggctggagtgcagtggcacgatctcggctcactgcaacctccgcctcccgggttcaagcgattctcctgcctcagcctcctgagtagttgggattacaggtgcatgcgaccaagcctggccaacttttgtatttttagtagagatgagatttttgccatgttggccaggctggtctcaaactcctgacctcaggtgatgcacccacctcggcctcccaacaaatgttttaacatagattatcttatttaactttcatgagaagtagctcttcaaggttaatggaaatatcccattttatatgtgaggttcagagcacttgtgcttgtgtacaattgcagagctaggattcatactctggtctggaactttaggagttatgaggacagacatcctggaggagttcggtttgcacttgttcttgaagaatgagtatggttttcagtaagcaaggagaagacccaggggagggtattgcagaaagaaggaattgactgagcaaagggcctgaaataggaagcttgggctggttgtctgatttgtttagcctgaagggactgaaggagacaaggtgaaagaagtggctgtatgccaggatgtagagagacaggtacttcctcgaggaagcagctataaactgaaagttcaaggtcaagcccatagacatattgtgtttggcctttactgtattgattcacacaaggatgtttgctttggttttcacttgaatttataaccagcccatcctacatttcatcttctcttaaaagactgcaagatctagccagactcagccacatttccaggaggtgggaactagctagagttgagtttagctgccctctttagatgcagcatctgctttcctatgggcctttactcatcttagactcaagcaagcacagcccccatactgggccctgggctttatagggccttgctctagtcacactcttttctaaggggtgaggagtctttgggccaaggtgacttgcctgctccctacccctgtcccctgactgtgcttcacctcccaagactctgaattgtctcctgaacggtcccrgctcacatccagaactcacatgggcctcttctctgcatctgtcttcccaaggatgggccactctgaagggtgtaccaaagggaagcagtttgccttgaaggtagcgtatgtgtggatggacctttgaggtgcaggctagggtgtccaccatgggtgtgcaaggcctctagaggtgcaggacagagcagagggtacaaagagtagggaagaaggtaacaggccacagaatctcgctctgcaccaccaaatctcaatatgggacacgcaggaatccaagaactcacaatttgaacttggccttctcagtcagtatgaagtatatttgccaacttagtaagagagaacataaaatatttaataattttgaatttgatttcagatattgagatatactgtatgtcagcatctatttgtgcacttgctccaagccccagaaatgttcggcataggcctggctgcagccctaccagttcccattgtcttacaccagagctgtgtctctcatggacatgacctgtctggtgcttacaggaatgagaggttttggccctagctaaattggtttagtggtgaagaagattgaaggtttttgatcagggcagattgtgccaaatgggctactgcaggcagaggcagaggcaggaaggccagtgagggagctattgcaggagaccagctgggaggtcagagatttgaaccagtaggagcgagagaagaagggacagatgcaagattaattatgtcttttccttccacaatgatctttaggttaaggtcgccaacttaacccaatttagcctgtgactttcttggtttttgctctgcaagcttctgtcccaggaaaccccacagtactggtcacactggggaggctggcttgcctgcctaccacctaaatatcagccaccatcatattgagctcttactatacctcagctgggaacttgagctcaaggctttggacttgagtataactttgctcctggaagcaaactgtctggctatttctattccttgaccctaaatcaaaaaatggcaaataactctcaggccatggagcttcccttgggtgttacagttacagattttcaagtcaaggatatgttcaggacctaattagctcatccagacacttagaatctagattcatgctggaagggaagaaaatgtctccctcctcacctttgctggacacaaggatgtgtcatctttcatctgtttcttgccattgtcattaccatcaacattgacagagataacacatagaaccttgaattatggaatccttattaagttagatactcatctcttctagaaaataaaatgtttattagtaaaagcagaatcctcaggaaaacagtatttataagccctagacacatggccctggaaaagtcacttaacttctctgaacctctttttcctatgaagtgggactaataatccctacsatagatttgtwtggagaataaagtttaaaatgcctcrtgcacaaaagaattgagagcaaggactcgaacagatatttgtataccaatgctcacagcagcattatttccaatagccaaaagacggaaaaaamcccaagtgtccatccacagatgaatggataaacaaaatgtgatatatccctacaatggaatattattcagccataaaaggaatgaaattttgatatatgtcacaacatggatggaccatgaaacatagtgctaagttaaacaagccagagagaaaaggacaaatattgtattattccacttacatgagatatctagactagtcaaattcgtagtgacagaaaggttaccagaggacctgggggagagaagaaaggagagttattgtttaatgggtacagaatttcagtttgggatgatgaaaaagttctggaaatggctggcggtgatggttgcacaacagtgtgaatgtacttaatgctatcgaactgtaaacttaaagtggtaaatggtattatgtatgttttaccacaataaaaaaataaatgcctcgtgcagtacctggccattgaagatactcagggggaaaaaaaagagctaaaaagagatattaagatgtttctaagtgttactgagttcagaagtgggagttcatactttaaactaaaagtagtcaacgaaggatttgccaaggaggtgggatttgagatggagtttgtaggaccaggcaagggaaaaggcaacccagccaggaggaaatgtgtaagcaaaccatgaagctcctgtgtgtggtgatggggacccggtgatgatgttgtgatctgttttgttttttgttggagactagatttgggatggggtttcaagggacttggagtccaagttgacctgtttaggtgccaggcagagcagaggcactaaaactatctgggcagggaggatgaaaagatcagtgtcggcagaaagatcaatctggggcatcgtagaaaatggattgaatggtgccataccagaggttcaaggcagccagggcagtgttgcacaagtcctagactaaactaggatggtggctgtgcaaaagaaaagggagagatggagactaatttcagaagagccttgatagacttaagatatcaaggaagaggtggcaaagtgttaaatgtttagcagaatagctcaaccctggagccaggtaccctgcatttagtactgctaatgttctaataccagtactgctgcttatgagcttgtgtgaccttgagtgaatgacttaatctttctgtcctgtttcttcctctatcacataacaatgaatgacaaagtagtgcctctctcacaaggctgtcatgaaggttaaaggagtcaatatttgtaaagatcttacaatagtattcagcacagaatatatgcttgctattttttatcttttaaatctggatggttggtacgttggtgtctgttacgttattttttggtgtttgaatattttaaagcatgaccttaaaataatgtactttcaaaacagtcttgctaagcagtgcttcttaaagcttaacatgcatgtgaaatgtttggcagtcttgtgaaaatgcaggttctggttcagtaggtctcaggcggtactcaatggtctgtgtttgtagcaagctcccaggtggtctggtgccgcgggtctgccggccactccttgagtagcaaagttgttaaggaacggagttccatcacggtgtttctaggattgttctggttgtcttttgccacataacaaatcatccaaacctagaagctaaaacgaaaatgatttatgttctatgctgttgttgttattattatctcttgcagttcagctatgtagttcttgggatctgtcacaagctggtggttagatgtagctggggcaagagtcaagagtcatcctgaaggcttcctccccctcgtgtccggtggtagatgctggctggctgttgggacctcagctggggctgtcagcgagaacatctccccagggcatctccatgtggcaaggggctcttcacagctcagcagctgtatctcaagacagagaaccaggcagaagatgtattaccttttcttgcccagcctccaagtctcacagcatcgcttctgccaccttctatgtattagaagcaaggcactaaggccagcccatatgcaagggtagcgcagtgagactccgtgtcttttttttttttttttgagacagagtttcattctgttgcccaggctagagtgcagtggcacgatcttggctcactgcaacctccacttgctgggttcaagtgattcttgtgcctcagactcccgagtagctgtgactacaggcaggcgccaccacacccagctaatttttgtatttttagtggagatgggatttcaccatattggccacgctggtctcaaactcctgaattcaggtgatctgcccgccttggcctcccaaagtgttggggttacaggcgtgagccaccgcacttggctgagactccatgtcttgaagggagaagtgtcaaagaatttttagacatgtctcaaaaccaccacaatggcctgcttaaggaagctctgggaggaacagaaagtggtggatgagtcaaccagggaaagttgactttgttgtgtttaaatttgtgggtttggggtaccatgaagaccacttgaagttattctccaacaggcaggatggtgtgtgagtatctgagtatctatctctcacaccagatcataagcttcttgaaagcaaggacttggtctttttctctgcaatagttctggtgtctaccacagtgcttggcacacaaaagtgacccaaacaatgtttgtttgatgagggaatgaataaatgaatgaatgaatgaatggtaaaggatttaggactgaggctgtgtggtctgaagaagaaaggatactggaattctggaaatctctcccagaacagtcctctctggcacttctcccagggagagggactcctgcatttgctcagaggccaccatggccctgggggtctggcctgcctgctttgcaacttgaggccctcgcgtaccccataggctgtggaaggcctggatctgctgggaaacctccttcttccactaaatggaaactggaattccaggagaaagcaaaaatcaacaagagctattttgattataatgatatctcatttctaagcagctctctctatttcctgtttatagcccaaactgagagcagaagcgactagatctctcagtgaaaggttttctccgaagacgtctagctatatcatcaacaggaaacagtactctcccaagacaaaagtccctgtctctggccactctgttgggtttcattgcaccctacaaagggaggtgggaaacctgggtttctgaaagaggccctgattttgtgttagccttcagcatctaccacttgtacccagctcccagtcccccaaatttctggggactccatgtgaaatcaatgcacaggaattgtggggggaagccctaaggagtccagccgcgattttcagcgcgattttcagggcagctacatttcacttcaaaactcccagtaagtctgccactaagacccctggaaaggctggctatgtcagccctctgtcttcattagaagaatctcaggatttcttccagtgacagaacatgatcctcagattccagggagtgaccccagacccagttcctctccgggctataaaactgtggagtgtgacacagacagagagactgtggtaatttagagactaagaaaaaaactgactagaaagcaactgaacagaacagctgcaggaatgtaaaatgcaagaccctctgatctgacagtcttttcctgcacctctacaaatgtgcgtgcacacacacacacacacacacacacgactcccagaaaggaccctctgaagacaggacatttcagctgacatctgaaagatgaggaaggcagccatgccaagagtattccagaaagaaggaacagggtttgcaaaagctcagcagctccacagctgctggtctgggccaaataggacagacagcctgtggctctccccacaccttgtgcttcctcactcagccactgtgagtctcctctcgcctgaaacagtctcccgctctgtcctaaccttccagcatctttctcattcactctgtctcctgaatatcacccacaaagggtagcagtatcagtcttggtccacacacttatgcaagaagtgccactttgttttctttaaatcaagtgatatcagactctgtaccccaaggctgctggtctggcaggcagttcaaactcagtcgttcacggggctctctcccacccaaggtcatgcaaaggtgacatgctcatcttggggaaggcccatcatcactggttctcactggatttatccttgggtgtgcattgtcctggttttcagagccccttcagggctgaagtctgtgtggcttctgagccaagcttggagacaggagccttggcagaggctgggagcctggaatcagcatccagcttccctgcttacaccacagtgtagcactcccacatcctcaccccaccccaccccaagtgcagcctacagcccctcccctctactgcttctgggagaaagtgcacccctccccgaaccccaccaggatgcctagcttcatctctttagtgaacttttggcttttgcaaaagacctgaaggcccattgaccaaaagtagcctctgcccaggcaagggagcacaaaacccactcatcytctagaaatggactggagagtgcaacacaggaagtgcccacacagatgtttcctagaccttgcctttagggtccctctgttctcagggatgcagtctatccagccctgggaacttgaactccctgagaacaatgtccctctctatctatggtaaaggattaggttttgttttttttcttttaagcttccagttcatctcagaacagtacttttgtaaagtacaatgaaagtgaatgatgagaaaagtaaaatttttgaaagacacacagaatacaggtactgattttttattattagattcaataaattgttattaagggttctaaacatattctttccatttctgcactcacttggtcaccgatcagtaaccaactgtggagggacacggattggtgggccactcactttgaggagcgctgccttagagcactcaggagggagcagtgagtccttcttcacctctagaaatgtggagcttagtgaactgtagaatcttcaaggggttagggtagaagctggaaacaaggacagcctttacctagtgagccaagaaactaaaatccagcctcctcttacaactacttacaatgcaaaaagaattacagtgtaggactatggagcctgcctctggggcaggctgcctggtgatacattcagcactgccacttactgccttgacccaggatgagttaatagctcacagcctcagtttactcatctgtccaattaggatagtagtactatctcataggrtttttgtaaagactgaagttaataagtgcataatcacatagagttgctcttggaaaatagtaagtgcctgtgaatattaaaaatttcctggccaggtgccggggctcatgcctgtaatcccagcactttgggaggccaaggcagaagaattacttgagcctaggagttttgagaccagcctgggcaacatagggagaccctgtgtctacaaaaaaaatttaaaaaattatctgggcatggtggcatacacctgtagtcccagctactcaggtggatgaggtgggaggattgctcaagcccaggaggccgatcacaccactacactgcagcctgggcaacagagcaagaccctgtctcaaataaaataaaataaaagtttccttagaaagaaagcttcaggaggttagggatctttatttcctgatgtttcccaaatgcctagaaccatgcctggcacatagcagtgctcagtaaatatcagtgaatgaatccatctccttatccaatgctgaacttcaggcttccatgtttatcccactcttagtcccttttttttttttttttttttttttttttttyacagagaaaaggggtctgtttgctctttgtgttctttgtgttcatagtgtttccaagccccaggccattcagagcttttgtctccagtgccccacacattcaagaaagacttgaattgcctctcaggtctgaacctgttttgtgcagggtgtccaagctggagtgcaatggaccggtcttgactcactgcaacctcccactcccggcttcaagcgattctcctgtctcagcctcccaagtagctgagattacagacgttcgccaccaagcctggctaatttttgtattttcagtagagatagggtttcaccatgttggtcaggctgatctcgaactccttacctcaggcaatccgactgcctcagcctcccagagtgctgggattacaggcgtgagccaccgcgcccagccaagatacattgttgcagagtgtaaaaccagatcttgttgacctggcatttagaccttccaaaatctgatttccacctgtgtttctaggcatgtgacccactgcacactacacagcccccacagggaccatttctcctaccctgagcaagccattcctccaagacacacttctttgcaactcctgcccgttgaaagattactcattctaccaagccaggcttaaatgctgcctactctctgaagctgtctctgatattccaccagagttcgtctctcatctgcacatctactaattctctgttctcaactcctgttcagaagaccttgtaatcaagttcattgtttgcacatctgtccctttactaaggtggaactccttaaggacaagggaccatatcttcagcagctctgaatagcattggtgcttcatgcagggcctygcctataaatacawcttcaacaggtgggagttgttggtgggttcccacctgcaagcataagtcagcaggcttcacagtgagtggcctaacataggtgtggatcagaaggaaatgaaagcttcattctagcttccccaatactacttgtctcttaccattccgttgtcttgagtattctttggggaacctgctgatataggaggaacagtggcttcaatctgaaggactgtgccagcttagggtgagtatgactcagtctggaagcagaagcagaagggaatatggttttgtggatgracgtgggagacagcatggcatgaggttagtgctctgaggtctggtgcatctggcttcctgtctaggctctgctgctgactggctggatgacctttagcgtattcttcatgctttgatgcctgtttccccatcagtatactatagacaatgttgggacctcccctaacccctgccactaggggcataatgaagaggaagccaaggggtgtgcatatgaccccaccaccagtctgcagggaatgccacaaagatgctagcctttgcaaattctggtgcagtgttacgaggagacaaagttcacaaacattaccttgcccctgggtaccacgtgacttttgtctccctatatctcctgyacaattgcaaggattaaacatgctaatatgtataacggacttagcaccctgctctccaataatggcttaataatgctctggtttctcttcagatcatataaatctttcaccttttaccaataatggcttaatacaccttttaccaataatggcttaatacacataagcaaaaagactcagttaatataggctataagttggaatcaataatccatgaaagaaaccctggatagggtttttaggacacaggcactgctataccctaatagaatggatcarctttcattcagttaaaaaaaaatctacttcttttttatgccacaaagtgccaccttaaatttatcttagtgattgaatgtcatacccaaaagaatcaaaagcactggagcagttgatctggtagaaacttcagcatgtgtttgttcattccacaaaggtttactaaacccttgctttgtgacaggcactgtataccagttggccttctctctacattatgctgttgcaayaggcaaccccagtaatggtttctttcttgctactggagctctgttctaggtgtcttcattcctggacccaggctgcaggatcagcccctatatggaacatgccattcttatgacagagagaaaggggtactaggagaaccatatagtggctcttaaagtcatgcttggatgtggcacgtgtagcttatattccattggccaaggcaagtcacatggccaagcctggcaccaatggggtaggggagtatcctcctcccatagagcagcactgcagatctcttgacaatgagtgaggatatataatcctcccacrgggaaggcagaaaggatttgggggcaataatactgtctgccacatgctgtcatgaatgctatctagttttagtctcttgataactctgtgaggtaggtattattatcctcattttacagagtggaaaattgaggtttggtgtggctaaccaacttgcccaagatgtagccagtaataagcacagctgcctgaatcgaagccagtaccaatggtatatagccagccttgggcttcttgaggactcattttcatatagatgttgtcattcagtaaacattgataaagcatctactatgtgcctggcgctgtgctgggcattggaaacacastgatgtgcaagacagacactcttcctactctcatggagtttagagtccaaaggaagagagaggcagacaggacacatgtaaagtatgactggtatgtgcttctatgagggagatgcagactaaagcaagagtccatggagagagcatgcaaccagactcagagcataagaaatggacatgtctctgatgactgcacagaatgtaagagctggaggactgggtcacatggctgttgtcaaggccctgcctggcagggtgagtgccaagggcagtttctgattcagaattctaaagggcactcacaagagttcaatgccgatgggcatatgcccagcctgttgctaacgggactggacaaaccagtggctgtgtggcaggaacctaccatgtgcttccgactagtgagtctgacccaaagcccttttcaggcttcttctgggagtgttgcctctgccttacctacactcagagccatgcatgctgaaaaaaaaaacccaaagacccagagatgtcaacaacaacctgagagagaaagagaaacccagatttgatctgattttgaatcggcagagtgacacatgttgcttagactgccaacgcacgccactctcacttccctgaatggtttccattttagtggcattgtaataaaaagaagaaggaaaaaaatcccctgcaatggtttacaaagtgtaccgcaatagtaagaaataccattttctcatcactgctgctgcagcaccagagtatggggcccagcactaggcctgtctttgcaagcaggactaattacatagtaagtgattgcccctcaaacagagatggcatgtgtgctgggaaataggtcacttcttaatgaggtgaagctccagcaagaagcaagcacagatgcagactattcctcttgggatgcaaaaggcatctgaaaggtgagcacatatgtcccataggggagcctctggccaaatgtcacatctccagggaaatgtctttgaaacagatgactctactttcagcttggttatggacacacacaaccttgaaagtttcagaaaatatcacaaagccaaatatatatgtatctgcacgtgcacacacacacacacacacacacgtttgtgtatattaggattcttaagaaaagcagaaccaataagatgtatgtagacatatggaaaaatattatgagggattggctcactcaattatggcggttgagaagccccaygatctactatctacaagctggaggcccaggaaagccaatgatgtaattccagtccaacccagaaggccagaaaccaggggagtcagtggcacaagtcccartccaggtccaatggtccaagaaccaggggcaccagaagacggacatcccaggttaagcggagagagaaagttcacccttcctccacttttgtgttctattctggccttcaacaaattggatgattgcccacccacactggtgaaggccatctttttactcagtctaccaattcaatgctaatctcttttggaaacaccttcacagacataccaagaaataatgttttaccatctatctagccattccttggctcagtcaaattgatacataaaattaaccatcacagtaggtatatgtatcttcttacccttgattgtatttgaaaactacacatggacactactgggctttgagtgtcgacttgctttaaaaatagtcttggagcttggaaaggagcccttcttggagagacaagcaaactgactcagcccgagggttatgggcagagaacctgcaaaaattgtggttcacagccaccatcatacattccttgctaactctgacacaaatggtaaaatgatgaagagctacacattgctggggaaccacggggcctgtgcattcagggtcagccggtggggaggaggaagagcagattaagcaagtatgtcccatgccccatgcctcaataatcaggataaatcatattttaataatgcagtattttagaaaatcaaattagcaaactatggccatgggccatctgcctgtgtttataaataaagatttattggaagcattttttctgaaactattccaagttttactggaacggagtgtagtgtgcctgtttaaattttacacccaagccaagtccttaccacctcatcttagtcctggccctgcctcatatccatttactcatcatttccttctcatccagcactacagagtgccaggcactaggagacagagctaacagttactgagcacttaatatatgccaagtactatcattagcagtttacacatattacctcacttaatccccacaacaatttcataggtaagaacagttattcatgccattttacaaaggaggaaactgaggcatagaaaggtgaagaagctttcccaagatcaaacaagtaggaagaggtagagtcagggttcatatgaagaagtttgagggctttgatggagatggatgcctggagaaaggaaggattactcagctctgagaggtcatcacagaggaggtgactttaagcagggtgttgaagggtgagtagaagattgctaggcagaaataataaatctaggttgctgtagtgtttcagaagasaaaatatatctggagaggttttctctggcttccctaggcccatgtgttgccctaaaatcagaacagcagcaaaataatacaaataaccaacatttattgagtgcttaccctatgtgctaggtactgaactaagtactttatatgtgttatctcattaaatcctcaaataaacctgagaaatgggcactactcttatttctgtctgacatatgaagagtctgaggctcaaaggagttaagtaacttgccaaagctatacagatagtaagtggctgagccaggatgcaaaaccaggggatgccacagtgtgaaccgcagtgggcactgctcatcttgtagtctgtgcaaaacccaaaaacttggtgccagagcttcaggcttagcaaaagcaatatgccagtggtgctcaaacttcacagtgcatccagttcacctgaagggcttgtttaaaaaaaaaaaagcaagcagatttctaggccaycttagaatcagagattctcatttaggaggtctgaggtgaggccaagaatttttatttctaatgctgctggtcctgggaccagacacggagaaccactgtatcacattgactctcagcaacagcaatagtactgtcctcctaagctgcaccagggaatacaagtacaggaggtagttgaaagaacatgcttcttccttcttagtatatagatcaggatccacttagtgagaaacattcaacctcccttctttttattccagttgtccttttctctgacacttgcatcaattttctgattgcctaggctcttaatattgctttctgttcatgtgggctttaatgacttgctcgacatgctagtgcttttgcagaattaggcagcccatgtcccaccacttctgctctgagcctgatgtgcctcttaaattgacacaaactccagctatcaatgtgagaaggatcatgtgtttcctgatggttctctaggctccacaggggccaaattacaccaaaaagtaattggtttcatgtattagtcaggagtctttgggttgcaagtgacaaaacacaatttgaactgatctggaaaaactgacatttactgacatacatatcctgatcacaggaagagcaagggtgccgctggtctgcaagcgtgacacatcagggctttaaatgccactgggactctgcccttcaccccctgcctctctctgggtatcagcaacatcctttcaggcaggctccaaacagcttcctttgactcccaagctctgttttcagtcccaccttgaaatagggataaacagacctggtttctggattctgggaaagggctcttggtggcctagcttagatagttgtccatccctggaccaggaccttggccattttggatgtctacccatacccaatctgagatggagtgggacagggcttgtagaagatgttagctttccctcaaaccataatgtcagagtgagtgaaggagcatttctagaaaagagaggaagagatatttggtaggaaaataaagccccagaggtgagtgggtgagtggaaggagggatgcatgcctcctcaggaccaggtgctgaggtggcagaggggagatggagagaggggagaaggaaagtctcagccttcctggaactcacagtctagaaaggccaagtcatgccagagatgtcagtggaggttggcagacatttctgtggatcacagcaggaggcatagcaaatatttcatctcaaatattttgagaaaacctgggttcttctggatgggctcatctattcacccccacccccaaccaacttttgagcatctactgtgtgttaaacaacatgtctgcactcaagaagctgagcattaatggaatgccctaaggtggcatcagaccttgtctctagtggatcaatcactcccaaagatgcatttaaagctccctgaaaaggagcatctgcgtcttcactggctactgtccccatcctccttatgttgcctgtaaggactctctttctatatccactcaggctttcacaggccaaggctctacctcacttttgcagggtaatctcactgagaatgaagagtcccctcactgtggctttctattttctcactctgggtctgtaagtggagacagtcttctatctctttatgtcattgcctttgatttccttgggattctccctgagattcgttggccatcttaagctgtggcttccagagctttttattaaaaatggaacaatcattgcaaagccccctcagccattcaatagtgtcactagagacacgcttgactccatttctctgactgagctggcagatgttgaccctgggagaggacaggaggcaggtaccactgggcccctgtttccctttctgtcttctccacaagcctctctgctccaggccttcttttttttttttcttttgaggcagagtgttgctctgtcacctgggctggagtgcagtggtgcaatcttggctcactgcaacctcctccgcctccctgtttcaagcaatcttcccacctcaacctccagagtagctaggactacaggcacgyaccaccatgcccagctaatttttgtatttttagtagagatgggatttcaccatgttggccaggctggtctcaaactcctgacttcaagtgatccgtccacctcggcctcccaaagtgctgggattacaagtgttagccattgcgcctggtctcaggtctcctctttctaagagtctagccatgagggtggaggaagaacgcaagccttgctctcaagccccgcctgtcttaagagtctgaggggcagcatagcctgaggaacttatgtgtggcaacgtggggatatcagtcacctgtctcttaccccactgggaatgtcagtagcccctgtctctacctctgcagcaatgtagtaaaccaagtttaaaggtgtcttgcttcatctttgtactttccatattgaggatacctttctctctgcctgtctgcctgggagcttctatttggtggctgtctttactgtctttatttcctcaatgcctagcatagtgcttggagcacaataggtattcaacaaatgactgatcccattaatggaactaatcaaggaaccatctcaaccattcccttaaaagtaagggatgagtagggacaatattgtgggggcttctgatgttattgttggatttggtgaatgataattaagagcacccttaaattccctttaaattcaaaatagattgaaaaatgagacaacatgagctttttatttgtatggctgattagtgaatatgatttagatctgtgtgctgaatacatcctctgctgaattaaactctcccccagacgcagacaggcctggatgacaccggcatcctctgggaataggctgcttttcaaaggacacaggaaagaagtgtgtcctcaggatattcccaaaagggtagaaaggccaccccacacatgcccatccctgtcatagctgggcctgctctgagctccctaaaccctcactgtgccctgtgcccatagtaggccactccaccatcactcttcttggttctcaagttccaggagctttgcaaacaacagatgcttccctagtataaaggaaagaacaagtctttgggccatgggtcctcctcttctcagtgtccctggataaagtcatctaatcaccctgagccttgctttcctcagtgaaagaatggggctgatctcaaccttgcctgccatcgaggctcagatgacctccaaatgcatcctaaactgctcacattcttttgcaaggagggtttttcttcctcaaagcaaatgggagggccaagtaagagaatttatacaagggctttgaaaagagctctgcatgctccttttggaaactgaggcaagtgagcgctaagtaactttctggaggcctcatcgtacaccagctgggattcagcctcaagttgtgcatgttggcctccaaaagccctgacttctcgctagaaggagccttctcaaatgaatcctatgacgacctaatgcaggctcataggtctcactccagaatactgaatcagagcatctgagatcagggcctggaaacctacaggttaacaggttccttgggtgcttcttactgcagtagctcaagctgtcccatggtgatgggctggagctgccacatacaggccaattgttctactcagttattctcatctctgccatttccataatgacttagcatctatacccatctctaaaatgttaaggcactttgccaaacattattttgtttaattgacagacagaaccatatagtggttaagaacctagtttctggagctaagctccttggtacccagttgcagctggggtgcctcccagcttcgtggtttgtgcctccatttccttctctgtaccatgggaatgcgctttgcatcctacctcataagagttgttagcagtgaagacttcagtgcactaaagtacatagaatagtgcctgttgtggagtaggtgcttaataaatcttcatttattattcctaatgaggaaatggaggatagatttgtgtaggatacagtaaaaagtggactgaccacagccaacacccaggttttctggttctacttctacacttccatgaacttaatctttgtttgcctttcaaagtcacttagaatttaaagcagtagtaaaaatacctcaaatgcagtcaaccaacaaatatttattaggttttactgatgtgtgcaggatgctgtaggaagatatgaatggatgttattagcacacctaagctgcttagatgggcttgaagggttgagagaacagagaagtagyggaatgaaagcagctttgaatggcaggagcttgtctagggagcagaggcctaggtctagctgagctgctcacctggtccccatcgcccacaaagctttaatcaagatattctgatcaggccaatgcttctgaacaggctaataaggaattaacacataaatgttgcttagcaaacttctccctagcatggaactgaaacagggacagtgctgagagggaggttttgttttgttgttgttgttttgtttttgtttttgagatagggactcaaatggcaaacaggtatttgacaaggtgctcaacatcattgatgatccaaaaaatgcaaatcaaactacagtgagaatcatctcaccccagttaaaatggctgttacctaaaaaacacgcaataacaaatgccggcaaggatgtagagaaaagggaacactcttggtgggagtgtaaattagtacaaccactatggagaacagtttagaagtttctcaaaaaactaaaattagagctaccatacgatccagcaatcccactgatgggtatatacccaaaagaaaggaaatcaggatattgaagagatgcctgcactcccatgtttgttgcagcattattcacaatagccgagatttggaagcaacctaaatgtccatcaacagatgaatggataaagaaaatgtggtacgtgtacacaatggagtactattcagccataaaaaagaatgagattctgtcatttgcaacaatatggatggaactggaggtcattgtgttaagtgaaataagctagtcatagaaagacaaactttgtttattttcacttgttggtgaggactaaaaattaaaacaattgaactcatggacatagagagtagaaggatggttaccagaggctcggaagggtagtggggaggggkaagtgggtatggttaataagtacaaaaatatgattagatatataactagaatgaataagatctaatatttgatagcacaaagggtaactacagtcaataataatttattgtacgttttaaaataactaagagtataattggattgtttgtaacacaaagaaaggacaaatggataaatgcttgaggtgatggataccccatctaccctgatgtgattatttcgcatcgtatgccagtatcaaaatatataatgtacttcatatattatacctacagtgtacccacaaaaattaaaacagtaaaatttttttaaagagagagagagacagggtctcattctgtcacccaggcaggagtgcagtgcatgttcatagtccactgcagcctagagctccagggctcaagagattcaccagcttcagcctcccaagtagctagggctgttggtgtgtgccaccacgtccagttattttaaactttttgtagagatggggtctcactatggttgcgtaggttggtcttgaactcctgatctcaagtgatcctcttgctttggcctcccaaagtgttaaaaatataggtgtgagccactgcacctggtctttagtctggtttttgacaagaaagagccagccagctgtctgcccatgtctttgagctacatgaagattagatcccattagtcttggagagggagcaacaagaaatagaagagggcacagaactgcacgtagcctcacctacttcaaaagtttcccctaaaaccccttaggcattcaggaatgggtgagaaaagggttttctttctatgagagtggggattcctctataaaatttccggctttcaggatagcggactcacattaaagtgttaggggctagcctgaaaacctaaattgttttccttgacaaaatgtgccatagatgcgaatacctgattctggttaaagagttggtttttgctgattatgtagtataaaatggaatctgttttccactttccttctcttctaccatccctttgctttttctatgctctctcctctctcaccatttgttccattcatgctctctctcttctttttcgtctccttctttttccttctcaccccactcctcctttttttcccctctctctccctcttcttttcctctctgtctatctgttcttgttttcttaaccccatattctacaaagcatttagggtggcttgcagaaatggaaactaatatagtaaaatgtaagtaaaacatgtaagatctggctgggtgcggtctcatgccttcaatcccagcactttgggaggctgaagtggatggatcacttgaggctaggagttcgagaccagcctgaccaacatggcaaaaccccatctctactaaaaataccaaaattagccaggcatgatggcacatgcctgtaatccgagctacttgggaggctgaggcatgagaatcgctggaacatgggaggcagaggttgcagtgagccgagatcatgccactgcactgcagcctgggcaatagagccagaccctgacttaaaaaaaaaaagaaaagaaaagaaaaaaaaattgtgagtcagatgctcaatggcatcaaggagataattcatatagaaaacaagtattcaggaatgaatttattgaataaatcatcataattaatgtgtttttcaggatcaagaggagcaaaataatttaggaacaaatagttctgatgagatgctaaaaacttacctaatgtgtatacgacttcatcttttttcttcagtcttgaccactttttggtgcgaacttctccattgactttgagacccttaaccctatatatttttaataatactattggggtagctaaaataaattagtacagtgaagtatatctctagtctcttaaatacatctctaaataatgaatatattcctgaagatttctttgtatttgtaattattgcagatcaaatattttatttccatagaaaactgaccttctaaagatgayacaaggtgtctctctttagtattaaagaatttatgctttaaaactttagatactgggtatggtggctcttgcctataatcccagtattgtgtgaagctgaggtgggaggatcacttgaggctgggagttcgagaccaatttgagtaacaaagcgagactagattgagcaacaaaatgaggccctacaaaagaattaaaaaaaaaaagttaaattaaaatagataaataaacaaaattttagaaactttgggccaggtatggtagctcatgtctgtaatcccagcactttgggaggccaaggcaggaggattgcttgaggctaggagtttgagaccagcctgggcagcataggaagaatctagctctataactttttttttttttttttaaagaaaaatcagctgggtgtggtggagtgcctttaatcccagctactcaggagactgaggtgggaggatcacttgaccccaggagttcgaggtttacaaagcactatgatcgtgccactgccactccagccagggcaacagagccacaccctgtctcttagaaaaaaattttaaaaaggccgggcgtggtggctcacgcctgtaatcccagaactttgggaggccaaagcaggtggatcacctgaggtcaggaggtcaaggccagcctggccaacatggtgaaaccccgtctctactaaaaaatacaaaaattagccaggcatggtggtgcacgcctgcagtcccagctactcgggaggctgaggcaggagaatcacttgaatcaaggaggcagaggttgcagtgagccaagatcacgccattgcactccagcctgggtgacagagcaagactcygtctcaaaaaaacaaaacaaaacaaaaacaaaaacaaaaaactagatattttgcacgttacctttttaaaagcctgacatatctgtatgatatccctgcactaaacatttgctatccataatgaggtaaaatgtgcttgggctttttccccaatgtgaaatatgcttaattgtcttgtaaaactgtcttgagtaatcccagcactttgggaggccgaggtgggccgatcgcgaggtcaggagatggagaccatcctggctaacacagtgaaaccccgtctctactaaaaatacaaaaaaattagccaggcgtggtggcgggcacctgtagtcccagctactcgggaggctgaggcaggagaatggcgtgaacctggggggtggagcttgcaatgagccgagatggcaccactgcactccagcctgggcgacagaacgagactccgtctcaaaaaaaaaaaaaactgtcttgagttttctttctttctttttttttttttttaacagtcttgctttcttgcccaggctggagtgcagtggtgtgatctctgctcactgcaaccttcgcctcctaggtttaagcaattctcctgcctcagccacctaagtagctgggattacaggcatgcaccaccatgcccggctaatttttgtattgttagtgaagatggggtttcaccatgttggccaggctggtcttgaactcctgccctcaaatgatcccccmaccttggcctcccaaagtgctgggattacaaacatgagccactgcacccggcytttgagttttcttttattccggctgcatacctcccagttaatctgacatctttctcacctcattaaactggmtccaactgctaatacgtcatcaaattcaaaagaaatgcgacccgctaccaaaatccagatctgaaaacatttaaccttaggctgtggttcaaggtgcaaagaaagctaatatctaataaagccttggtatagtgtgttccttgagtcaacgtttgagaaactgaatgacatagagctgcgtgaaagtttagggggtaaaagtgtatttgattgaatgtaattaatgtgtttttctgaatgattttcttacagttcacaatgaaccttccaattttacagtaattttcttggccttgattttctgatctgtcttaatttagctgtcaatactatgagtaacaaaattcagtttcattggtgatccttgaaagagaaattccaaaaataaagggctataagcacctcctatgaaaagattcatgcagctgtttcatctaatatggatctgataggtttcctttatgtccagttcttcctttctcaacattttctctgattttcaggcagatgcaaatagaattttcagtgctacggcttctctgacttaaattttctgtttcccttgtgtttgtgccaattaaaacaagactcagtctgtgcttgtgacatatttttggaaattcattgtgtaagaaatattgacattctcttgtattattttctctgagtctttacccacttcatcacaattcttgcctttcttttccttgaagtctgtgtgtttcatatgttttgaaaacttctgtcacatattttagttattataatggataactgcattgaggagaaagctctaaatcataggcttggaatgactagttctagaagcatttcctaaagcacatgcccctcctcaatagacatttctctgccatttattttgtgcagcagttcatatttgtggcctgatgctatctcttttctcagaaatttcagtaagtgtttcaacttgagtaatcatttacagaaacataatgtagtggacattcaataataaactattgccatgacattgaattgtcttatgatctttggtggaagctgtgtgaatatttacattgtcaggatcatgcacctacccgttatgttctgccttcctttctctattcttttcttttcttttttttgagacagagtcttgctctgttgcccaggctggagtacattggcatggtctcagctcactacaacctccacctcctggattcaagtgactcttctgcctcagcctcctgagtagctgggactacaggtgtgcgccaccacacctggcttatttttgtatttttagtagagagggggtttcaccatattggccaggctggtctcgaaatcctgaccttgtgattcgcccacctcagcctcccaaagtgctgggattacaggcatgagccaccatgaccagcctgctttcctttttcataatgtgattttcatgtacacgtctctgtgtttttcagcttcagataaaaacttgctatcttttgggcatttctttgatatatcatctccaaagtgacttattaagtcaaaaatataaattattttatcatttcctggaatgctttttctacaagtaacagaaaattatatctcagttggcttgaacaacaagaaaacaatataattgcccataacaagaattcctgtggtagggctgctatggagttgtttaattttacaacacagtgacatcctcaagggcccagtttgcttccatgtttttgttctgccatctttgggggaacatctctgttgtgaaggatgtcctcatggtcacaaaatggctgccacagcataaacatcaccgtacctcacagatatgacaatgttcagtggaagaagaaaaggaagtttcttcatctgtgtctcttttaacgagcaagaaaatattagagattcctcatcagtctctgtttcattgttcattcaacatttctttggccagtccctttcctaaaccagtccctggcaagggacataggatttctaccatgaatttagtatgggttctgttctacagagtaagggtgctttctgctacatgtcctttgacatgtggcctaggttattattatctcaagaggcaaaactgctttatagtaccaayctgcagtctaataagtgtgtttgttccctaacaaagctaagtttctatatgtttttgcttattgttataaatttgaagggtccttgtataatgaaaatattattgtaatttatgtttcttcagtgataacaaagtcatatgcagtctttttagaatgagttagtttgttttcatttcctctagtgttttacctacactgaatttgaaaactccattctaaccaattttatatagtcattgtgccagaatatttgccaccactcattattctgtaacatttttgagtcacagaccatatctactaaataagccaacattccaaaagtcttccttataagatgttaacatttaaaagtaggggaaaataaaagaaagaaaaggaaggaagggagggaagaaggaaggcaagaaggaagcaagggagggagggaggaaggaggaaggaaggaaaagaagggaaggaagggaagggaagggaaaggaagggcgggaggaggaagggaggaaggaaggaagaaaggaaaagaaaaagcaagcaaacaaagaagtgaagggatagtaatgtggtttggttgtatccctacccaaatcgtatctttgaattgtagctcccataattcccacttgtttcgggagggacctggtgggagataattgaaccatgggggtggtttcccccactgttctcgtgttagtgaataagtctcacaagatctggtggttttataaggggaaaccccttttgcttggctctcattctctcttgtctgcctccatgtaagatgtgcctttgccttctgccatgattgtggggcctccccagccaagtggaactatgagtccattaaacctcttttcctttataaattacccagtctcagttatatctttatcagcagcatgaaaacagactaatacagatgtgttgagaggtcaaaaattctagatactttgggattgaaagacatattgaatctggagcgaaaaggacaccccatttaacaaactgccaaatgcccctctcccaagggcccctcccttcccacctttatctgaacatcgaagtgtgccatcctgttgtcttgccyaacaatgaatggcaaggcaagcagctgggactatctactcgtagcttgtcacaaatgtgctccaactccagaggatgrtgcagtaatttcctccctttttctttcgggttgtgctttctgctactcaaaagttctgctctcctgtgatcaagatggtaagtcctgtttcatgctgttgcccctttggaattgtgccttcaaattccatttgcctggaacagtcacattcttcagagtgatgggcctcaaccacaaaacagcaacagcaaaaaacatttttctctaatatttgttactccaaataggttatcttcaatacgttattgtggtaagagwttcttctcaggagtgtttgctgctgtcaggggtaacatggtgaaggatagagcaagccctgccatgctccagtctcagctggctgtgtggattccacccaggaaaaccctgccagcttctcctactgtgggtccatcacagtctgtccattcttgtcccatctaagatataagttgtcatagatggctgccccctccaccattcgccacgtgggcatgtaggtcacatctcaatatgtccctaaagatccctctcctaatctaaatgctgaacttccacgtcagttaaggattgtttctctaaacacacaccaaaaggggaaaacatagttacttcctaaattcttatatccagaatggaaataatttcgggartaacaaactccttatgtttaccactgttccactgtttaagtcactgttttcttttttctttctttcttttttttttttttttcttttgtggcagggtctcactctgtcacccaggctggagtgcagtggtatgattttggctcactgcaacctctgcttcctgggttcaagtgattctcgtgcctcagcctcccacgtaactggggttatagagcccagctaatttttccatttttggtagagayggggttccagccatgttggcaaggctggtctcgaacttctgatctccagtgatccgcctgtctcagcctcccaaagcgctgggactacaggcgtgagccaccgtgccttgcctgaacgcattgttttcttaggggttggctagatgtcttcatgaagatgcaacaggctgcacttcagtgtgtcagaacaggtgtggcacagtgagcccacatatttctgtatagtgtcgtcaaagctctttccattagtgaccctatgtaagcgtaccccaagttgatcctagtctaaaaagcagggtctcagggcagagttcagagccagctcctcagattcttagtccttgcttcaagagctacctttaaaatggctcaaaaattcaactctctgtcaaagtaaaagtgaagccatctggctaggttgaacaaaggcagcttcgctttactgcaataggcatcagaccaaagccacagatcatttgggtgtgggaatgtaaagctgaatcagtgacattgccagaaaatggcacatttgccagaatactttgccttttgttccttgtgagataaacatgagcccagaatcctgtaaatctgtggtaatatttttactcttggagaaaaaaattagaagacaacgttgagaggctttttccgcattttccaaatttccttttggtgccgagtaatttgttttcaactagtgtaagagggccatcttgggctagtagggaagtcctctaagttagggctcagggatatgggcttcctagggcaattaccccttacctctgtttctgactgttgggggttcttgaagcagctcacccagggtgagactggtgcagagagcaacatttctgcctccctggttgggaagggagccaggttatttttttaagtgctacctattgacagcattttctctatgtctcagtttttcttcttcctctaagagctttttataatagccttaaccatcatcacatttttttcttttttcttttttttttaagacagagtctccctctgtcactcaggctggagtgtggtggcgtgatcacggctcactgcagcctcaacttcttgggctcaaggcatcctctcacctcagcctcccgagtagctgggactacaggcaagcaccaccacacccagctaatttaaatttttttttttcagagatggggcctccctgtgttgcctaggctggtctagaactcctggactcaagcaatcctcctatcttggcctcccaaggtgtaaggattacaggcgtgagccaccacacttagccaccacacttggccaccacgtctttaagattatgaataaaaaggtgtcactttcgaagattctcaragggagtaactcctccccctaatactgagctgcagtccatcttaagccttgctggtatacatctcaaagaagaagatattgrggatagcttgtgcaacgtagctctggtggccgctaaggaaagagcaaacagctctatggctgcagacatcaggctttaaatgacaccaggatggtgaatgacctaggaacataaacaaagggatgtctcagctgggacataatcgcatcctggaagcttgaaggctgttttgtagaggaagaatagacgtgtgtttgactccagaagaccatgctaggaccagtagttacataaaattaaattctagctcagtgtcgagaagaacattctgacctgaaagttgctaaaaatggaatgggctgtgtattggtttcctaggactgccatagcaaagtaccacatattgggtggcttgaaacaaccttgttttttttctgggttgaaattaatttcttctctcacagttctggagcctagaagtccaaaatcaaggtgttggtagggctatactctctctgaaggtctaggggtgcttccgggcctctctcagcttctgctccccgaagcattgcttggcttgtggtagaataactgtcatctctgcctctgtcttcatgtaaccatcttcttggctgtcagtctctcttcttattaaggactcccagttatattggattaaggcccaccttgatgacctcatcttaacttggctacatctgcaaagatcctatttccacataaggtcatattttgaggtactaggggttaagatttcaaaatatctttttaattttatttactttgtttatttattttgagacagggtctacttctgtcgcccaggctggagtgcagtggtgtgatcatgactcactgcagccttcctgggctcaagtgattctcctatctcagcctcctgagtagttgggactgcaggcatgcaccaacacaaccagctaatttttgtattcaaagtatctttttgaggaacacaattcaatccataacaggctgcctttatgaaagtgagttccttatccctggaagtgtgcaaatgtaatcagagtttttcaaaatacttgaagaggtgtaagcgctaaagagagaatgcaactagatgacttctagcatctcttctgaccatagcatttcctaatgctatgagtcctgtagtaaatgactctactaaatcctgggaccacacttgggaagaccacacagtcttggtgaaatgtcacatgcacggaagcatagtctagcttccaaaaaccattgaaaggagtttcaatcttttcttttaaattcatatatatgwatatatatatatatakakagagagagagagagagagagagcagagagagtttatttgggccaagcctggggactgcaacccaggagcatagattcaagttgccctaaatatacactccctccttttaattcttaaagaacatcaatgaagatccctttttctgtcccctgcagctgctcctcttggagtctctctgttcagtactcttttggtcacacatgacagaatcctaattcaaagtgccttaaaaaaaaaaaaaaaaagataatatcttcttgcaaatttgaaaagtccaggagttgttgttttggsttggactccatttcccagctttgccttcctctctgtgggctttctcttctgcatagtgtttccactaagaggtggccaccagggttcccaggtgttatttagcaattgagcaatttagcaaactcattgagaagagtttccttcttccagcattctaagggaagtcccagggctggctctcattgggccaactctgtcacgtgcatttatcacatgcccatccctaaacttgtcagtaggacactgaccacctcctgaggaagaaaacttaggaatggaggcacctctatgtgagttgcataaactaggaatagaagagggtagcagcccaaagggaaattggagtgctattaacataataagggggagtccgtgttgggagggccaaaggccaaaaccatcactgtctactctgattcctcccctcacaccactattctctcttccttcctctcctcattctccctccccttcctctctccctttcttctctccctctgtttttctctctctcctttcctctctctctccctcttctttttcactctctttctctctgtctccctttcttctcctcctctctcttttactctctccccctctttttctcccctcacatctctcttcatctctccctgtctctcaccctcttcctcctctccctcaagtctaggcagctcagcctctctcttttttctccyttctttttcctcctgcctctccagcttatctcttcctacttattttcccaattcagtattataaatacctagctactgggctggcaaatactgaactctcccttaagggtaaggacgggaaagaaatggagcctgccagtgccaggttcctttagcagctaaggggagggaggacgggaggaactcccattggtaacttttattcacatcgtatatcaaatcatcagagtgatcctgtgtcattttgagttgtgagtgctttaaaaatttgcatgtgtgtccaggacagagatagatgaatttgcacatgacggcggaggaagactttgggatgtatccactttgatgctaagttatggatacatcccaaaagactagacaaacagtatctgtgttttagcttccagacttctgtagtgggtccagccaaactcccgaatgggtttttaaacttgagaaacctcaggcttttttgtttccaatcatacaagcactcttgaattgaaagcaacactgggtcataaagcaatatgaaaactacataactaatatcttgatccttctgctttcagcacatttagccccacagcagtttagactcaaaccctctaaacaaaccaaccccctcaccccactcacaaacagcctgccaagagcattgagcgtccagtccctggactccatcctgaccacctcctactcccccgtcctgcatcactggtcttgctttggtcatctctgtgttctccattgctctgtctcccctccgccaccctacacccacaggcttggtgagttgtcccccaacactcatatttagactctcccttcctcaagcccccttgctctctgactctgctgggaggctctgatcctgagccctgccatggacctggttctgggagttgacctttgccccacacccatcagctgcgagtcaggggctctcttgttctatgccttgacctggtggtacccaagtgcattcatttgctagaattcatttgccataacaaaataccacagcatgtctacaagccaccagggctgccatgtataacactgggtggatgattaccctaaaacccttctggaactttccagataattcttttaaaaatattctcttttataggcttctacgtgattcaagtgagtttcctaaatggctgggtgagctcccataggtgacctgacactgccacagccctctcccacccagggactggagaggaagctctggcaggacacccagaactcagggtggaaatggaacatcctggccacctacccaggagaggcctcatgtagtaagaaaagggagaggaaggagcagtgctagaaatcagattatmcagacagaaaaccacctcccagactgcctgatggcagsgggtgggtctttccatcttaatctttccagcccaagcaccatgcctgcaacacaacagaaatgcaaggaatgcagttgaggtggtgcattagtctatcctcacgctgctaaaaaagacatacccaagactgggtaatttataaacaaaagagatttaattggctcacagttccacatggctagggaggcctcacaatcatgacagaaggtgaaggaggagcaaagtcacatcttacatggcggcaggcaaagagagcatgtgcaggggaactcctctttataaaaccatcagatctcacaagacttattcactgtcatgcaaacagcatgaggaagacccgtcttcatgactcagttacctcccaccaggtccctcccatggcgtgggcattatgggagctacaatttgagatttgggtggggacactgccaaaccatatcaggtggggagtgatgtgagcacagctacatttctgaaaaataatgatggtcatggaatggaagacagatctgagctgaggaccttggaggcctgaactggtgcacttgccatgaggatggagargaaggatgaggcaggaaagatactgcaggtcccagcttctccatgaatccaagggctttgctctccactctgccttcagcctagtgacacaatttatacagcaagagaaggaatgtcacagaccaccagatgggtagctgacccttccaagagcacaaagactctaaatatgtccctgtcaccacctgctgttttaacaactagttgtttaatacatctcctctggatggaaactagatccaagacagtgactctgggttttgtttaattttatgtcacatttttagggagcaaatgttaaatatgtttccagcctagtaaaataagggtggcaaacttaatcattagagtatgtggagaatataacaggatcttttattggacctggaaaggggccccactgaatggtaatatttgtgaaataattggagaggaaaccaagttttaagctattagttctctaacctttgagtagggaaaaggaacagtcccttgaacttgctgcaagtctcatggttgcttaaaaaggctttaatttctgaggactggcacaggccagccaaaacaaaccatttccaaaattagtttgggcctcaagggtcctgtaaaactcattttaaacaatgtaccatgatccttttttgctctcattttgtgcaattggagtctgcttccttcttcatatacagaaggatgtttaaaacgcacctttgagggtagggtgttgaaacacccagttttctgacccactctcagatgctatgacagagaaaagctcttttctccttcaagagaggtccaagcttctgagtgtactgtggtagctggaaagctattgcagcttcatgcccagatatgcatctgtgtgtgcacatgcacatgggtgtgtgcatgggctgtgcacatgtatgtgtgtgggttggcatgcgtacacacaagcctgcacataaatgtctaagagtgcatgtgtgtgtgcatgtgtgtacataagaacatatgggccaggtgtggtagttcacgcctgtaatcccagcactttgggaggctgaagcaggtggaccacttgaatccaggagttcaagaycagcctggcgaacgtggtgagaccccatctctactaaaaatacaaaatttaactgggcgtggtggcatgtacttatagtcccagctacccaggaggctgaggtgaaaggatcacttgagcccaggaggttgaggctgcaagtgagtcatgatcacgccactgcatgccagcctgggtgacagagcaagagcctctcttgaaaaaataaataaatatataataaagtaataaaaagtaaataaataaatattgattccatcacttgttagctcagtcattttaacttttgcaagcctgttttctcatctgcagagcggggataatattgtgtctacctcatcatgttgtatgaggattaagtaaggtaatacacataaaggctatatatagtacatcctctggatagtctcgctgtcattactgctactattgcagccccgctggcaaacagagcaagggggttgagaagacatggggccacactggcaagacattgagggttttatatacacatatatatatttgagatcctttaacatccactcagaggcactcagagaggactcccctactcaaggagaaatagttggggttgcaggagaggtttccaataacctatggtgagttcgagaaaaataacttatccaaaagatggaccttcctgtttctcaatgagctctcctaagagagagcagaagagggagagggaattgccctctatttggaggccrcagggcctggtcctcatagctatcctaaggaagagaaagctcaggaccaaggaagagccaccacctggagtggggagggtgggacggggttgcatcctgccctcctccttcaaacccggggcagagcttcccatccagaggaagcaggccccatcagcttatcctggggtggggcttcctaaagccaagtgtttaaaggcagatcattgttctgaagttccgctaagttctaatgcccaccctgctgagaaatcctccaagaacaaagtgagattttaaaaatccacaggkttacttggagccaaaggcaattaagaggaagagaaataactggccaagtctcaatgtgatggctgtctgtgcagagactctagtgaggaagagagctaaccccattctttttgttgtgatcaagcaagatgattccccagtgggccaatcttttgcctataaaatggggttgatatgattttgtccaggaagaagtctggtttaggaaaagcagaggcattcttgtctccttcagtcccagcttagtggctactgactgtgagactttgacaacttattttccaactcagagccttgtatctctccttgaaacccaaaaggccgggctccagacttcctcaaagttcctttgctgtgtctatgacagtgggctgatgaaggtagaagcaggggtgtgatgaggacgagaataatcaggatggataggaaggctggaaggctgagaagggtataccaaagtcccagcaaacaaaagcgaacactcaatagccgtggagggcgcctcaccatgtcctctccataagccaggctacataggtcatcatctgggatcttatttttctgaattgtttgtggctcagctcttcttaatatrgtactttctgaccagggcgggggggtggggagcctgtagtctcagctactcaggagactaaggtgggaggattgcttgagctcaggcattcaaggctgcagtaagctatgattgcaccgctgccgtccagcctgggtgacagcgagaccctgtcgcaaaaaaaaaaaaaaaaaaagggggatagtccattctagctgcccaatgtgcatgaccttgtgaggtagtaagaaccatgaccaggaaaaggccatgtcatccatcaggtgacttygtagaggaggcttctgccctgatgggagagtagcttaggcagcctcgaggccccttccacttcaatttgggaaatatttaatgagctcccactgtgtgccagcccagactgtgctgactgaggcctggggtgggacagcagggaggacagtccctatcttcaaagtgctcagggtctggctgggcacggtggctcacgcctgtaatctcagcattttgggaggctgaggtgggtgcatcacctgagatcaggagtttgagaccagcctggccaacaaggcgaaatcccgtctctactaaaaatacaaaaattggctgggcttggtggcgtgcacttgtaatcccagctacatgggaggctgggtcagcaggatcacttcaaccttggaggtggagattacagtgagccaagatcacaccaagatcacaccactgcaccactccagcctgggtgacagagcaagactgcctcaaaataaataaataaataaataaaataaaaacaaataaaaataaaaaaaatgtgctcagggtctcaccacccagacatggtctagtctagtccacccatgtggttcctgcctctccagtttagggggatggactgaggcctgggaccatctgttcccagtgccctctgccttctctcttgtagcattcttcttttctccttcggcactctctgaagctcctgtcgcccaaaacttcctgcccagaactaacacttctcatttaacaaacacttggatgagactaactgtgtataagcccagttcctgcccacaggtgctttgcgtggagaacggcccgctgaagcagcatcgaccaggaagcaccatgagacacatgtcagggctctccctgcctaggccctaatttgtgtcccactaaatggggccatgatcagaactgtgagttcccagcagagggtggaggtggagatgccacactggggctgagctaagacaccaccaaggaggagctggcagcagaaggctgagtcccaggatcccctgtgtacttagcttacacaaatttgagtgtagattcttccttttctttccttttttttttttttaaagactgaaatttttgtatttattgaatggaccattccatttttctctattttttttctttttttaattatactttaagttttagggtacatgtgcacaacatgcaggtttgttacatatatatacatgtgccatgttggtgtgctgcacacattaactcgtcatttaacatcagggatatctcctaatgctatccctccccsctcccccgaccacacaacaggcccccggtgtgtgatgttccccttcctgtgtccatgtgttttcabtgttcaattcccatctacaagtgagaacatgtggtgttgggttttttgtccttgccatagtttgctgagaatgatggtttccagcttcatccatgtccataaaaaggacatcaactcatcattttttatggctgtatagtattccatggtgtatgtgtgccacattttcttaatccagtctatcattgttcgacatttgggttggttccaagtctttgctattgtgaatactgccgcaataaacatatgtgtgcatgtgtctttatagcagcatgatttctaatcctttgggtacatacccaataatgggatggctgggtcaaatggtatttctagttctagatctctgaggaatcgccacactgacttccacaatggttgaactagtttacagtcccaccaacagtgtaaaagtattcctatttctctacatcctctccagcacctgttgtttcctgactttttaatgatccccattctaactggtgtgagatggtatctcattgtagttttgatttgcatttctctgataaccagtgatgatgagcattttttcatgtgtcttttggctgcataaatgtctccttttgagaagtgtctgttcatatccttcgcccacttgttgatggggttgtttgtttctttcttgaaaatttgtttgagttcattgtagattctggatattagcccttcatcagatgagtagattgcaaaaattttctcccattctataggctgcctgttcactctgatggtagtttcttttgctgtgcagaagctctttagtttaattagatcccatttgtcaattttggcttctgttgccattgctttttgtgttttagacatgaaatccttacccatgcctatgtcctgaatggtattgcctaggttttcttctagagtttttatggttttaggtctaacatttaagtctttaatccatcttgaataaatttttgtataaggtgtaaggaagggatccagtttcagctttctacatatggctagccagttttcccagcaccatttattaaatagggaattgtttccccatttcttgtttttgtcaggtttgtcaaagatcagttagttgtagaaatgtggcattatttctgagggctctgttctgttccattggtctatatctctgttttggtaccagtaccatgctgttttggttactgtaaccttgtagtatagtttgaagtcaggtagcgtgacgcctccagctttgttcttttggcttaggattgacttggcaatgcaggctcttttttggttccatatgaactttaaagtagttttctccaattccgtgaataaagtcattggtagcttgagggggatggcattgaatctataaattaccttggacagtatggccattttcatgatattgattcttcctacccatgagcatggaatgttcatgcttttgtttgtatcctctttgatttcattgagcagtggtttgtagttctccttgaagaggtccttcatgtcccttgtaaattggattcctaagcattttattctcttcgaagcaattgtgaataggagttcactcatgatttggctctctgtttgtctgttattggtrtataagaatgcttgtgaattttgcacattgattttgtatcctgagactttgctgaaattgcttatcagsttaaggagattttgggctgagatgatggggttttctagatatacaatcatgtcatctgcaaacagggacaatttgacttcctcttttcctaattgaataccctttatttccttctccttcctgattgccctggccagaacttccaacactatgttgaatgggagtgatgagagagggcatccctgtcttgtgccagttttcaaagagaatgcttccagtttttgcccattcagtatgatattggctgtgggtttgtcatagatagctcttattattttgagatacgtcccatcaatacccaatttattgagagtttttagcatgaaggttgttgaattttgtcaaaggccttttctgcatctattgagataatcatgtggtttttgtcattggttctgtttatatgctggattatgtttattgacttgcatatgttgaaccagccttgcatcccagggatgaagcccacttgatcatggtggataagctttttgatatgctgctagattcacatcaaataaaatactgatgtgccagtattctattgaggatttttgcatcgatgttcatcagggatattggtctaaaattctctttttttgttgtgtctctgccaggctttggtatcaggatgatgctggcctcataaaatgagttagggatgattccctttttttctattgattggaatagtttcagaaggaatggtactagctcctctttgtacctctggtagaattcagctgtgaatctatctggtcctggactttttttggttggtgagctattaattattgcctcaatttcagagcctgttattggtctattcagagattcaacttcttcctggtttagtcttgggagggtgtatgtgtcgaggaatttatccatttcttctagattttctagtttatttgtgtagaggtgtttatagtattctctgatggtagtttgtatttctgtaggattggtggtgatatcccctttataattttttattgcgtctatttgattcttctctcttttcttctttattagtcttgctagcggtctatcaattttgttgatcttttcaaaaaaccacctcccggattcattgattttttgaagggttttttgtgtctctatatccttcagttctgctctgatcttagttatttcttgccttcggctagcttttgaaygtgtttgctcttacttctctagttcttttaattgtgatgttagggtgtcaattttagatctttcctgctttctcttgtgggcatttagtgctataaatttccctctacacactgctttgaatgtgtcccagagattctggtatgttgtgtctttgttctcgttggtttcaaagaacatctttatttctgccttcattttgttatgtacccagtagtcattcaggagcaggttgttcagtttccatgttgttatgcggttttgagtgagtttcttcatcctgagttctagtttgattgcactgtggtctgagagagtttgttataatttctattcttttacatttgctgaggagggcttcacttccaactatgtggtcaattttggaataggtgtggtgtggtgctgaaaagaatgtacattctcttgatttagggtggagagttctgtagatgtctattaggtccacttggtgcagagctgagttcaattcctggatatccttgttaactttctgtctcrttgatctgtctaatgttgacagtggggtgttaaatctcccattattattgtgtgggagtctaagtctctttataggtctctaaggacttgctttatgaatctgggtgctcctgtattggatgcatatatatttaggatagttagctcttcttgctgaattgatccctttaccattatataatggccttctttgtctcttttgatctttgttggtttaaagtctgttttatcagagactaggattgcaacccctgcctttttttgttttccatttccttggtagatcttcccccatccctttattttgagcctatgtgtgtctctgcacatgaggtaggtttcctgaatatagcacactgatgggtcttgactctttgtctaatttgccagtctgtgtcttttaattggagcatttagcccatttacatttaaggttaatattgttatgtatgaatttgatyctgtcattatgatgttagctggtgattttgcccgttagttgatgcaatttctttctagcatcgatggtctttacaatttgacatgttttcgcagtggctggtaccagtttttcctttccacgtttagtgcttccttcaggagctcttttagggcaggcctggtggtgacaaaatctctcagcatttgcttgtctgtgaagtattttatttctccttcacttatgaagcttagtttggctggatatgaaattctgggttgaaaattctttcctttaagaatgttgaatattggcccccactctctcctggcttgtagagtttctgctgagagatcaactgttagtctgctgggcttccctttgtgggtaacctgacctttctctctggctgcccttaacattttttccttcatttcaactttggtgaatctgacaattatgtgtcttggagttgctcttctcgaggagtatctttttggcattctctgtatttcctgaacctgaatgttggcctgccttgctagattggggaagttctccaggataatatcctgcagagtgttttcaaacttggttccattctccctgtcactttcaggtacaccaatcagatgtagatttggtcttttcacaagtcccatttttcttggaggctttgtttgttactttttattcttttttctctaaacttctcttgtcacttcatttcattcatttgctcttccatcactgataccctttcttccagttgatcgaattggctactggggcttgtgcattcatcacgtagttctcgtgccgtggttttcagctccatcaggtcctttaaggacttctttgcattggttattctagttagccattcatctaatattttttcaaggtttttaacttctttgccatgggttcgaatttcctcctttagctcggagtagtttgatcgtctgaagccttcttctctcaactcgtcaaagtcattctctgtccagctttgttccattgctggtgagctgcattcctttgggggaggagaggtgctctgatttttagagtttccagttcttctgctctgttttttccccatctttgtggttttatctacctttggtctttgatgatggtgatgtacagatggggttttggtgtggatgtccttgctgtttgttagttttccttctaacagtcaggaccctcagctgcaggtctgttggagtttggtgaaagtccactccagatcctgtttgcctgggtatctgcagcggaggctgcagaacagcagatattggtgaacagcaaatattgctccctgatcattcctctggaagttttgtctcagagcagtacccggctatgtgagatgtcagtctgcccctcctggggggtgcctcccagttaggctactcgggggtcagggacccacttgaggaggcagtctgtccattctcagatctccagctgtgtgctgggagaaccactactctcttcaaagctgtcagacaggggcatttaagtctgcagaggtttctgctgccttttgtttggctgtgccctgcccccagaggtggagtttacagaggcaggcaggcctccttgaggtgcggtgggctccacccagttcaagcttcctggctgctttgtttacctactcaagcttcagcaatggcaggcacccctcccccagcctcgctgccgccttgcagtttgatctcagactgctgtgctagcaatgagcgaggctctgtgggtgtgggaccctctgagccaggcgtgggatacaatctcctggtgtgccgtttgctaagaccattggaaaagtgcagtattarggtgggagtgacccgattttccaggtaccgtctgtcacccctttccttggctaggaaagggaattccctgaccccttgcacttcccaggtgaggcaatgcctcaccctgcttcggctcatgcttggtgtgctgcatccactgtcctgcacccactgtccaacaatccccagtgagattaacccagtacctcagttggaaatgcagaaatcgtttgtcttctgcgtcactcatgctgggagctatagactggagctgttcctattcggccatcttggctccacctcttttctttttttttctttcattctttctctctatrtctcttctctttcctctttctctcttttcctctcgcctgcctgccttccttccttccattttctctctctctcttcctttctttctttcctttccctccctttccttccttcctttctttctttctttctttctttctttctttctttctttctttctttctttcttctctctttctttacaagatcttactctgtcatgcagtgttgcaaacacagctcactgcagcttctacctcctgggctcaagtgatgatccacctgcctcagcctcccaagtagctgggaatacaggcttagacctatgccaccatgctcagctaattttgtttgtttgtttttagagatggggtctcgccatgttgcccaggctggtcttgaattcctgggctcaagtaatcctcccacctcagcctcccaaagtgctgggattacaggcatgagctaccattcctggccctgagtgtgtatttctaactaaattaatgagaacgagagagaaaaaaatataaatttatataacataagtgattctgcctgccattccaatctacatgtgcatcctcttgtgacagactgactctactaagtgcttagctgatggccccctacctattcctgtcgttgctagtcaagatcctgtttcattccttttttcatcctccaggtggccacatcctcagggaaggctgagaccttcctcaacccagggtttattcttggttcattaactccaagccagttttgatgattctattccctttcccttattggtttaggagtaggtttatgctgtatttttgatcagtgagactttgggggttcagctttggtgaggggtagggggtgctttggggaaagcttcttttttcttaaaaagggaggagaggagaatcctcccttttcctgtctctgaacattttaatgacacatggaacttctgtgtccatcttgggacatcagagaaaagccaggagaattgcagagaggtcaaactgaggccatcagggcattgagccactgaattagccacctctggtgccatactaccttgggacttgttatatgagccaatcaatcctctgttgtttaatgccccattaaataatctttctaccacctgcaggtaaaagcattctaaatgatacagtatgaggatgactgttcccacagttggtctcagcatcttgtatctctcaaaatctgagcatcaacaaatcccaagaaattctagagtttcaagatacatatttttgtacaacatgattcttagtacaagccagcaacatcatctggtatttaacatgagaaaaggaggtctgttcctaagctggaacttttgggttttagtgaggtatgacactatattgtacttattgggagatttaaggaattttcaaggggagttttgactatgcaaacttctgccttttctctttagaacctaatccttttctgagatgccactgtagggaactgaaaggaactttccctttcaccctgtgaaggttcactgaaaaatcaactcacgaaaggctaataattggtggaaagacgtataaatttatttaacatgtgcatgggagccttcagaaggaatacccaaagatagaggtgaaattgcccatttttgtacttagtttcaacaaagtttggacagccatgtagatctaaaaaggatataatctaatgttaatagacagtgaggaaacccagcaaggcctgtctgtctagattcttcttcagcatgcatcctctaagcatgcattccttccttctgagtgtgaggcaggaccccttctggaatgggggccttatgactatagtcaaattaggtaggtcagataatttttcatggccagttgttacacagaaaggtggtgggaaagtttgagttatacctgtaggttttgtggctggctctgggggaataaagtgttctggtttctgtgactaccctttggggaacaggggttctagtttctacggctagccctggggaagaatgagaatgagagacaggaggacagaagaatgtcagagaaaaactgttgtttctgaggttttcattttagggtatgttttctgagtcccaacacaactaaaccgtgcaactgggcacagtggaaacagagagtggcccaaaagaagtataaagtatgagccattcaagaccagcctgggcaacatggtgaaacctcatctctacaaaattaataataattattataataataattaaatttatttaataaaaaagaaagtatgggccattataacctggttgaggagaaaaaacttaaatggcaggattgattttgaggctagaacacagcaaatttatccaaaggagtctctatcatgggacttggaggttgatggggaaggcgagtctagaaggactccttcttcccatgaggctgggctaggctatgctggtgtaataaacaatccccaatcctgtggcttcaaacaatagcagtttagttctcactcatattacatggccaaggtgggttgcttgtgtctctgtgctgcattgcccttacactggggcttaggctaacagaattgccactatctaggattgccagttgctgtggtagaggggcagggtcatgtgaccagttctggccaatgggtgtgggcagcagagacatctattacttctgggctggagcatttaactgctgatgtaggacaccttgctgcccacatccaatggccagaactggtcacatgacctcagcaactctaaggaggccaggaagtgaaatcctgttacatgtctgcaaggagaaagaactgggaatatttgcatgagcggcattaatggccaccagtcaccctctttgtccagtgatccatctaaaatctgtgtagacaatgagcgagagcaaatttccactctcttgcacattcgggtccattcagacttgtctttctctcttactctgttttcacgtggtggtgcctggtgattacagggagtgtgggtacagtcagtgtccttccatgcgtgccactctctccctctgaggctttgaccctttaattttacttttacttttattttatttttagtactaaccaaggtcagagctaaggaagtcacccagtgattttttctggaatgccatccattgctgcttcaccaggtctctttagccgcctgacgccttcattgtttastgttacattgtctccctttgttcaaagatgcaaagttggccgggcgyggtggctcacacctgtaatcccagcactttgggaggccgaggcgggtggatcacgaggtcaggagaccgagaccatcctggttaacatggtgaaaccctgtctcaactaaaaatacaaaaaattagctgggcgtggtagcgggcgcctgtagtcccaactaccccagaggctgaggcaggagaatggtgtgaacccgggaggtggagcttgcagtgagctgagatcacgccactgcactccagcctgggcaacaaagtgagactctgtctcaaaaaaaaaaaaaaaaaaagatgcaaagttattttgtctacagggtactctactcaaaccctcatggcttcctgctaccagcccaaatccctctccctgcagatcctcatgtgtgtccctggcttctccagctggggcctgaactcagctcctttgttctggtggcacacctctgtctgccctcacatgcactcttcccaacagaagttagtagcagagagggcagccatgtaagtcaacagagcacgccctgtgaatggagacacagatgttggcgctaaggaattggagcctgggctaatggacttattcctctgactgtgcagctaggtgagagggtgtataaaaagcaatacaaaaaatgttatggtggttgatttcatttatttctgagaggtctttataaaactgtccctgatggatatttataaacataacctcagctacaagtagacaggtctcaatttctcctatcgcagggaaatgcaaacttattctcttctttcctcaaggtttggtcttgtattttaaaaatggaataaagattgtagtaatgttgctagggattataggaataatataaatgtaatttctcttctcaaagacattataagtaagaatttcagcaaagggagaagaggaatgtaagaggaaaatggttgtttgaaagtgcagtatatagaagtataatatctatttctatatatagagatagaatatacaattaatatacatactatatatataatatgtattatacatactatatatgtatagaatagttaatatagcaatatataatataattatataaattctctacatatataaattctatatatagaatatataaattctctatatttctatatgttctatacattctattccatatattctattctatttatatattctataaatatatagaatacttaaatttatagaatacttaaatatattttaaaatactaaagtatatttatagaatgtatatacttttgggctgggtacggtggctcacgcttgtaatcccagcactttgggaggccgaggcaggtggatcacctgaggtcaagagttcgagaccagcctcaacatggagaaatcctgtctctactaaaaatacaaaattagccgggcatggtggtacatgcctgtaatctcagctactcaggaggctgaggcaggagaattgcttgaacctgggaggcggaggttgccatgagccaagatggtgccattgcactccagcctgggcaacaagagcgaaactctgtctcaaaaaaaaaaaaaaaaaaatatatatatatatatatatatacttttgtatataagtatacaaaagtatatttatagaatatataaattatatatttctctatatattccatatatattctctgtctagaatatataaatgtatatatgtggagaatatgtgtaattttttatatgtatggaatatatatattaatttatatatggagataatatatataggatttatgtatatttctattatatatatatatacttttttccccaagttcttaggtcagattctttatataggttcttcccctacaaccagaggaaactgtgtttttataactaataatagaaatacatcagcctagaatatgtgtcttttacaattgaacatctaagctttgcaaatgttggtgctatagttataaaccatggatgttagtcgaggggaaactcttctccggaactcaaacatgaaagctgatgttaaaagtcattgctaaaattctagagctgaggggattacaaatcagcattctaagctatcctcctacccactggtccaatgcattacatgttggcagaatggaaatcattttggaaaagggaagtggcattttcagatgtataaacatcttcctataaagaagtgtctgtcattttctatctccaagttctcaagaagacagggtctcctgccccttggtatccaaataaaattggcctgtagtctactgtgcgcagtgtgtgggttaagtgctttctccaagattcttagcattgtgtcctccttcgactccacattctccgggagctcccatgggcacacagctgctctcttgtttccatccccaagtccaagtgggatgtcattcagcttccaacagacaactctagcacaagatactggtgtagaacagatctccaccataggtacgagagtgagggaagaattacatcatgacacagcataataaatactttaaaatgaatttgtaaacattgctgttctgaaaagccctttttaggctgggcacggtggcttatgcctgtaatcccaacactttgggagactgaggtggttggatcacttgaggtcaggagttagaccggtctgaccaacgtggcaaaaccctgtttctactaaaattacaaaaagtatccgggcatggtggcgggtgcctgtaatcccagctacttgggaggctgagacatgagaattgcttgtgcctgagaggcggaggtttcagtgagccgagatagtgccactgcactccagcctgagtgacagagcgagactctgtctcaaaaaaaagaaaaagaaaaagaaaaagaaaagtatttttttattaccccctggtaatttcttactgccaatttttgccctaatttctttcaatttctttccctcttctgactgcacctcttccttcttatcttccttctgtgatgtgggacccacattttcacacccaaatggtccatagagttgctttgttctccaaaatacagttttctccttggaaggaattttacctctagcttttaaaataacatttctgttcttacaaacttatcatcaggattaatcacatttttaaattaaaatgttattactaaaacacttaaaactaaaatagcatttttaaactaaaatgctatgtctgttttctctcactcttgttatgaaatgtttcctaatgtgaagtgttttcttgatggaagactaaaatattgagacaacatatatatttatgtctcacatctccttcttatggccatatagcctttaataaaggtagtgttgcttacaaaaggaatgattgtataatagcagagaaaaaattctttccaaagtgaaataatagagatgatagagatgaaaaccaacacttgtgaatgaaacttttatatgcagaattatattagcatagttaaaggtaaaaatacttgatccataatgattttcatttataattttggttatagattgtatctattaactattgttacaataatgctgcttgacaaaccatcccaaaactcattggctttcgttgtcatgcatatgcagttggctggggcttggctgatctagacctggcttggcttccaggtgcagattggatccagatctgctccccaggactctcatccacttgcaggctgactggggcttgtccttctcatgctgtagcagagtgcaagcctcacctcttaagcccatttcaaacctttgcttgcattatgccctctaacatccctttggccaaagcaaacatcagtgagacagggaagatcatttctcccacagcaggagaggaggagaatgaatatttgctgaacagtaattcagactcttacataagtgaagtatcatctgattgtccatcatgcccaacatctgtgtctctctgccagccaaatccaacaggtatcaaaagtggcttaaagcaggaggggttattagtcrgttaaaagcaaagcatgtcaaggaaataatctattcatgtaggagcaaagatttttcttctataaacttgcatttaagataaagctgacaatctccttgcagcaattccttgagaagaaagtgtagaacaaggcacaacactcctctgacccaattcctgcaacctagtcagagaggacaactatttgcaccatgaattgaattatagccaaacaggtcttgagtaattcattgtgcatatatcctatgaaatgaagctcycaaggacccagaatgtaaactttaaaaagtaaccagtgttaatacattaaaatttcattaatttcgtattaatttacttaaagcatcatgtaatttcaagtaattattagtcattcatcaccttttgttcagttgattcttactagaaatgctggagtatggcaatcttacacatctctgggttcttgatttagcacagaggctggtagagtacatctcatgggacaaactagctgtttttgtaaataaagttttattggaacatactcatgcccatttgtttctatgttgtctgtagctgctttcactctacaagggcagattgagaagttgcaacagaaatgctatgaactcaaagcctaaaatatttactatgtgacgagcagaagaaagatggccaatcctgatttaacataatgctagacagttgaaattttggaatttgggttattcacacagttctgggatgaatattgttcttgagctatccttagataactatctaaatacttagagaaaagtatttttttaggaaaatcaataatgtaaacaaatattacacagataattttaacctccttaagaaaataatctttttaatacattaggttatgagcacttatttctaaacagttattataccaatcataaaatttgtatttgcttgttaaaggagactctgaaaaactctatcaaatattgctttattaacctttaaggagatgattattcttgcaataaacctacggtttttaaaaatatacacttgccagttgggcacagtggctcactcctgtaatcccagcactttgggaggctgaagtgggcacatcacgtgaggtcaggagttcgagaccagcctggacaacatggtgaaaccctgtctctactaaaaatacaaaaattagctgggtgtggtggcacatacctgtaatctgagctacttgggaggctgaggccagagaatcacttgaacctgggaggtggaggttgcactgagccaagattgcaccactgcattccagcctgggcgacagagcgagactctgtcctctgtctcaaaaaaaaaaaaaaaaaaaaaaagtatatatrtatatatatatatatatatatatatatatatatatatacacacacacacatatatcttgccatttcttcaaacttttcaccaatgtagatcattttaactctattcacgtacataactgcatctgaattagtacaattttactatattgtgtttaaagatatttcaaaacaccacactggcccctgatcttttctttgatattagaaaaaacaaaatcttgtgtcttgccggatgtccactcttggagacaatcgggtagctttagaagaaagaaacattagcatttctaaagacttggagagagaacatgggcagattttaaaagtgacgacacattcttagttatttccagtagatatattgagaacacagaaaaatctggagtcatatctattgggtattgaattagatgtgtgtatttctgtgttctgggattcactttaaagccccaaatgagtctcaatatgaggcctgaactggagaagaagaagagttcgtggagaagaacagaagggtggcttacacctgtaatcccaacactgggaggccaaggtgggtggatcaccggaggtcaggagttcgagaccagcctgggcaacatggtgaaatccccatctctactaaaaatacaaaaattagtcaggtgtggtggcgggtgcctgtaatcccataatcccagttacttgggaggctgaggcaggagaattgctgaggcaggaggcggaggttgcagtgagccgagatcatgccattgcaccccagcctaggcaacaagagtgcaacttggtctcaataaataaataaataaacaaacaaataaataaaaatgaaaagaagaagacgaagagttcatcccagcctcttctccaccctgggctaggaatagctctctataagatataggatttagacaatggatcctaaattggagattaggtaaaaacaaaagaagtgctccaggactacacttctgaaaggaagttttcctagcccagtaactgcaagataggtatagagctataggtcatcatcagctccctttacaagtcacatgggattgtaatctgagcaataacaactgtgtatccatgtcagctgaatgacttggctcaaatggcacttcttttttttctttcaggagtcgggtgggagaatgtgctgctaaaggaaggtgagtcagcctcgaacgccacagaaacatccggcccagacatgactatcaaggtaagggattctcttcaggttgattctcaaagtgtatctctagagtaaaggcagccgatggcaggtttttctgggggcaaaatgaacactaccaatccaccttgctrgagttctctctctactcmctgaggtcttagggagrcaaccgtacataagattttctgaaatttgggatctggtctacagccgtaccaccctgaatatgcccgacctcrtctgaaacttgggatctggattaggaaactgcttgaaaaccagaatctaagatgtgatttccaatgggcctgtcgtagggtcttcagtgaatatctacacgtaagctatttgtaaatggtaaccccagtgggcacagtggagcaaatctgaaaattctgatctgagaattcaggccccactgtgcattgtgaggaaaggtcagagaggcataaagtagctttgatcttggctcaagatttccactgatgtcagcaggaaggcagcacatggcccactccagctgaaacactaatggccaaaggtttacaaaatgagtcatctagaaatccacttaactatcactgttcaaattaaatgcatcaatttgtaagcactggccagaataaagaatctgtagcaaaagttatcagaggtgccaccatttcccctctgttacgggattaaacacaaaggaatgatcttcctctcttagaactctgctaacatattagttaacaaaggatgggggtgggagggctttctaacattcttgcttgaatgattataatttgaatatatgctacttatgaatttttctttgaaaaataagaagtaatgtcttattttatatagagctgtaactggagatatttctttttttttgagacggagtctctctcttttgcccaggccggagtgcagtggtgcgatctcggctcactgcaagctccgcctcccgggttcatgccattctcctgcctcagcctcctgagtagctgggactacaggcgccagccaccgtgcctggctaattttttgtatttttagtagagacggggtttcaccgtgttagccaggatggtctcgatctcctgacctcgagatccgcctgccttggcctcccaaagtgctgggattacaggcatgagccaaactggagatatttctctcctggatctattagtagaagttgtacaaaagaatatacagcatggatttattcaagttttcttttgtaatgtgaaggctaaacttgtgttgtctatgttacaaatggtagagaaagcaagcaaatgttaccatagtaaagctaaatgaaagataggatagtagcctgattagtcaaaaagtcaactaatctaagtggtaactatccagtgctgaaagaactatcactacgtttagcagaatttgtaagacaataatataaattgcaatgacatgttggtgttttattggctattattgcaatgattgacaagtttcagtctatgaccacattggacgaaggggaatgggtgccaatagtaaaacctgttggatttagatttgttatctcaaaatctgttatcatctggagaattagtttttgagaagagttgctagtgggagagaagacagcatgttgccagtgtagctgcagatgtggtacagacagacattcaagtagtcagaaagactggagtttgcttttataaagcaaacggcatattctttttttttttttttttaagacggagtcttgctgtgtcgccaggctggagtgcagtagcgcagacttggctcactgcaacatccgcctcctgggttcaagcaattatcctgcctcagcctcccgagtagctgggactacaggtgctggacacaatgcccggctagtttttgtattttcagtagagacggggtttcaccatgttggccaggttggtctccatctcttgacctcatggtccgcctgcctcagcctcccaaagtgctgggattacaggcgtgagtcaccgctccaggccacaaatggcatattctaatagaagcaagtcttgtccaaatcccatttgataagattgctacttaaccaggctactcatccatggtaccaggatcttgactgaagttgtatttgggtccctctagtttagacatcattctcgatctccgtttctttttcttttaatgaatacctgaaaatttctcacaagaaaagatttcttttacccctgccctaccccaggaagatttttcatccataagaactgaactcattctgaggaataaataccatacactttaaatagttgagcaaaatagaaatttatttctttattcattttgaggcagagtcttgctctgtcacccaggctggagtgcagtgtggcatgatcgtggctcactgcaacctccacctcccaggttgaagggattctcccacctcagcctcccaagtagctggaattataggcatgtgccaccatgcctggctaattttcgtatttttagtaaagatggggtttcaccatgttggccagtctggtctgaaactcctggcctcaggtgatctgcccgcctcagcctcccaaagtgctgggattacaggtgtaagcctctccacccagccagcaaaatagaaatatatttaaacacatcaataaacccctacaaatattctagagttcttctcttaatgccagttccttctcactaaggaatttgtgaattttctaggtggatataactacagaaaatgcttgtttctatcttctcctttaggattcccaattacggagcagtcattgacttttttcctttgggtataagttgtttcccaccccacattgccttacataaccatgatgtctttgtatctaaatgaaagtattattttttctgctccacttcgttaatcagagaaatgcaaattaaaaccgcgatgagataccatctcacgactgggcatggtggctcacacctgtaatcctagcactttgggaggccaaggtgggtggatcacaaggtcaggagatcgagaccatcctggccaacatgtgaaatgccgactctactaaaaatacaaaaattagccgggtgtgatggcgcgtgcctgtaatccaaagctactagggaggctgaggcaggagaatcacttgaaccagggaggcagagattgccgtgagccgagtctgcgccactgcactccagcctggcaaaacagcaagactctgtctcaaaaaaaaaaaaaaaaaaaaaagagagataccatctcacaccagtcagaatggccattattaaaaaggcaaaataacagatgttggtgaggatgcagagaaaagggaacagttatacactgttggtagcaatgtaaattagttcaacccctatggaaaacagtaaggagatttctcaaagaacaaaactactgtttgacccagcaatggatatctacccaaaggaaaataaatcgtcttatcaaaaagacactcacactcatgttttctgtagcactattcacagtaggaaaatcatgaaattaacstaagtgttcatcagcggtagactggataaagaaaatgtggcatatatacaccatggaatactacatagtcatataaataatgaaatcatgtcctttgtagcaacatggatgcagaaggaggccattatcctgcaagaattaatgcagaaacagaaaatcaaatactgcatgttctcccttataggtgggaacyactacacatgggcataaagatggaaacagtagagactggggactctaaaagaaggggcaatagagaaaggagaaagggttgtaaaactacctattggatactatgttcactgtttgggtgatgggttcagtagaagtccaaatcccagcattacgtaatataccttgtatcaagcctgttcatgaaccccctgaatctataataaaaaaattaaaattaaataaaaagaattattttttttctctctgtatataactgcctggagctcattaagcacagactccccctcttacatttagctatagctattcctacttctaatagctactttatatatccttgcaatatcagctattcctgccttttgcctgagaaaacaaaatattctgttaataaaacctgatacactgacacttttcaagggaaatatcagcagaaattacaaagatagttgggtttcttccatattgctcttcttgtgataaaggtgtctattttagtatttataaattttctttctgaaaaaggaatacaatgttttgaaggtgcttgctttctctttgccttccatttcccttgccatgattgtaagtttcccgaggcctcccagtcatgcttcctgttaagcttgtggaactgtgagtcaattaaacctctcttctggctgagcatggtggctaatgcctgtaatcctagcactgtgggaggccgaggtgggtggatcacctgaggtcaggagttcaagaccagcctggccaacatgatgaaaccccatctctactaaaaatataaaaattacccgggcgtggtgatgcatgcctgtaatcccagttacttgggaggctgaggaaagagaattgcttaaacccaggaggtggaggttgcagtaagctgagatcacgccactgcactccagcctgcatgaccagagtgagactccatctcaaaacaaaaaacaaaaaaaccctctcttcttcataaattacccagtctcaggtaactctttacagcagtgtgaaaatggactaatamacctgtgaatgtgacttatttggaaaaaaagtctttgcagatacaattaacaatcttggctgggcacgttggctcatgcctgtaatccaagcactgggaggctgaggtgggtagatcacttgaggcctggagttcaagaccaacctggccaacatggtgaaaccctgtctctactaaaaatacaaaaaaattaggcatggtggcacacgcctgtaatcccagctactccggaggctgaagcacgagaatcatttgaattcaggaggcagatgttgcagtgagctgagatcacaccactgcactccagcctgggtgacagagtgagactctgtctcagaaaataatactaataatcttgagatgagagcatcctggatttaccagatgggccctaaatccaatgacacatgtccttataagagacaaaagaggatactcatatacacagaaggccatgtaaggggactgaggcagaggttgaagttatgcagcccaagtcaagaaacacgtggatccaccagtagctagaagaggcaaggaaggagtcttctctagagcctttggagggagaggagtgcagccctcctgacaccttgaattggaacttttggcctccagaattgtgagaaaataaatttccgttgttttaagccaccaagtgtgtggtagtttgttatggcaaccctgggaaatgaatgcactcagattctgccaagaatcacacctatgcttcttgagtgcaaatgccatagaggctgataaaccaatattacraagatccacataattttcttattttactctacttacccttataaattgttttttacctgttcttgttttgggagaaccactaacttttttcagcctatatttatcatccttcactggaagaaaagggtagctgtatctcagaatagcttctattttatatcctattctgttttgttgcttgtccagacattgaatttaaaaaaaaaaaaaaacaggtatggatcagtatttcttgaaatgcctgaccctgagaatcacctgcagcaatgtagaaaacaacaataacacagcttgccagacatctttcagaattcagattcagaagacctgggcttgagaattagcatttttaataagtgctccaagtaactttcatgattagtttcagaaaatcttgtcttagcacaccactaatgcagtctgggggtggcaatgtgagccctactattgctcttggctctccagttgtccaaccaatctgaggcaggatttggatacttccctattcagtgccctttgattacttcccatttcaacactgaataagcctcaggcttcccctgccttctagactttcttactcttaacttcagtttcatttttagcattgtctttcactgtgtctctctctgtacccattcttgccctctttatccggtctacttgtagcctggatactgtagctttctttttaaaaagctgagttgagctttgcacggtggtgggaagattgcttgagcccaggatttcaaccctagcctgggcaacatactgagactccatctctaaaaaaataaatgaaaagatcaagctgataatatccctctgctaaggccctgctggccttcccatggctcctggaacaaagaccaactcttgcaggcactgtgttttttaaaagcccctggctttcattcacttctcccttgatcttcctgctctccctctctctttatattcacatctttggctcaaatattccctcctccagtggcacattcttttctttttttttctttwtttttattttattttattttattattattatactttaagttttagggtacatgtgcacaatgtgcaggtttgttacttatgtatacatgtgccatgtttgtgtgctgcacacattaacttgtcatttagcattaggtgtatctcctaatgctatccctcccctctccccccaccccacaacagtccccggagtgtgatgttccccttcctgtgtccatgtgttctcattgttcagttcccacctatgagtgagaacatgtggtgtttggttttttgtccttgyaatagtttgctgagaatgatggtttccagtttcatccatgtccctacaaaggacatgaactcttcattttttatggctgcatagtattccatggtgtatatgtgccacattttcttaatccagcctatcgttgttggacatttgggttggttccaagtctttgctattgtgaatagtgccacaataaacatacgtgtgcatgtgtctttatagcagcatgatttataatcctttgggtatatacccagtaatgggatggctgggtcaaatggtatttctagttctagatccctgaggaatygccacactgacttccacaatggttgaactagtttacagtcccaccaacagtgtaaaagtgttcctatttctccacatcctctctagcacctgttttttcctgactttttaatgatccccattctaactggtgtgagatggtatctcattgtggtttcttttttttttttttttttttttttttttttttgagatggagtttcgctcttgtcacccaggctggagtgcaatgacgccatctcagctcaccacaacctctacctcctgggttcaagcaattctcctgctaagcctcctgagtagatgggattaacaggcctgtgccaccacgcccggataattttgtatttttagtagagacggggtttctccatgttggtcaggcttgtcttgaactcaccacctcaaatgatccacccgcctcggcctcacaaagtgctgggattacaggcgtgagccacagcacccagctccagtggcactttctaacaagcattgcttgtttcacattctcataggacctaacagctctccttcatagccactcacatcaataaccatagatgtcgggcaggtgtggtggctcacacctgtaatcccagcactttgggaggccaaggtgggtggatcgcttgagaccaggagttcgagaccagcctgagcaacatgacaaaacccagtctctacgaaatacaaaaaaattagctgagtgtggtagcatgtgcctgtagttctggctacttgggaggcaagagatgggaagatcgcttgagcccagggagattgaggctgcagtgagctgtgataaaacaaaaaataaaataaaaataaaaataaccataattttcattgcataatatccagttgcccttgctacaatatcatttccgtaagggtcatttttctgtttcattttttacttgttagaggctctaaattgtagttctttttttaaataacacaactttattaaggataaaatttgcatgccatayggttcccccaggtaggtatatgattcaataatgtttcataaatttactaaccatcacacaatccagttttagaacacacacagttttaaataatttccatcattccaataagatccctcatgccctcctatagttaatctccattctaccccatccccaaacaaccactcattcctttctgtttctataaatttgcctgttctggacatttcatataaatggagtcatacaacatgcagtgttttgtatctggcttaggatgatgatgattttttttttttgaggtttatccacattgtagcctcaatcactatccctttcactctttttaatgctgaataatatttcatttaattgatatgccaggctgggcatggtggcttacgcctgtgatcccagcactttggaaggccaaagtgggtagatcactagagcccaggagttggagaccagcctggacaacatggtgaaactgtgtatctacaaaaaatacaaaaattagctggatgtggtggcatgcatctgtagtcccagctacatgggaggctgaggtgggaggctcacctgagtctaggaggtagagagtgcagtgagctgtgattgtgtcactgcactctatcctgggtgatgacagagtatgaccctgtcttaaaaaaaaaaaaagatatgccagtgtcttgggttttttgttttttttttttaacagcccagaggtcttttatttatttattttttaaacacctattatgccatgaattcatagggaataggttccagcagttcaggctccttcccattggttctcacaaagtgtgcttctctgggtggagcaggctggcacttcagttgaacccaggtacctttctctttggcttctttctttttctgatcattttccttcacacatttcaggaagctatctcggctcagagtgcttaatgtgctcaatatgcacattaattctcttggcaagaatcttgcccttaacttgtttgtttacaataccaacagcatgctgggtaacattgtagactcttccagttttgccatggtaacacttgtggggcattcctttttgaacagtacccattcccttgatgtctacaatatcacctttcttatagattcgcatatacgtggccaaaggaacaactccatgttttctaaaaggcctagagaacatatgtcgggagcctctcctctttccctttgtgttcgtcattttggcgaattactggaagatggaggttccgcccgaaaggctttttttttttttgttccttcacaagttgatggattttgaggttgtttctaccttctggcagtaagtattcttgctatgaatagttgctgctttggatagtcacatgtaagcctttgtgtggacgtaggtcttcctttgtcttgggattgtacctaggagtagaattgctgggtcatatggtaaatctgggtttaactttttaaaaagctgtcagackcttttccaaagcatctacaccactttacacctcaccaacaatgaatgaggcttccaagttttctacatcctagccaacacttactactgtccatcttttgattataaccatcctagtgggtgtggagtcgtatgtcattgtggttttggtttgcattctcctggtggctaacgacactgagttattttcatgtgcttattggctatttgtatgcagttaatttttaatggcttgatttccttttttgccatagtttgttcaattattaaattgaagcactctctcattgcagctgcccagtcagtgttttctgagtgagggaccctcttcttgactgtggcaggagggtgcactcaactcacacttcccctttaagatcactgccctctccaccactacgtccctctgcaggggttgcatcaatctctcttctttctatttcttttctttctctcactcttttatttatttctttctttcttttagacagggtctcgctatgtcacccaggctggagcacagtgtgatcatggctyactgcagcctcaacctcccaggcccaagcaatcctcctaccttagcctcctgtgtagctgggactataggcgtgcagcaccacacttggctaaatttttattttttgtagagaaggaggactccctatgttgcccaggccaatcttaaactcctgtgctcaagtgatcctcgttcctcagcctcccaaagtgtgagattacaggtgtaagccatcacacccagcgattatctctcttttctattttcccttcacatcttagccttttttctttaatttttttattagcctaatcaatgctattttttattgtggtaaaacagatataacatttaccattttaagcacttttaaagggtacccgtctgtggcgttaggtacattcaaagtgttctgtaaccatcatcgtcatccatccttctccagaactttttcaacatcttcttcaaccaaaactctctacccattaaataccagccccccattctctcctactccagctcctgtcaaccacctaaatgttgcattttacacctaaaatgtattactatttaattgccttctcaaagggatttttaatacattatgttaatagtaaaaagccagtaaggccaggcgtggtggctcactactgtaatcccagcactttgggaggccaaggcaggtggatcacttgaggtcaggaattcaagaccagccttgccaaatggtgaaaccccgtctctactaaaaatacaaaaattagctgggtgtggtggcacacacctgtaatctcagccactctggaggctgaggcacgagaatcgcttgaacccaggaggtagaggttgcagtgagccgagatcgcgccactgcactccagcctgggtaatagagcgagatgcagtctcaaaaacaaaaacaaaaacagaaaagccagtaagatggctacccctcagaaataaagtaggaagctgctacaagctagatttttaaagatattgctggttacaaaagttcctttcttctgtggcgtgaactgtccaggaccctcatactggaaatgtcttggccttatccagctggtgccttgctgcaagtcccaaatcacacctgcttggctgtgcatcattttcttgaattttgtttatccaacgactggataaaatgacatcaagtaatccatgttaaagaagtatctctaggataaaaattttgtgatttggctgtcatttccatcaaatacaccaactaaatcgtagatgctctctttatcttgccctcttgtccatatatactaagactaaaaactaagtgtttgcaaaaaagaatacaaaaaattttagcacagcagaattttcctcagaatgaagtctggtattcttatttacatgttcaatatttctcatttatgcttgaacaagaaacaaggttggtagcccttaggcaaactagagattctggctgtaaaaccgtttgaaaagggtacatttctattcaaggacatgggaaagccacatttaaaaaaggatgttgcttctctacacgtaaaacttgttggaagacagattatcctcctagaagagcagatgttctctattacaaaagaggaaaagcatttagaytcttccggtggtgaatagaggccacaggttacagctttctttggcctttgcttttaaaaaaacattctgctgaaggccttttgttgccagtggtgtccagccggttgccctttgtatttgatgatgacgacattgaaaggattgttttgtgcagggactctggacaaaaaagagacatttgggacagaaaacctttctacattgtgtatatacataaagatcgctctaaatttggttccttgccaaaggaaatattttcgaagattttttaaaaatccttgaaactattcagggtagtggatctcagagggggtttggcattggtgagtaggaggcatatcggtactatatgggtcagtttttataatacatgtctttgagaatcattgtcttgaattttctttaaaatgaatatgaagagctctgttgtaaactgtaataaactatattattaatggttatttattgttcctgtgtgctactccctatttgtcaaataaaataaatgtgaaagaaatgaagtcacaaccattgacagctttcaataatctatgtgtagataaggaatattcgtggcaagtgaataatctcaggtaccttcttctttgccgttttatttcttcgctgtgttctcttgccaacaataatagctaacatgggttgaacgtttgctttgagctgagtactgtgctacacatacaccatctcgtgtaatcctccagatgactctgctaaggagaaactgttattaatcccattctacagatgtggtggctgtggcacagtaaagtaacttacccaagatctcaaagtgagtgtgtggtggagccaagctttgaacccagatggaaggacactttgtagcctctctgtttgggttttaataagtgcaggtttatttttttttaattagctaaagcaggggagctccaatgacagggcaagggtagcttagccagataaaatattagatgtccagttcgatttgaattaaattgcatgggacatacttatattaaaaaattatttgttgtttacctaaaattcagattttactgggtgttctgtatttttatttgccaagtccagtggccctaggcaagaggagtgttgcaaaggaaatgaagggaaccgcgtaatgtgttttrattattgtcctttgggattatttgtggttttgggttctttttgaaaaaaaaaaaaaaagacttttttcattttaaacatgacaatgtattttattaagctttaaaccagacagatgtatattttaaggacttgtaatatgctgataacctatcaagggacatcccttgatatgcttctttgctaggaatccaaatctgatccatgccaagatttgtacctcattggtttctctatgaagtgaaactatgagaaacactaccctctatttgtttgtttgattgttttttcttttgaacaacagcaacaacaaaaaccctttacctcaatctgggtatatcatgactttttggaagccttattctaggatcttctttttagttgggatatcagtgttagcctaatttcattttctgcagatagcttcatcatcccaatttttaaaatgttgatgaaatactcttgtgcttttatcaactcctacttggtaaaatcccctatctctgagtggtcaccctaaaatacatgacatgggcatggatattcccagcaaaagttctgacacattcacaaatgcttcctgaggacatctgtctgtttccttctatgcacattttgaacattccagcagtgagaatgactaatgatgctaaagctctagaaactgtcacgtgttgctgttcagtatgtcagagcctgtctgcagataagcctcatttcttaagaataatctgtcccaatcaagctagttttgcaacaaggctcatttgcaagtaccaaagtctatgacttgtgaaagaaccaagccacgcaaaccaaacacagaacccagtgacagaaactattggtctttagtgcgactggaaggtagccaacctggttcccatttaggcagggaaccagtttgtctctccagttaatgtctgaataaattaccattcatgtccctgagggtttggaatgattgcaaattatttctgaaatcctgggtagaactcatgtggccacttacgataagccttgtccttctgcaactggtcaggtatcagagaggtctcataaatcaagattgtagttatcaggaaaagttgttggattcatagagtaggggccaagggaaaactttccctttgccctctgaaatttcgttgaaaaatcaattgacactagacagattaacgggagaaatggcatagaagtttactaatgtgcaaagagagaaaattacacacaatggggtacagatggttatatacccttcttcttagaggaaacggagataggaagtgtggagataggaagtggggggaagggcagtaaatgatttttacttgaagaaccaacagtgacctgggacaaagtctgttgggcccacagaacagacaacaatttgtgacagaagtctgttcagatgtgttgacagacttcattcagtctttcttcctgctatatgagttgctaatggcaactcaaggaagagaccagaagtaattgttttcttctctggagggtaagattttaggtagataagggaacttcacagaaccatttcatcctgtgcgtaggggagagacagaagattgagagacaggagtgaggggaggtcagagagaccttgagccttcttcaggttcagaatatcaaagcatcatatttggggatataggtttctgagccctaacaatgggaagaatgatctttctgtatcatatgaatactgaagattgttgaagtgagcatctagtgctcctatctcgataaattatccaatgcctttcccatctctttctcctacccattctctagtggcctgcccccttgccctttttattgtagtgaaaacttagtagtaaaaaatacacttggtaaaaatcatgacatcatgtaaattgtatgtaaaaagatgacatgctcatacaagatgcttgattcattgcctagcagagcaggccactggtaggtctgcataccacgagctggtctgtttcgaggtcacttatgcttactatcattgcaacaactacttcttcctcagaaattagtcagtggagatgtgacatttattttatctcagaatttttatgtctgtttctgaaaagaaaaaggtaccagcagctgcagttcccactccgtctcccaaagggatctgggctagagggtagggtattggatttgtcatcatattttccatctgctcacagattgtgaggtttattattgtttctgttattgttttttgagacagggtctcaccttgttgcccaggctggagtgcagtggcrccatcttggctcactgcaacctccacctcccaggttcaagtatttcttgtgccttagcctctagcctccctggtagctgggattacaggtgtgcgccaccaggcctggctaatttttgtatttttagtagagacagggtttcaccatgttggccaggctggtctcgaactcctgacctcaactgatccgcccacctcagcttcccaatgtgctgggattacaggtgtgagccactgcaccccaccagagtgtgagttttgatctccaacagtatgcattttctagtgaaattcggtttaataaaatgaataatgagataatagctaacatatattgagaacttcccatgtgtcaggtagtgctctgggtgtttagggtattctattatttaattcttaccacaaccctatgaggtgggtactaggatatctccagtttacagagaaaacaaggtgcagagagattaagtaacttgtctaaggtcacacagacaaggagtgctggagcctaggtctaagccagacagcactagatcttcatgactttgtcacagtgcttcaccttggagaataatgagatgatgctggtatgtagacatgctaaggaggtcttccttgcctcacagtcctgatcaatatggaggcttttatgtagttctgtttgcgttcattcttccaatgcaaagctggagtttacctagtgggataagatttgattttcatccttgagaatgagttgttcttcaggctggcccatgagtcttcatcctgtcagcattctgattacatttctcattatcattctcctgcagtgattcatgagtatgataaaaccgaacagccttctcagtaaataagcaaagcttagcttacggggaaaaaaaaaaaaaaaaaaaagtagagctttccttgaatctggagaaattaagcacacaggtgtcctgcaatattagttaagagactactgcacccatcatactgtagcttaagacagtttcttcttttagttttttctaaaatgtctccatgtctgtgttatgccacaaataacacagccttggttaacttttggactaaaaaaaatcaacttattggccaagcatggtggcttacacctatgattgtagcactttgggaggctgaggcaggaggattgcttgaactcaggagtttgagaccagcctgggcaacttggccagacatcatctctacttaaagaaaaaaamccgccgggtgcggtggcttacgcctgtaatcccagcactttgggaggctgaggcgggcagatcacgaggtcaggagtttgagactatcctggccaatatggtgaaaccccatctctactaaaaatacaaaaattagctgggcatggtggcgcgtgcctgtagtcccagccactcgggaggctgaggcagaagaatcgcttgaccccaggaggaggcggctgcagtgagctgagattgtgccactgcactccagcctgggtgacagagtgagattctgtctcaaaataaataaataaataaataaataaataaataaataaataaataaataaaataaaaaataaaaaaacaaaaaaaataaaaaaataaaaaaacaaacaaactagccaggtgtggtgtgcgcatgtcgtctcagctactcaggagacaggtgggagaatcacttgagcctgggaggatgaggctgcagtaagccacaatcctaccactgcactgtagcctgggtgacagaaggagaccctatttctattataaataaataaatttattgaatgtcgtattatatgtagcataccatatttaagcagggtcaaatttttggtctgacttttcaaattaatgtgaataagtcactttgaaattttggagacaaaaccttatttaagttgagaaatagacaaacattcatccactaagaattattctttttattatttttagtgtgtttgagttggttcttgcaaagaaaatataaacaaatcccaaatatgaaaaagtttctaagtttatattaagtgtatcccatgagtgacacaggaaaatcccttttaagagaaatggtattgcaaaagacacagcaaatctttttctcttttaaataaaaatatgcattctgtgtctaagcattttccaaacctttctcctttgtgtggcttttactaaaccttcaatcctataacagtcattgacttcttcctactttcttttcctctctttccttctctcccttcactccctttctttttcccagtgtttactgtgggctaggcactgtgttaaacactttacctgcatttctctctttaacactcaaaatgacaccatgagataggtaccattttttgtcccattgtgcagatgaagaaatcaacactttgagaaggtaaagactttataaggtcacaaattctggaagagcagagtcagaattcaattccaggtttgtcatatttcagagcccacagtttattgctttctgtgtaatgagtaaatatttcttttagaatmaaaaaatattttaattaaaatgtaatgacaggaaaatagttttgatcctgggagcaagaattagtcaagaatggacctgatctaagaccactgtagttttttggacaggctatgagccagtggactggcacagatgratacaaataacacatagctaatactaattgagaatctaaaaggtgtattctgtggcctttataagcatgaacttatccaatgagttccatgaactcatgatatagatactatacacttgttcttattttaaagactaggaatctgaggcacagggagataaagtaacctatggaaggtcctgctcagaatcagtggaagaatgaggattctgccttcattcctagcattcttcatgtggttagcatagtcccctaaccacagtgccagggcacctcttgcctgtgatccctaagtgctcttctgcaggtttctttctttcctttttttctattgtttttttgagatggagtttcactcctgttgcccaggctggagtgcaacggcgtgatcttggctcaccacaacctctgcctcctgggctcaagcaattctcctgcctcagtctcctaagtagctgggatttacaggcatgtgccaccacgcccggctaattttgtatttttagtagagacagggtttctccatgttgttcaggctggcctcaaactcccgacctcaggtgacctgctcgcctcggcctcccaaagttctgggattacaggcgtgaaccaccacacccagcctcttttgcatgtttcttggggaatgcagagccagttaactttacaactagccattcacttggaattcacatccacagcatagaaaagaccatagcgtatgctttccctatggagagaatccaataactatcaagccatatattcccctttttttttttttttttttttttgagacacagtttcgttgcccaggctggagtgcagtggtgcaatctcagctcactgcaacctctgcttcccaggctcaagcgattctcctgcctcagcctcctgaatagctgggattacaggtgcccaccaccatgcctggctaatttttgtatttttagtagagacggggtttcaccatgttggccagtctggtctcaaactcctgacctcgtgaactgccctcctccgcctcccaaagtgctgggattacaggtgtgagccaccacgcccggctgccatatattstttgtataagtgacaggtctgaaaatagctgtgtttatgattacggagttaaagggaaaagaatgccatagctaatgggagagaaaaatgaaaggtcaattgaattcgcccatggtaaatgttagaaatttaagggtcaatgtgatcctttcatatgaaatactaagttcttggaatcaacttacgggaaaatctagtatgtttagtgttttacaagtgcttttttttctgcctaaaatttaagaaatactttacccaatgtactaaatatatatgtgtgcatgtgtgtgtgtgtgtatatatataaaawatatatataatataatatataattatattayatacacacatataatatataatatacatattgtacatatgtataatacatattacatacatatgtattatatgtataatacatattatatatattatatgtataatacatattatatacatatattatatgtataatacatatacgtatataatatgtataatacatattatatacgtatattatgcgtataatacagatatatgtatatatwkgatatgttgtgtgttatatataacatatatakgatatgttgtgtgttatatataacatatataggatatgttgtgtgttatatataacatatataggatatgttgtgttatatataacatatataggatatgttgtgtgttatatataacatatataggatatgttgtgtgttatatataacatatataggatatgttgtgtgttatatataacatatataggatatgttgtgtgttatatataacatatataggatatgttgtrtgttatatrtaacatatatatgatatgttgtgtgttatatrtaacatatatakgatatgttgtgtgttatatataatatatatgatatgttgtgtgttatatataacatatatgatatgttgtgtgttatatataacatatatatgatatatatattgttttggtgagttggtacttttttttgttattgttgagatggagtcttgctctgtcgcccaggctcaagtgcagtggcgtgatctcagctcactgcaagctccacctcccgggttcatgccattctcctgcctgagcctcccgagagtacaggcacccaccaccacgcccggctagtttttttggtatttttagtagatactgggtttcaccgtgttagctaggatggtctcaatctcctgacctcgtgatccacccgccttggcctcccaaagtgctgggattacaggcgtgagccactgcaccaggccctgtgctttgtttttttaaaagaaacttcctagaaaccctgatcaagtgggagtttttttgaacccgttaataagaacactttattgtaatgaaaataagaagtatttgggcatgcatctgataattatgtgttgaatgccttctgagggcaatgctttgtgccatgtgtcatgtgcctggtgcagcttccacttccaattatgtctggaatctgatttcaccattgatgtcaccactccaccattaccattctgctttcagccattatcatctcttgcccagattattacaatagcttctaagtgctctcccggccactcctttccctttctgtaacacagactccacccagaaacagccacagtgatgttataaaaatctaaaccaaatcaagtcatttttctgcttgaaataatgcagtggcttctcatcttattcaggaaaataggtaatccaaagtgcttatcaaggtttgcaaggaccttaggwtctggctcactgccagtcttctctcacccctcctttctcagctctgaagtcctcctggctgctccaaacatgattgctcagtgtccccacacctgctgttccctatgctcgaatgcttttccccttgatgtctccctggctcacttccttccattctccaggtctctgctcaaatatcacctcagtaaagagtctgttcttgaccattacataaaatagtactcacctcctactgccatcaatatctatccctttaccctgttttatttttctttataacaattaccgcctcctgacacaaaatacatttcatgtatctgcatgagtgaattcaattggccttttattttctttcctgttatctatgacattcttctcttgcttattgtttttcttacctcattgtccatgccatattaggttgtaagctacatgaacatggggactttcctttttttttttccaacaaatattttttgttgtttgtttttttgaaacagagtttcactcttgttgcccaggctggagtgcaatggcacgatctcagctcaccgcaaccacaacctctgcctcctgggttcaagcaattctcctgcctcagcctcccgagtagctgggattacagacatgcgccaccacgcccagctaattttgtatttttagtagggacggggttactccacgttggttaggctggtctcgaactcccgacctcaggtaatccacccaccttggcctaccaaagtgctgggattacaggcgtgagccaccgcacccggcttcaacaacaaatatttaatgagcacctactctatgccaagctctaggcatctagaaattaacaaaagagaccaggtcttgtacttatgtagattacacttcagtagggtgagatagacaagaaacaagcaagtaaatactatcatatgaaagatggtgattaatgctctggagaaaaatcagaatgctgtagaatatgggatgatttggttagggctaaaaggatgacctgtctttaacaaggtaggcaagactataggaggagcaggttttgagaggaaattaagaatttgcaatatacttgttaatttaaaaatgccttctaggcatcccgtggagaggttaagtatgagtctggagttccatggagaaaataagctgacatataaatttgggattcacctgtgcacagccattgactggatgagatcacagagagaatggcctgagggatagaagggatcaagcccaagtcattgctcatcccaaattaaagatttgtaaaatgagaacgaaccttaaaagaggactaagaaagaatggtcagtgagactgggcacagtcgctcatgcctataatcctagcactttggaaggccctcaaggtggcaggatcgcttgagcccaggtgtttgagactggcctgggcagcatagcaagacctccctctctacaaagaacaaaaaaattagccaggtgaggcagcacacacctgtcatccaaggctgaggtgggaggattgcttgagcccggcaggtcaaggctgcagtaagctgtcattataccattgcactccagcctgggtgacagagtgaccctgtctcaaaaacaaacaaacaaacaaacaaacaaaaaacaaaaaggtcagagagcactgaggagaatcaagaaacagttgtgaaagccaaatgaagaaagcagtttaaatgtgactgactgactgatggcctgtgttaaatcctggtgaaagatcaggtcgggtgagtttggagaaatgaccactgggtttggcaacctcaaggtcactgatgactttgacaagtgctgtcttggtgaaaaaaacatctcttttaagaacttttgctttgaggggaaacagggaattgaggtggtaggatcaagagaatttctcttaaaaaaattattgtaggctgggcatggcggctcatacctgtaatcctaggactttgggaggctgaggtgggcagatcacctgaggtcaggagttcgagactggcctgtccaacatggtgaaaccccgtctctactaaaaatacaaaaaaattacctgggcctggtggagggcgcttgtaatcccagctacttgggaggctgaggcaggagaattgcttgaacgtgggaggcagaggttgcagtgagccgcgatygtgccactgaactccagcctggcaacaagagcaaaactcggtctcaaaaaaaaaaaaaaaaaaaaaaaaattattgtcctagaaaacactaataacgttggcctggtgtggtaaaccagcaatttgagaagccaaggcggggaattgcttgagcccaggagttcaagaccagcctgtgcaacatggggaaagcttgtctctacaaaagatacaaaaattagccaggcatgctggcacatgcctatagacccagctacgcaggaggctgaggtgggaggatcactcgagcccaggaagttgaggctgcagtgagccatgatcatgctactgcactccagccatagtgacagagtgagaccctctctcaataaataaataattttaaaaagaaaattcataatatacaatctaycctcttaaagtgttcatttagtacagtattattaactgtgagcacaagaaaaattttttttgatagaagaaatcacagcatatttgataaagtgaaagaaaattcatgttttgggaaggataaaattgctggaacaatgtcctagaggagataagaagggagggatggcgaggctgagcgattttcctaaggtcacayagccagtaagtgacaggtcaggattccaatccaggtcttctggctctctgttttttactgacattttgctataccgtaaaatgagaaaaatggcttgggcaacatgtaactttcytcctagttctaactttcatgtctctaacattttgatatgccttcacccatcccaagcatgtaaagaaaattccgaagtcaaacatagtagcagcagcagcagcagcacctatctgaacccacagttctcgtctaggtgctcacctatctcatctcaaccactctatgaattgcttagcagtcagcacttggactcatcaaygcctgagccctctgtgggaatcacaaactgtttctgatacctggcagctttactmatttatgttatctgtctggcttcctaaggtatttgagtttgcaatgcttgctcctaaaattaactaggcagtggtctaacaagaaaaggaaggaagggagggagggaaggaaggaatgaaggaaggagagaaggaaggaagacaggagaatacaaagaaaggaagtacaaatgaaggaaggaaggagaggagaagagaggagagggagagggagctataaagaaggtatttacttaatgagttggaaaatcttcaaaaacaatatgggtataggtactttagttgattgtattataagctattgtggtttctaaagtgattttatgttggccatggtcccaatccaacagaggcttttaatatgctatagaagctattattattctccgtatttaaatgatcttaacaccttataatcgtaatagttacttagagaagtaattaatttattctgtgtatataaacataatatgccttcataatattgtcccatcatcttcagtgaagtttacgttaatgctaggaaagccatttaatatgttcagtatactagaaggaaaaagcccatttctcagtggatagttctcaatactaaaacatttgacaagcaaatcaagactacygcaaagactatctctgagagaatcagaattcttaaaacttaaaatctcaagatttggtctttttccccctaatatgactggaaaatcttatggttcttcccttaaattaacagcctgtgcttaaaagttctgagggaaacacttgcaaattactaggaaaatgttacagtcgtattttttttaacaaaaactaagaaataatttcctgttttatccaaaattgaaaagaagttaagcaccactggaaaagaaaaatacatttgcatctaaaacacaggtccctaatgagaagaaattcgcttggttgactcagtaagagctgtcttctgggactccacactattggcactgttttccagcattctatctgtgaacaagctgtgtacattccaagtatattaggcatattttatgttttcagtgccatgcttaaagagtaccttgttgtatgctgtctctctattacagcatgaactctggagtgtttactagattttttaaatgcttcagttgctaaatgagataaaagtctcagccaagaaccaaagaacttggacctcataggactttgctcctgtttattatcaaagtgatacatggctacattcwtgtcattattccacaagatttgaggcctctggaatcaaggtgccatcttgctttcttcaccaggggactctgtcctctgggctctttctcatttcccaactctgtgtttctcctacatagatacccacttttcactctttccaacacaggtcttcccatgctgcttttttgttgttgaagattttagtttkgaatagtggttttttttttattagtatactggtgccatttacatgtatattacaatgggcaatttgggtggtacaatgttatgtcaatgtcgagaaggcacagcccagctacagtctggaacacagtgtaaacaattccatggggaaatgttgcttgggttttggaatgtttcttatgggtgttttaaaatgtcttttaaagaggctcaagcagctgcggtgaatataatcaggtcaccatttccttatgtttaagggtttggcggaggagaggccaagtgcgaggatgcagggaaaggaaataaatgtggaacaggcaggaaagaaacttacttgggcacaggaagccagagaccctggagaggaaataaaggaaaagcaggaaccacaaactaggctaagaaccacagtaaacacagtctgagagccaagtgttctcttatgacaccatccctgttkctgtgtttggttctctgtcctttcttcaagtaagggcgactgtgtccacctccggtggttcccaaatcaggctgtcacagaatcagatggaaagcttaagcaaacacagattcctgtgctctggatcacctagagaaaggaacctggaaattttcttttcttgttttccagctactcccaatgtaagccaacttggaaacaactaatttataacatcttaaaagctgaccaccttatcttagggagaggtcaaccccttggagaagagatggtttagaagggtgtttttaattgtataaaacacaactataagtcaatgcaaacaagaccatagactaacatatgccagtcttggatgtgcattcygaaagttgatggttaaaatagtctatgggggccggatgcggtggctcaggcctgtaatctcagcactttgggaggccgaagcttgcagatcacctgaggttgggagtttgagaccagcctgatcaacatggagaaacycggtctctactaagaatgcaaaattagctgggcatggtggtgtgtgcctataatcccagctacttgggaggctgagggaggagaattgcttgaatccaggaggtggaggttttggtgagccgagattgtgccattgcactccagcctgggcagtaartctatggatggatcatgcctgctacagaaaagccaatgatgcttaatccagagatgacctttttgccattaagtaagaaccagagatcagtgagaaaygtcttactttggaaatccgtaaacatacaaatcatccatatggatggtgtaaaaccactagttgagctagagtaagcaaatgatctttgtggattctaggaattaattgactaaatatcccatgtcctcctgcttacactcctaccaacatagtattggaggttgtctgatgctcaccccactatttttatggatttttatcttgaggcacaatgggttggggttagttctcctagactcttgttgttctgatttcctatttcttctgaattatttttttaaaattcttttttaatttttgtgggtacatagtaggtggcatgtaatgtataaataattacatcagagtaaattgggcatccatcacctccccagtatttttcttttgtgttacaaacaacccaattatagatttagttatttttaaatgtacaattaaattatttttgactgtggtcaccctgttgtcctagcaaatactaggtcttattcattctttctattttttggtatccattaatcatccctactcctctgcctccctgctacctttcccagcctctgataaccacccttctaccctctatcttcgtgagttcatcctctgaattcttacttgttacatccattttgcctcctatgcctggtcttcaccccacaccaactcacacataaaccccttccttccctttggtgtcccagttttcaaatgctgttatcagaagtatagggggttacaagaagtgtttacatcacaacataacactcaaacaactttaaaagtgtatattaaatattttcttttggccctctctgtgatctggaatttcttgtttactgactcctccccaccactctggtctttcatccaatttgagagattttgtaaacttctgaattccaaaaatgaattgcaggtgcaagtgtataaacattttctatctctagagttatcaccaaattatctttcagatttaccaatttattatcaatctgtatgcccatcaataaagtataatcacttgattttcatcattcccttgccaaaaatacatatttgtattttatatatttactcatattgtaggcaaaaaaaaattagtccaatattttacttgcacttttttaattatgaagagtttgagtatctcttcacaagttcaagggtcatttttacttatttatctgtaaactacgttttttttggtkttttttttttttttttttttttggagacagtctctcactctgtcaccctgctggagtgcagtggcacgatcatggctaactgtagccttgacctcctgggtccaagcaatcctcccatctcagcctcccaagcagctgggatcacaagcatgtcaccacaccccgctcattttttaattttttgtagagatggggtctcaccatgttgcccaggctggtctcaaatttctgggctcaagtcatcctcccaccttggcttcccaaagtgttgggattacaggtgtgagccaccacatccagcccaggtttgttttttctattaaggagttggtagttttcttcaattttcttattgatttgcaaaaactcttcacatatgaggagtagtaactcattgtcatatatgttgcaaatatttcccccagtttgtttcttctctgaaattttcagtggtgcatctgatcccatgaggatccccctgggcttgggattactgctagcttttcagtgaggtcacccactgtttggtgggaaagccccagggacatagagctatttgtttagtgtgagcgagtctttttgtttctgttgttgtttgcttttcctgctttttctttttctttctttctttttttttttttttttttttttttgagatgaagtctccctctgtcgcccaggctgaagtgtagtggcctgatctcagctcactacaacttctgcctccagggttcaagtgattctcctgcctcagcctcccaagtagctgggattacaggcacctgtcaccacacccagctaatttttgtatttttagtagagacggggttgcaccatgttggccaggctggtctcaaactactgacctcaggtgatccacccgcttcggcctcccaaagtgttgggattacaggcgtgccaccacacccggccttccctctttttcttacttttttttttttttaaattttcagccaacttttattttctgtaggacatatttagcacttgtgaattactcccagctgatactttttggtctttcgccttgctaggaggaggaaatagtaaattcccttttatgatgcactgtcttgcccccaccttctggttttcagatcagttctctgagacacttctaagtctatttttcagcttctactgttctctaagtttgggggcatgtgtctactgctagaccattattatttgctggatttagttcattttgctcagtttggggagagagggagaagagcttctctcaacctgtatctaggctaacttcctccccagaaagctgttctttactttgtgtgtttttctagaaagaacattctacttcttgggtcccctgggggccactcttgctcaggggtgtagtttaaagtgggccagcagcatgggagaggcaaagtgagtaaaaatgtacacttaggccacagtgaaagaaatcttcatctcctctccccctaaaaaaatttccatggaagattttgtgcccttgatggtatagggcctgtgggaacatgtaacatttacacgttcgagttatatttctctcacataattaatagccatttattttattcaaatatgctcctaaaatacatctaggagagtaaatatgcttcttttattataaaatattctcagctctaataatcattattatgttaacacacgtatgatgtgatgaaccacaagcaggcagtgggtgataaagctaaccttgcccattgccagtgtttcccaaactttcatgtttttaagaatcatctgggagctgttaacgcagtttccttggccctgccccacacattctgattcaataaaggtggagcccaggaatctgcctttcttttttctttctctttttttttgatgcagtctctctctgtcgcccaggctggagtgcagtggtgcaatctcggctcactgcaatctctgccgcccgtgttcaagcgattctcctgcctcagcctcctgagtagctgggattacaggcttctgccaccacgtctggctaatttttgtaggtttttagttgagatggggtttcaccatcttggccaggctggtcttgaactcctgacctcgtgatccacccacctcggactcccaaagtgctgggattacaggcatgagctaccacaccctgccggaatctgcctttttaacaagcactatctgtggtctttagtactggcttcgaaaaattctggggcaagatatctcaacctcagcattactgacatttagggctcaataattctttgttggtggggcgctgtcctgtagatgccagtagcaacccccctaatcgtgacaataagaaatgtctctagacattgccaaaatgtcccctggggagttcaatcaccctcaattgggaaccactggcctaggagaaaataaatgagaaaatgttaattaaaaacagtgtttacttttgcatgcagccattcatactcttgcatggatttcattgaacaaattaaacaactatttctgagcatctggtatgtaccaagccttttatattaaaaatgtttaatcatggctacctctttaataatttggaaggtggaagaaaatgttcttataaattaatatctattaagcatatatttttcctaaattaatattcctaatagttttctgaagaatattctagaactttaaaattaatattaacaaagcattgacgttgttttagtaaagaagcaattcagaataaagttggtatgattgctttactttttttttttttttttttgagacggagtttcgctcttgttgcccaggctggagtgcaatggcacgatctcggctcactgcaacctctgcctcccacgttcaaacaattctcctgtctcaccctcctgagtagctgggattgaaggcatgcgccaccacgcttggctaattttgtatttttagtagagacgaggtttctctatgttggtcaggctggtctcaaactcccgacctcagatgatccgcccacctcggcctcccaaagtgctgggattacaggcgtgagccacttcacccggccttgctttactgtttctaataatgaaactaattttgtttgtaaattttacacttattctaatttaggaaaatatgagaagggagtgatgaagtacctgccatgatattgtttataacatctcacatctgatgtaattctaaaattcttccttagagagtctatggtccatataaataaataagtgatatccaagcacactcattttaatgtgagtttttcacatgatattaaaatgttaaaaatagatcagtatgtagggcatccaagcatttaattccttaaatcggagacatgaggagaaaaaaatgaaaaggaagaaagaaaagaaggaaaaggaaggaaggaagaaaaagttgagtcaaggctgaagctctggcatctctaaccactggtcagtaaattctattgaaattcaatagtataagagacaaacaggcaaaaaggatsgtgaaaccatttccaaataccaagataaaggaggctattgacattcaggaaccctgagaacagctgatgtcccattgtagacttcatcctcttccttgggtgaaagtgtgaatagcgctcaaggcagggaagaagtcttttctctgaaggtgctatttatggtgcccttggcctggatgggctttctgggtagttcccaagggtatcatttctttgtattggaaatcagggacctttgtgggttaggaaagtagaatcaggccatggctattgtctttccctgctgtgtttcacatgtaaaattgactcccagaagagcatcccagggccttgtcaaggagtggggaaaatagcagactgccctagggtggaaacctaactgagagtgcaagggcgacttgcaaagctggggagagagaattactgggaaaatcgtgcctagggcaaagctgaattcaagaaatctgacttttgtgatcttcctctgctgagaatgaatgcggccacctacagcagagtaagaccacagcttgcttttgaaagtgttgctctctaggtggggtgtttgtttgtgtgtgcctgtcctctctcaggatttctagacggttcattttcaaagggtcattaacattatttaaatattcatggtggaggaggggatgagagactgaaatttcagacatctcaagagtgagggatggctggccacccgcctaatacagccccagtctgcggatcagctgcctccttcccctccgctggctttgttagcacacgcgctctgacaccgggccaccggctgccactacacggagggcagcaggaaggctctggckagccagtgagctggaagcatctctgtccacacctcagcctctgaaccccatcgggggagtcctcaaacacgcggagacaccattactgccacaaagacgcacttcgcaaccagttccgggagtcgctctgaccctgaggacagtcgtggtgctaggtaagggacgaggggctgtttccccgcctgagtgggaactcagcggctcctggcatttgagcgcacacaggcactcacacacttccacatacgctcatgcgcacatatgtgtacaccaacacacacgtccacatgcacacacagcgacacgccaccccgctccaaagccccgtgcgctaacaagtatccatatacccagacacagcgctcccctgagttaggaaacactcagctttgcccgccccatccatccctccgtctttccctctctccagtctctgcattcattcatttcttcgtttgtgcatcgattccgccgaagccactgagaggagaaggtgtgggtagatggggaggggaggggagggaggggcggtccgtgggcgctgggctactggaggggaagcgaggaggcggggaaggggcgggccccaggagcaggcgggcggggctccccgccctccagcgcgcccggaggctaccactccctgcagatgcgctggccccagcccggggctgccgctcgccttcccccggagtctcctggacccccggagtctcctggacccccggagcgggaggcagcggccgcgcggcgctggactggagcagaaccccaggactgcgcccccgggagcgggcgcccagaggtgggtgtccaagctggggaggggaggggctggagtgtcctcgagtgtgaggaaggggtggccgaggaaggggtkgccgaggaagggctggaaatctgggagtcctcggaagcaccgcgggcttttaaagggctttttgtggtccttgtcgagcggagcgtgtgctgggagagggcccgggtggaggggctgtggccatgtggatttgaattcctaggtttgtgggagggccaagcctttggctgctttgttcaatgcttatcatttatatatgctttaaaaactaaacgcaggactccgcttctccctgtatacacacagagctgggctgtgtgtccttttcaggaaaagcagtgaaatcaaatgtggtcgtggccgcatctcctgccccgggagcaccgggaggtgcagccgttccttctagctcgcgaggaaggcgcgggtcctgccttttgggtggcagagccgggggcattttcgcaagtcctgaacttttcagagagactgaagtcagggagggccgggccccggccccggtcccggccccagccagagtctttcgggatagggtccagggagctgaactcaggagatgatgcaggaggagccagcagcctcttctgccctgggagggagaacgcggtccgggtccgagctgagccagaagtttggcctgaggctgggacctcagcagttagaatgtggtatcttatccgagataaagccggagtttgcgtctctgtgggcccttcttggggacactctggggtatgggaagagcagaccgtgggggagagcactgggcaagccgtacctgtaatgtccgtggaggcgacgcgcctgcaagaaccagagcaaggagacactggtggccccaagaaatcccagagaaacggagtggataggaggggagtaaaacggagcccgggagagccggaagcccgcagcagggagctgtggcgctggtggccgggtgaggactgaaggcaaagggcgaggcggcgtgcagccgggctgccgagctctccaacgcggatgccaggcgctcgccagcctgagggatccctcctgacccacaaagagggcgtctgggaggtgactcgtttagagagatggtggattccctttccagacccaggaaagcccgtttcccgtgtggggtagcatgggtttggctctgataggctgcgtggtcagatcagactttgacatatcactacccttccccgtagcagttttaaatgcagcacaggtgatttgggaagacttcctaaatgtataatatttctttttgaaaagaaacttcacctactcatacgtctatacacctctctctgtattgcatcttggaatctgtgaacaagcccatgtctcccgggaagcgctcttctatcccaactcccgtttcacaggctcctggagactgcatgaatacaaactcctctcaccattgggatcccagggaatttgcttccttgtcttttgttctgattagagttcatttaagcatcacacttttctttctggaaatgttcttaatttaaatttaactaagcttccctttcttccagtctggcagcttccccaacattcatgaatacaattycataataatatgtctagaaatgaggagtatccagcaaggagttttactctgtttctttaaacataaagacttggcctaaagagtgttttaagcaatgctccgctgccggttgtctcctccccagttttgacccttggccctttctctgtttttcttttcttttctttttttttcttttcttttctttcgaagttttgctcttgttgcccaggctggagtgcaatggcatgatcttggctcactacaacctctacctcatgggttcaagcaattctcctgcatcagcctcccgaatacctgggattacaggcrcccaccaccacacccggctaatttttatatttttagtagagatggggttttgccatgttggccaggctggtcttgaactcctgaccttaggtgattcacctgcctcggcctcccaaagtgctgggattacaggcatgagccaccacacccggcctggccctttccttaaagggcatcttctcctttgagtggaggcacaccaagtttcctgcaattatcttggacagcaccaacaaaattagtcctgagccagggacaacaaaagtaaggctgcctgtctcccagtctttacttaaccaactctgctggagagttcatttcrctttctttctgggatgctgagatgctaggatgagaggaatagctgggctttgagatgggacaaacattttgaaatactcattatctcatagttctggcatgacagttggcaccacttcctgcctgcagagtctgaagttatttcactttcataagtggcttattctgactcagtagcctcaggacctctggctaataaagtgaagtaggttgtcttaacttcgttgtcaaatgaagggagaatgaatccactggctttatttctgaaagtttgaatattttcttatagaactaacattaaatattacttccaaaaatgcaaacactttggtctttctagtcattgtaattattgtctagataattacaataatccaaacaataaccattacggatttggtgagctcttaaaatacccatgtcccagatttctgtcacggttattascagtctctgcttattaaggtaatgagaaatgtttcaaatgaagatgaaattgaatttggatggaggttgtgttgagggattttaacagttgaaacaggagcatgctaaaaagttacttctgaagaccaaggatagactgtttagttccagtctttagctttatacatgactcaacgccagtagaattgatgctgtatcttgaatcagcttttggaatgattgttttttgatcttaagaaacatagtactcactgcttagattgttgatcagggattctgtgtcagctattggaagtttgaagtaattgattagtatcttgatgagcttcaacaatttcagtaagtttgggtagcaaattgcacccytttttttttttttgaaatggagtctttctctgttgcttgggctggaatgcagtggcgcgatctcggctcactgcaagctccgcttccccggttcacatcattctcctgcctcagcctcccaaatagctgagactacaggtgcccaccaccacgcccagctaattttttgtatttttagtagagacagggtttcaccatgttagctaggatgatctcgatctcctgacctcgtgatctgcccgcctcggcctcccaaaatgctgggattacaggcatgagccatcatgcccggcccaccattttctttatactgtgcaaactcaacacccagaggcagaatttctgtaaagctaaaaataaaggaacaacttcaacttcagtttctctcattggcatgagcctcacccagcagcacttcgggtagcttgggcctcagggaagaatgttaccatggaccatgatgggagttaaggtaatccatatacatgtatatcttactttgtaaaataatcccctctatgaacatgtaagactactgttcacaatttggacattttcctttcaaacacatttttcatgaatatrttataggaaagttaaaaccatctctattctaaaaggaaaatctaccatttkgctcagagagaaagttactgagtttgtctatgtgattttaagtagtatttgattagagtattaaagaaatggggtacttcaagtaacataacacctgatatttaaatctaagttttaaaaatgtatttcacccattgttaatgaaagtgtttctaagatgtaacccctggttagctattccgtcttcttgccttgatgggttgactggtggtgaatgtgctgttgtcattccattgacagttcgggattttgtggtggtctcagcatattagcatagatgtgagttgtaattttataggattatggaactgtaattgtggaactcctgcagggcagactctggaggctagctttttagaaaactraaacctccagtataaacttaatttctgtcatttgccccattttcttgaaagttaagtgccagaaaagaaaaggatcgagtctctcttttctttctacaataaaacagaatatactttctccagggtttggtggtgggttcctttttcctgttgaggtggattctgagattgaggaggggctggagaagacagagcatgagggaaagagactgagaacatactcaggctgccctcgcctccttttccctttcgtgctcctgtctcccatctaggaggaccagggctaccagtccttgtggggacaagtttgagtaggatcaagagacatgtaactgcgccaggcgcggtggcttacacctgtaatcctggcactttgggaggctgaggcaggtgaatcacttgaggtcaggatttggagaccagcctggccaacatggtgaaaccctgcctctactaaaagaatacaaaaattagccaggtgtggtggcaggtgcctgtaatcccagctactcgagaggctgaggtaggagaattgattgagcctgggaggcagaggttgcagtgagccgagatggagccactgcactccagcctggtgacagagcaagaactctgtctcaaaaaaaaaaaaaaaaaaargaaaaaaagaaagaaagaaagaaaaagaaaaaaagagacatgtaacgggaatttgttcccatcttggtgacagtttcagagtgccccgcataggccgtgcaactggagaaggtgccctgtggaggcagaatgctgctgctggggtccttaaccaggcagaggttggatrtgaagatgagatgatgtagcttcttttgagtaggtttgaggggttgggttttttgtttgttttttcttctaagccttggaaggatgcatgaactcgttgaagggggtgtgacatgaatgccagggaaggagagagacctgtggaacttactggggaaggccactatgctttgaacccttcttttttcttagatatgggcaggggctttgtggttgtttttgatgcctgattggagcagatggggtggcaaggccaaatacgcagatattgtggtgcgccctttatccagaaccagggcatggccaaagcaccctagtgcctcagccaagttctctgtgagatcttggtctgtcacataaacaaaatcttagttcattcatctataaaaatggagataccaggctgggcatggtggctcacgcctataatcccagcactttgggaggccgaggtgggtgaatcacctgaggtcgggagttcgagaccaacctgaccaacatggagaaacccggtctctactaaaaatataaaattagccgggtgtggtggcgcatgcctgtaatctcagctactcaggaggctgaggcaggaggatcgcttgaacccaggaggcagaggttgcggtgggccgacatggtgccattgcactccagcctgggcaacaagagtgaaactctgtttcaaaaaaaaaaaataccaaaacctacctgttcaaaacttgtgtaaaatcagatggttatggaagcaccttgtacatgtattcctcctaaagttggttgttcttaaattaaccaaagccttctttcatcttcattacagatgcaaatgataagtaaatagtttttaaattaattatttttattattattttttgaaacagggtctcactctgtcacccaggctggagtgcagttgtgtgatcatagctcactgcagtctcgaacttctgggctcaagtgatcctcttgtctcagcctcttgagtagctgggactacaggtgcatgccaccatgcctggctgtttttctattgtttgtagagacagggtctcactacatcgaccaagctggtcttgaacttcggggctcaagcagtcctcccacctcggcctcccaagcagttccacaattacattcccaaagtgctgggataacaggcatgagccgccatgtgctggcctaaagwtaacacttaaaatgctagcaattgtgcagcagatcaattgttcatccttcacactgattaagtagctttgaacatggaaattctctaagcctgactgccccccgcccctacccgccagctgccattctcacccctgaagcacttgcactattgagaattcttctatttttcattagttgatccttctttaagctttgagtaattcaggaattggtcttcattgggacaatggaccgcaattttcagaaccataatcctagttttttagtttttttttttaaatttttatttatttatttatttmttttttgagacagagttttgctcttgttgcccaggctggagtgcagtggcgcaatctcagctcacagcaacctccacctcctgggtttaagccattctcctgcctcagcctcctgagtagctgggattacaggcgtgtgccactgtgcccggctaatttttgtatttttagtagaggtgaggtttcacatgttgtccaggctggtctcaaattcctgacctcaggtgatctgcccaccttgggcaatcccaaaatgttgggattacaggcatgagccaccacgcctggggaaggggcctcttttggtgaaaaggcaagggcactactcctattcattagtgttctacgcttacgacctaatcacctcccagaggacccacctcctcattccattgtattgggaattagtcttcaaaatatgaattttagggagacacaaacattcagaccctagcagggaccctggaaaggattctcattgtgcagagtatggataaacagtgatgctagggcagtttttccagggttgtcagaaagggctgaactagaagtttccccactgtgcctggagtgccctgggttggttgagtgtagggtttcgaagataattttgtcaggactctttagtttttagtcttttatgagttagaagagtgtgcatatgtaactgccaccataccacagcaagttccagcaagagagaggattcctcaggtggccatcctatccaaactccatggctctttccagggcgtttgtgggaaacctgtggggctaggactgagctagactttttcagtagctgagactggtcctgcagacccatgaaaggtgccatgccgtcacccagtagggggcagggagggaccctcatttgcccctcttcccgcccaacagttgcctgacttcagccttaatgcatagctcatccagagtcctcctgagctcccacctggtgaggtgtgtgtagaaggtgtgaggaaggccaaaccacattttcctggcagtggttaactgaccgttttcagcccgcctcccagtgcagctgactgcgtcagcttacattaccgtgatgtcattcccatggtgggataatatagcatcttactttgtctggagtggtgcctcccataagttttttgataccgcctacaaatggagaaagacatcattgtttagccatttttatttgggtgggttggaggaatgactttcccaaaggaataaatcttagttaatattccagaaaattcaagtacttttcaaccctaattgaaaggcactctgtgtgcgtgaattaaaatcaaggtggagtccatgtgccatgtgctgtgtgattctaaagccatattttagcttggcctattagtattttgcatcagaacattttatacttgcaaaggttagcaagaattttcctcagacacattacagatgagcagaatttattcattttgggggaaaaaatgaacagactgtatttggaaacttagatcatatccaaagcacttgatgattcctgtttgraatcatttttccttcaaagaatagttcagatcagtgttaaatgcagggcagagatggactcaagagtgggaggcattgcttttgaatggaatcacaatgtgtatatcattttaagtattatttttatggtatgtttcattatcaaaaccatctatagcctccaaaggatgacaggtgttatagtgtgagtggcgtagagggtgttgagatagaggaatgaaaagagaagagatcgttccctttccactcaccattcatagaggaactaagttttaccttctagggaattccctgtaattcccagggacgccttgtccttgcggttcccaggcaggatggtaggaggagctaagtgggagggaattaatatttcttgagtgtcggctggtaagttggttgctttacctccacttttttagagacagggtctctccgtgtcacccagatggagtgcagtggtgtgatcatagcttactgcaaccttgaactcctacctacactattttacttaatctttatagtcaccagcatttttcaaatggagatactgagacatttggaagtcacataaccatccaggggtcccacagctacataatgtcaggtcagttttcctacccagctccttctctgttttttttttttttgtttttttgttttttttttgcaacagagactcgctctgccatgctggagtgcagtggcgccatctcagctcactgcaacctctgcctccccggttcaagcgattttcctgcctcaacttcctgagtagctgtgtctacaggcgcgtgccaccacgcccggctaatttcttgtatttttagtagagacggggtttcactgtgttagccagggtggtctccatctcctgacctcatgatccgcctgcctcggcctcccaaagtgctgggattacaggtgtgagccaccacgcccagccctctccttttcttactaaaccagtgctgtaggggcttgctactccaagtgtggtctggggacctgcagcattcctgtcatccaggagcgtgttaaaactagagtatcctgagccccatcccagacctacttaatcagaatctgcattttagcaaaatccctaatgagtcctgagcatgttactgtgtgaggaagctctgcttagaggaggaaagtctgacaattacaactatgcatcctggccaagactcaggacttgaatccatggactggacccgaaacattggtctatctcagtgagggaggaagggtgctactagaatctgatgggtagagaccagggatgcagctaaacrctctataacacacaggacacccccttccaccaacaaagaattatcctgcacaaaatatcaatggtgccaatgttgaaaaaccctggtctaattgtctagatgtagmattcacatcctgtagatatgtttcgtagcctcagatgtatgcaaatctctaggaagtagatcttaaaggagttgatacaaattgcagtgtgctatgcaaatgggaatatttttattgggacttgaaaagagaaaaagagcttaaactgaagcatgaaagatttccattagagttttgagagygtcagactctcaaacaatartatcagggatgcagtggaaaagtttctaagcatgtactgagtacccaccattgagggtgctacaaggcaacattccctcccattcccaatcctgcctggcaacagtgccttctgtttcttcrttttattcctaagacttgccctggcctttgtcctacctttccgttctcaagcaggatatgctgggtcagttgtgccacctggaggctgggggaggaacgcaaataatgaataattggtaaagggaaccaaagcgctgtttctaccatcttttcctccctgcctgcrtggatccacacctcactgtttcttactcaactccttcaatgccacgacactgtagccacttccactggtggacacatatcctctctccctccttccttcccattctctttagatcctggcccagaacatctgaaaagatctgtcctccctcccctgtctctctccctttttttcttctctttcttccttttctgagctgaacagcaacctgtatcaatactgggaagtaaaatgagtatgcttattgtatactgatggaaagttttttggttttttttttttttttttttgagatggagtcttactctgttgccctgctggagtgcagtggtgcaatctcggctcactgcaacctccgccccctgggttcaagcgattctgctgcctcagcctccctagtagcagggattacaggcatgtgccaccacgcccacgtaatttttgtattttgggtagagacagggtttcaccatgtttgccaggctggtctcaaactcctgacctcaagtgatccgtctgcctcggcctcccaaagtgctgggattacaggtgtgagccaccgcgcccagccgatggaaaatgttttgaagtgaaattatatccaataaagagctcctgtcattcatccagttgtgagagtccctttgagagttgccagaaatgtctgctgtcttgtttttactcttaaattaacttgctctttctcgaagtacagaattctaaaacagagttggtgtttttgttgttgttctattatgtcctcctgctttctttagttgttggtactagaatagtcattttctactactttttcatggacattatccttgaaataggttattctagacaagttttggaacccaaactggatttaagaccaaggcattccaagaaaaataaaatctttttgcaatttctatgcatcatctttttataactttcattctcctttgcaaaggaaatgtggggctgtggatgtgaaaggaggtgggggcagtgaccggccagctgcagaacattcaagcctggcctttggactcagagactagggcagaagaagccagagtgctaggcttctggccagagtggaatgtgtcttcccaggagtgggaagcctgtgtttttccaccttaccatctgatctgctccagagggctctgcattagaaaaatagggagctatggggaatgactagsgggtggagatcatgagagcagtgtctatggaggattatcagttatgctcagaaagggaagatttggcacctggtcatcgatttttagtacagtaattgtcttgagaaaagtatttgagaatcaatattagaaacaatttttaaaatatatcagtcttaaaggtacataaatgagaggaagaaaatcagagatcagggtgtctgcaagatggtctactaggctttttattattgtaatttgtgattgaatgccctctgtggggccaggtattttgtttttgtttttgtttttgtttttgtttttgttttagatgagtcttgctgtgttgcccaggctggaatgcaatggkgcgatttcggctcactgcaacctccgcctcctgtgtttaagcgattctgttggcttggcctcccaagtagctgagacaacaggtgcgcaccacaacatccggcaaatttttgtatttctaatattcaccatgttggccaggctggtctcgaactcctgacctcaagtgatctgcccaccttggcctcccaaagtgctgggatgggccaggtaattttattttagcctgacaactactctttggggtccttggatagtttttaattccattttgaagatggaaaagtgagatgaattggtcaaggtcaggcccacaggccctatttttttccccttgcattgttactgtgctgggtgacaactggtgctgagacagctgctgtctccatcactctcatgaggaaagagggtcaacaggtccaggagtttttgtttgtttgtttgttttagatggaatctcactctgttgcccaggctggagtgcagtggcgcgatctcggctcactgcaacctccgcctcctgggttcaagccattctcctgcctcagcctcccgagtagctgggactacaggtacatgccaccagggctagctaatttttgtatttttggtagagacgggatttcgccatgttggccaggatggtctccatctactgaccttgtgatccacccgcctcagcctcccaaagtgctgggattacagcaggagtttttactctaaatattaagttaagcttacaagttaagctrcttgtaagctgtctgaaggtctatttccctgactttgcagttccttaattttgaaggcaatctctgcctgtatgtcttcttccttagagacctttgtcccgttaaggtaacctcctctcccagcccacaccttctaaagtaccttgtcacgtctcatgaactccacaagggtcctcttgggcatgataatgtgtgtcacctcttgcaagatccactaaaccctctttgccacaagttatgcttttcaaagtccgcctgaaaatatgctaacaagaatcattgtacaactgacttgcaaatacttgaacaaatacaaattaacaattactgcagctttatgaagaatgcatccaaaccaaggacagagtggaggaagacataatacaatgtatgggtacaatttaataaaaccttgaacctttaacatgggcccattttcatgcatgcattgtgatcaagttttgttcagaagggtgtaacttaactttgaaaaaaactatacatttttatgtgttttcagtgagtttaaccttccataagcacagatactctgttataaaagtgagtttaagctgcttcttgataatgaatgttgactgaaagtcaggccctayttccagtgtcatatgtggattgtcatatttaacccccgtaacaacctttgatagagataccattattttatatatatatataaaatatatatatttatttatatatatatgtgtgtgtgtacatatatatatgtgtacaacaggtacacaccaccacgcctggctaatttttgtatttttagtatagatggggtttcaccatgttggccaggctggtctcgaactcttgagctccagtaatctgcctgcctcggcctcccaaagtgctgggattataggcataagccaacatgccagacaaatattattataattttttgttacagatgaakaaacagacacaagggtttagggcaagggtacacagctagtggcaaagccaagcytggaatccctataggctagtggttagagacagtctcttaatcattcctgtttttactatgctgccttcttagtgcttaatacaaactaagcttgttstctccttttactatggttgggggtataaatctcagtccataaacaaaggcttacaaaaaaatagcattaaaaaaattttattttaagttccaggatacatgtgcaggacctacaggtttgttacataggtaaacgtgtgccatggtgctttgctgcacctatcaacccatcacctacatattaagccctrcatgcattagctagttatcctgatgctctccctccccaccccctccaagaggccccagtgtgtgttgttcccttccctgtgtccatgtatactcattgttcagctctcacttgtaagtgagaacatgtggtgtttggttttctgttgctgcattagtttgctgaggataatggctttgagctccattcatgtctctgcaaagtacatgatctcattcctttttatggctgcatagtattccatggtgtatatgtaccacataaaaaatagcattttaaaacttatgtaaattaattttatctccaagccttcaatctgtccaactataagaaaatgtaccccattatttttagacacacccaccctaggattacctgcaggacctaaggttttagaatgtgctaggttgtgggaagtggtccatccaacacctatctacaatggtttcaacagtgatttctagcacatgtgttatattagtttgctaaggctgccatagcaaagtaccacagcctgggtagtttaaacaacagaaatctattttctcatatagttgtaaaaggaagttaaattttgggaccccaaactcatttagccaaagggaaaagtcaagctgagaactgggtcacgcaaacctgcctcccctctttggttcctaaataagatggctacaagatgaaaaaatacctgccttccctatattttgcccacagggaaattcctggtgagctgttaaaacttcaccatggcaatgcaaattgatagtttatcttatacaggcgcagtcacccaggccctgccagactcaaaagcatatctgattgttcccctaccccattttgtctgtgctatcttatgtaaaatgcagattctccacattttttcctctgccccttttgtttatgtgaaaactgtgtgcttctcaatatcycaccttttctcctttaaatttggaatcctcaaaatcatctctggagaaaggcatacatctgtctcccaggcrtgttcttaactttggcaaataaatctaaaatgattgagatttgtcttgtcattttcttccattgacagaggctagaagaccaagatccaggtgtttgcagggttggttgcttctgagggctgtgaggagaggttctgttctaggtcttggcttgtagatgggtgtcttctcccagtgtcttcacatggtctctcctctgtgtatgtatctgtgtccaaatttctatttttttttttttttttgagacagagtttcactcttgtcacccaggctggagtgcaatggcacgatctcagctcactgcaaactctgcctcccaggttcaagtgattctcctgcctcagcctcccaagtagctgggattacaggtgcccaccaccacgcccagctaatttttttttgtatttttagtagagacaaaatttcaccacgttggccaggctggtcttaaactcctgacctcaagtgatccacccacgttagcctcccaaactgctgrgattacaggcgtgagccaccacgcttggctcaaatttcctcttctgtaagaacaccagtcatattagactcatccactctaaagacttcattttaatttaattacctctttaaagaccctgtatccaaataccatcacactcagaagtattgggggttagggcttcaacataggaagtggagcaagggttggggtaggggtgcacacagttcatcccatttgaggctctttaccagttcatgcaggcatgggacaggtcagggaaatccttggtaagtctgggaacctggagcccctcttctctgaagccttgccagttcccttaggagcttccacggaccaaagtgaaacacccaggggtggagggggtaaggagcttttctagaacaccttgcaaatcttgttgatggcttagatgtttacaaaactctagaaraatcttatctccttgatatgagatcctggaagcaaggagttaaaagcctggctgcctacctaaggaggaggaggaaggagtggaagtaaacgaagacattgattatgatagaaaaaatgttaatagaaggcgatttttggaagccaaagagaaaattcagcttgaatcccctagtagtgtgtatgctcatcttcccaagacggaagtgcctctcctgtccgacctcctagcccagcctcggtctggaacacattgggtcctaggcacccagcagtgaattggctcagaaagtgtttgagggctcaagtgagtccaggaacgatggctcacgcctgtaatcccagaacattggaaggctgagatgcgaagattgcttgaagccaggagttcaagcctgtgtagttagtggtatgtcctcagcagaagccacaggactgtgatttgaagagaaggatatggggttgaactgcttcttactgccacggcagctctctggccccggaactggggcagttccttcattgtcccacctctgtcatcgcaggaatcccaagctgtcacacttctcagtattgtttcctttgcaatttgatgtggacttggcacatttccaaggtggaaacgacccctcattcattatttttgggacctcggtggccccgtgataagggaaatgatggatgcctggacttgtcttctggcattgcgcaccagatatcagggccctccacaggaccagcctatgagacaggaagaggctgaggtcttaaagacatactttcttgggagtttgatgtttcctcttgcttccacagctgtcagaaagggcttgttctgagggtgacctgcaggttgcaaggctgtggaaacatagcrgtgacagcgttgaatggcttgtccccatcagtaagctttggtgtcacaccagccggatgactttctggtggagggccagcttcctgcacttccgtgacarcagcctgacagccccayggaggcatggctgtagacattaagacatttctgtagacatttgttctagttgttgtccttttttgtctgttatttattatttatttatttatcattatttatttagagacaaggtctcactctgtcaccaggctagagtgcagtggtgcaatcatggcttattacaaccttgatctcctgggcccaagcgatactcccacctcagcctcctgagaggctgggaccacaggtgtgcaccacaatgcctggctaatttttaaattttctgtagacagggtcacaccatgttgtccaggctggtctcaaactcctgagctccagcgatcctcccaccttggtgtcccagagtgtggggtcttaggtgtgagccatcgtgcctgccctgtttttcattttaattgtgtgacataaaatgtaaaatgtaccctctaaaccattttttagtgtccagttttgtggtattaagtacattcacattattgtgcaaccgtccccaccatccattcacagaactctttcaacttgcaaaactgaaactgtatgcattaagcaataactatcccttccttctttcctcttccccagctcttggcaaccaccattctactttctgtctctatgaagttgtctactctagtaacctcatataagtgaaatcacgtatttgtctttctgtgactggcttatttcacttagcataatgtcctcaatgtttatccatgttatagcatgtgtcacaatttccttcctttaaaaaaattgaataatgtcccattgtgtttatatgccacattttgtatatccattcattcattcgatacttgggttgcttccaccttttgtcttgcccttgtttttgagaggttaatccatctatgaggtcctccaggcatcaaaagagttccccagttccctactttggagaagttcactatccctagcaaagatgcaaagaacagatacatgaaaaagtaaatcatggtgcaaaagttgtatgagacaacactttaagatgtatcctatgagcgtaggtgtagatttgcaaaatggctggtgtggagtttctggaagaggatggcttagagagagtatggacttaaagcagagttaaggagcccaagctgaaatcctggctttgtgacttcctgtccttgtcactttgggtgaattattgaacctttgtaagctttagtttcctcatctgtaaaacgcagataatagtacttacctcatagagttgttgagaggattaagtgagtaaatgtaagtaaaagatgggcgtggtgattcatgcctgtaatcccagcactttgggaggctaaggcaggaggattacttgaacccagaagttctagaccagcctgggcagcatagtgagaccttgtctctaaaaacaatttaaaaacttagctggtcatggtggtgcacacctgtagtcctggctgcttgggaggctgaagtgggaagatcccttgagcccaggagttytaaggtggcagtgagctatgatcacaacactgcactctagcctggggaacagaccaagacattgtctcttaaaaaaaaaaaaaagtaggtaaagattgaaacaggctggcacacggttagaactcagtactaaaatataaaggagataacatattgcccactaacattttggctatttttaatatattgttcttgtctttttaatgaccacagatactctttagtatctgtttgctgcagtttttgcaggtattcatgatgcctgttatgcctttcctattttacctccttttcagattatgatagttttagcaaagaagtattcagttctagagactcattatcaaggaaagagagagytcttcatttggttttatcagataatagataataataaatatggcctggctttctttgcactgggaagatagagaatgaggaaggagaatgactattagtcattctaacgttagtctgttttatcgaactgaggagggagttagctttctccaactctgggcagattaccgagagtaggatgccaggttacattctcttgggagaacagtgctatcatggctgatctctcaattaaggacttcatatttagattatttaaatctcaaatattgaaatactctcatttttctaacaatgataattaagaaaactttgtaaagttacaaataaagtgaaattgaaaaggtttgctgaatgaagtattttactattgaaaggtcttctagaatgtaagtttcaaacacatcgtctggttggtgcattacttaatctattcctgtttggctgctgcttggtatttcccacgcaggagttcattgacttcaaggcaattgaatgcattattagccagaagaagaaaacatgtgagtctccttcacccaacaatagattttttaaaatacattgtgcacagtcctcttaaaaaaggcatcaatggcaggtgggtgtgaacagaggaatttcctcctccaccctggctgttgctgagctgtaagctgtaaacattgtgagagacaaaaagtatcaaggtctcaactttctttcggatattgctttgtatttctgtttactagtatgaatgaaaattttcctgaaaatgctggctaaaactgaattttggtgttgtctttctaatggaatttctgatcaacaatttcctttatgttggcaattgcttaatctgctgaagtaggtaaggtagttgtgctgccttaaaatttatttttatatttgtcattaaaaacaaacatgaaacttggaggttaattttgtctgtttaaattttgaygctttcattttgacaaaatcttttaagaataatgacgaggctgcagtgattgaaatacaatttgtgtggcttttaggcaagtgagcatttagcaagtaagaatttcccagattgggtttagagttgtatttgcttatgttccaaactyttttttttttttttttttggtaagataattttgaatatcagtagaacttggggcagatagaatgacagaacatggaatgtgtaatccttttgggatttgtatcttagttaagtaaactttcatgatggattaaggaggacaaagtctccagcagatttcacttggctgattttgtttttctgttctttttctgttttcctgatgaggcttctgtacttctccctttaaggaggcaactgaatagcatraaaataaggggtatgggtggtggtagttgctgaggggaatgacaatggatttggtaacacagcatgctaatatcatgcaaataatgagatgrtataggaatctctgctctagtggtgggtctgaggtttkctctagtggtgggtctgaggttttctctactgagggcaaaattggagctttttttwaaaaaaaaaaaaaatttaatttttttttgagacagggtctccttctgttgcccaggctggagtgtagtggtaccatcacagctcactgcagcctccatctcccccaggctcaagcgatcctcccacctcagcctcccgagtagctgagaccacaggtgtgcgccaccatgcctggctaatttttaaattattttgtagagagagagtcttgccatgttgcccagactggtctcgaactcctggcctcaagtgatcctcctgccttggcctcccaaagtgttgggattataggcatgagctgccacacccagcctggaactttcttaaaagagaacttctttcttggtttgccacacctctgggttaacaaggtgccagagataattagcccttgattgggagaatgtgggactgttcactatggaaggatcttacagtatagaaatgaaaccctagtgtaggaagggagctgacatttttcagtgttaccttgacttaatttgcaaaatgttttattttctgaagccacagtgtaattcacagatgcaccaagatcaaaggtctctaagaagaagaggttgtggggaaagagcccwgtagaggtagggaggccacaatgaacccattgagttattccacctgtcaaaaccttggttttgtaaactgcaaaataggaccagtaatacctatgattagctgctgctgttacgaattaagttcagtaacaagtccracatggctggcgcatgctgttttcaataaatataaattctgctcccaaccattcaacatcaaatgagttgatctgcaaaaagtgttttgaaaactacagatactaattttcatttgtgtatgcctgttagttgacttcaaaacatttgtttgtcccaggaacagaagagaaatatcctttgatcatgagacaggttcatttttagtatgttaaggccactccatgtcattcttgtggcttgttaatgtggttaattgaaacccttccatattcttgatggggcagaaccttcagctgttttcatgttcatgttcaggggtgtaaatttctagacgatcttgtggrcctctgtcagctctgagattaaatgacgtgtgcatttgcttatcggattcttaactctaaaaccctgggatgaggactaggaaggagaaccaggaggcgctgagggaacaacagcttccacatggcccatctgctttgcagaacctgtgtctttggggtacaagtgagctggaggtggagctgcaacagagtgagtccccgtggtcagtcacatgcaccggcttccgcctggtatgatttatcagcagtgatgcaaacatgattcagagatagttttataagaatttttacttcggttaaatcataatcaggcggctatttccgtttttctaatgtcacttgattagctcaagatgcccaacccttattgtcctgactcatggagggaggctgcttgctaagtaatcgtgagacccaggagaggaagagggttggcggccatccccacyggaggggcatcctggaaaactccagagagggaagcttgtgaccatgactcctagcagagcggtactgacaaccyagtacaaaacccatagtggaaacactttcacctactctcatacattcatcttcccctgagaggaagcagagctgacattgtccagtcccattctgcactcaaagaaatgcagtctcagagaagctacgggaatggttcaaggtcacatgcttgcatatggcaaaattccaaatgcagacagaccactgaaattaggggagaggggagatcttctctttctactttaaactattttatattgtttgggtagtttccaaagaacaatgactattttaaaaagaattttaaaaagtaaatttaaaaactaaaaagttttagaaactaaattttaaaatctctgtttatttgtgattattcaaattttagaaaatgaaaaaagagcctcaccaattctttcagtcgatcctctcatttttacagaccagaggactgagaaaagtataagttggtcaattgtgataagctgggtattggcagaaaatctgttttaaaacttagtaggctcactgggatgattgaagctctgtgttctgcttaatacatgtttagctgcctgaactaactcagatgactccatgctgtaccatagagagaggagcctgacctttggctttgggatctatgcgaccccagtcagaacatggcacttttgatgtcttcatgacctttgrcgtgctactcttcctctttgcatttctgtttttttcgtctgtaactgggaataatacccatccggcaagtttcgaattagaaattagaggccaggtgtggtagctcatgcctgtaatcccagcactttgggaggctgacgtgggtggatcacttgaagtcaggagttcaagaccagcctggccaacgtggtgaaaccccgcctctactaaaaacatacaaaaattagccagacatggtggtacgtgcctgtagtctcagctatgtgggaggctgaggcaggagaattgcttgaactcgagaggcggaggctgcagggagcccagatcatgccactgcactccagcctgggcaacagagcgagactctgtttcaaaaaaaaaaaaaaaaaaaaaaaaaagaattggtagaacccatctgaaattgccacttttataggtcaaatggtcgaatattagaaatttcatgtagttgaactcaacatttagagagtctgataggtactcagtaaatagttactattagagatgtaatagaggatacaaataaaattcttatggttgctttagcgaggtcccaaatgttattttcttctcccaaggaaatgactaacaggaatatagcttttcacttttttacattggtaaagatcttctctgactttggaaagcctgccacttactgagggccacctctactcatggctcccaggatgtagtctatcttattgacgtctttgacagttcataactcagttcactttctccctgtctatgcttggtcacttggatggatacatgtcctctgtaactcctccttctttcagttctctttcaatgaagatcaattatttttcatttaagaatcttcctgtgcaatgattgctctatgccctgatacatagaaaatgggcatattttccaattagcactaccattgtttcttgtgggtaaatttcggctaaaattatgtctataaaattcccttagacttaagtagtattattgagtgataggagcctgagggtgatttgggagatacttgtgttctgcccatcactgtgttattaactaaccttatatagtcttcgtaggacttgttcatatatgtacaaggtcagtaagatcattctaagtcaaacacttggctatctgtgattttctcaccattttgtgtttatagatagttcagacagtgagtgttagggaaacagtgaaaggtgagttagtagtagttcatattattaactcattttattggaatttccaatttttccttcccaaaatttttctctgaaccagtataaccctaaacctattggtaaaatatagaatcttaagcctattggtaaaatatagaatcttaactacattccaatataaagcaaactgttgatgtgggcaaaaatgagggggaggagagggagaaagaagtggaagagaaaatgagaaattctaagtcttcatcactttccacaggactcggccataacccaaactcaagctgcccactgttgcttgggatggcgggctctctctggaccagctctgtggctaagggtggcaaggggcccatcagaatggagcagtccctgatctatcagaggtctcaaaaaactgcctgctactaagcttggatctttccagaatcatgtggatgatagaatttgcctatagtgtcatgcatggaaaaggaagagaaactaaaggcagactttaaaggaattacttatctgtgccctctagcatctctgagaattgtgctaaggatttgttgcaaggatggcggtagatgaagaagccattggtttgagtgagatttggagttaggcgtagtaatccttgggtgctggagtagtgtcttgtttgagggagcagtgttcatagggcataaatgctatagaggtgtctgaaccacctggagccacaatctgtcctcatgatcttgcccttcaaatgcagccgcatgcccacataacccaccttggggagtagccaatactcaggctactctgtgggctggcattcttggtctcctgacttctgccccagctctaccttggttgataccccaaatgccccttttcctctggcctacctagcctgctttctccccttcttccttggttaactttgcacrtgaccattttgattctctaaagagaatcattcaattaggaaatggaaatctgaggcaatgagagagaggagacatgcatcactatttatttttagaaacttcacacaacaccaagcccaaactgttaagcattgccttaggagaggtttctaccattgtgcttgccaggtataagaaaagaaaattacaattgattctgtaatttcttttgtaataatcatcatagattccaaaacacagaatgagtctttagtgcgaagccctgaagcctctgtctgcaagtccattttaatgacagtttttgttctgagcaagaatgcgtcattgctggtcttgtgttttcagacaaacacaaagcttttaggaaataagaagcttaagtaaaaagactacaggttgttctctcctgggagttcctggacaccctctcaactgggacacttgaagtgagcctcatgacctgagctgagaattgccatggctgaaacagcttttatagggtgttttacatggacacttgacactctttggatcacattgtgtgtgatccagactcaagccagggttagcctagcttgttgttttatctcagttaaaagccttttgttaagagaacaaacaagaaagttcagataggtcaagaaagccagctctgaggatatatctagagggcaagtcatatttatttttcaaagtttccccaggaattaaaggttgcacatctaaatgtcaccacttctgtgacttttgcagataaacattagatttacctttggcaaactgcagtgtctacattatgggatttccctccccagagtcttttctctggggaagttctgaaaaattgtttcagggatactatagttcttaaatataactaacaaacatattatgaaatgctgttagtttttttctggaggctgaatattgattgctacttagtataccttttttaatgattatattgtcccaccaggatatttacacagcttcatgtgtcttcccacaaaatacacatgaattgcaaagggaatatagtaacttggcagtagagaaacttggcagataccaccctaatcaaataatcaaatctaacaccattagtaattggacaaattggcagtgtgcaccatttgatgagatgcacagaggaaaacacagcatcgcttctgtgatattcctgcacaaatgcatgagttagatctaatcatgaggaaatatcaggtaacctcaaattgcgggatgttcaacaaaataacttgtctataatctttagaagtcccaaattagctgggcatgatagctcacacctataatcctagctacttgggaagctgaagcgggaggatcccttgaggccaggagtttgaggccagtctaggcaatatggtgagagcccatctcaaataaataagtaagtaaaagtcatgaaagacaaggaaagactaagaaagtaccccaaattgaaggagactagagacatgagacatgggagcctagattggatcattttattagtaagaacatcattgggaccaagattgaaatttgcatgaggtctatggtttacatgtagaattccatcaatgttaattacaagattttgaggctggactgtggttaggtggaaaaagtccttgtttttcaaaaatgtaccttgaagtattaggaataacgaggcattatgtctgcaaaaagactccaatagttcacaaaaaaattataaacacacacacgcacatacacataccatgtagcattctaatttttagaaccagaaatgagcttttaaaaagtcaccataggctgggtgtggtggttcacgcccgtaatcccagcacattgggaggctgaggcaggtggatcacctgaggtcaagagttcgagaccagcctggccaacatggtgaaaccccgtctctactagaaatacaaaaactagctgggtgtggtggcgtgtgcctgtaatcccagctacttgggaggctgagacaggagaatctcttgaacccaggaggcagatgttgcagtgagccaagattgtgccactgcactccagcctgagcgacagagtgagactccakctcaagaaaaaaaagaaaaagaaaaagaaaaaaaaaagtcactgtaagagatgaattagaagaatgtgtcttgaatgcgggcacaatttatttttgttgtcaattgacaatcttgaaaaaattctggccgaatgtcggtgtgccagctgtttcatgcaccagacctgtagttcacccctactcttttacctgtagttcatccctactcttctaaggcttgaatgraaaataatttctaatttgttgtaaaatttaccaatttggtattgctgctgtaaacaggattttatctagggtttagatgccttatcttcaaattccactatcaagctagtacataaaattgtttgaaaactgaatcagatgtttatgtaattcataaaaacatataatttccctctaatatttcatttttcctaattayaaaaataatgcatgcttattatagaaatgtagacataaaaaactatraaaagaagaaaagaaaactcaatccaaatcttaccactcagaaatgacgtgccactggtaacatttagacttatttcctcctaatatgtatattttaaactgccctcattctctttttttctttctttctttttttttaacctctatagtcgctcctgtaaaagctgcccctatgcttgtaacattattctacaatggacttttggatcctaatgtttttactcactttagcataagcattttcccatgtagcaaaatttcagatattttacctttttattttaaaataattttaaacttagaaaagagttgcaagagtagtacaaagaatttttgttttctcttcactaattgttaacatttctcatatttgacatgttatataatttatatatgtctatattatatacagatgcataatttttaatatttttttctgaaccttctaaaaataagttgcagatatcatgcccctttatattactttatatagtctcaaaagtgttaaaaaaattcaggaaatttgacattgatacaatactattacctaatataaacttggtttttcaaaatttgccagtttttgcaaagtgacctctagcatttttttaccccaacaccaggatccaatcctggatcacactttgtattttgatattgtctctttatcaccctctaatctgataaagctcatcagtcctttttctttgtctttcatgacattgacatttgtaaagaatatttttccttccatgtgaattagtctggtttctacacgtggtccttaatagctataaaatattccaccgaattttacctagataaatgctttatgttggtgatttgatggtttctagtgtttatcttcataaataaggctgcagtgaacatccttgtatttatgttttataaacatccgtggttattttctctctgatagaatcctggaaataaaatactgggtaaactagcataggtatataggctcctgaggatatatakrtatatcatatatattctacatatatatatatatatatatakgtatatatacctccaaaaggatgcttttcaaaaggatgaaactggcaagaataaaatctcactagttgccaaatgaaacttcatttttgaaacacaggagtataaaataaaaacttacagaatatatcctatgttattatttttcagttatctgtaatattttggtcagatgtgctttattaagtaaaaatatagggtcccaaatcatgcacacatgatgtttagatgcatatggaagaccagctagacaaggccacctccgagttttgtgtgttgagccactttttatgggttacttattcatttgaaattgatcctggcatctgtcaaggtaacattacagtatcactgcttggggctccctttcacttgcctgtatggatagagctttaatgtttatttcgtgggcaattcataacctgtagcacatgaaggaggctgtcacrcaatgtataccacccctgtggtaggcccaggaccggcgtttgtctcaaacaattccagtaggccttttattcagtgaagtggatagatttggtggataccactcagtgagtcagagttttggaatcaatgttctccatagctcatagcataagctctggagcctgacaatcctgggtgtgattctcagcttaactacttgctgtgtgacaacaagcaaatcccttaacctctctgagccttggttcctttatctgtaaaaggaagactgtagtcgtactcctctaatagggcgataccctattagatgtggatgaaatacaataacaaataggaagcctttagcatgttacttggcacattgcaagtacacattcagtgatagctttcataattactataatagtacattcatttcgaggttgtacattgacagtgagcaaaacactttaacatcttgtgacgtgggcaagttctcccatttgacagatgagaaaccttagacagaaagcgggttatatgaactaacaaagccatgtgtcaggtaaacggtgaggctgggcattaatctcacgtcagggctctctcttcaggatatccagtgactgttccataactcgttacctggaagtccaatgctgtttgggcaaattttgaataaacccagtggttctcctacagatatatcttgatttagaataggcattagcaaatgttttctgcaaagggccagacagaaaatattgtaggtcttagccgagtgcagtggctcacgcctgtaatcccagcactttgggaggccgaggtggtcggatcacgaggtcaggagttcgagaccagcctgaccaacatggtgaaacgctgtctctactaaaaatacaaaaattagctgggcgtggtggtgtacgcctgtaatcctagctactcaggaggctgagacaggagaatcgcttgaacccaggaggcagaggtttcagtgagccgagatcgcgctactgcactccagcctgggtgacagagtgagactcagtctcaaaaaaaaaaaaaaagaaagaaagaaaatactgtaggccttgcaggccatatggtctctgttataactacatttctcaactttgctgctcaaacttgaaaacagccttagacaatatgtaaatgaataggcgtggctgtgttataataaaactatttactagaaccagcggcgaccagatttggcacatgggctgtctttatcaacccctgatttagacagggtgtattctggcagggggcacatgcatttcattatattagttacatgacaaccttcttttgagttcttagacatagtgaagaacactccagaaccttgagtctggcatgtagtaggtatttggtcactgtttgctgaatacaggaaagcttctctgtctatattttcctatggtgaatttttctgaatttatgtattcttatctatttttaaataactgttttattttagcacttatgaatttttaagttttgtttttgtttcacattgttctgaaaggacattaaaagcagatcgggaaaagagcatttagccccaaatgtaggtttaaacatattttcagatattcttagtgtttgtcgtgtatcagtttgttattttattttcattctcttgcactgagggtaatttccaataaaaactctggagaatttagacagcttttgttttaattaggaagctatttcacttgcactcttgtactactgttgactcaaataattaacagtaatggctgaataatttgttctttaaaagtaaacaacctccctttgtaatctagaaaagaatcagctggtgatacacatggagtgtttgctccaagaacatttctcatggtgtggaaaatggcagtggtggcctcctggctttcaggctgaaatacrtttagctgatctttgtcggcaaaggtgtccaacaatagcaactgcttatgacaactaattttaggaaacgtgtgtagttaatttgaaatatcgccctgggccgttcaaccttggctgaataaggatgttttcttttaaaatcagtactttgcttccctcagtgattattccctattagcctgccaagaaatattatttcccttttgtatgatttgatgaagtacctcaaaaatctcctggttatggtcaacatttcatctgataggaagcgagtgtatctttctggtatacagtgaggcatgaggacacacagcttattttaatcttcaagctcgcctgtaatcctagcactttgggaggccgaggtgggtagatcacctgaggtcaggggattgagaccagcctggccaacgtggcgaaacctccactctactaaaaataaaaaaattagccaagcatggcggtgcatgcctgtaatcccagctactcgggaggctgaggcaggagaatcgcttgaactcaggaggcggatgttgcagtgagccgagatcgtgccactggactccagcctgggcgacagagtgagactccatctccaaaaagaaaaaaaaatcttcaagttgagatgttaggttaatcttcagtctccctgtgttttcccacaaggaatagtgtggaaaagacttggggaaaaaaaaatcatcatgattcagccaatgaccagggcagaggtataaatggagcatgattctatgtatctgtctagaaggcatatatggagcatgattctatgtatctgtctagaaggtatatatggagcatgattctatgtatctgtctttctgtacttgttgcctactgagaaaatacagatttttattagaaggttgctgggcacggtggctcacgcctgtaatctcaccactttgggaggccaaggcgtgcagaaaacctgaggtcaggagttcgagaccagcctggccaagctggtgaaacctcgtctctactgaaaatacaaaaatttgctgggcgtggtggcaggatcctgtaatccaagctacttgggagactgaggcaggagaatcacttgaaccggggaggtggaggttgcagtgagctgagattgcgccattgcacttcagcttgggtgacagagcgagactctgtctcaaaaaaaaaaaaaaaaaaaaaatagaagattaaggatccctatctgaaaaatcaactttgttctttctcttcatcagttttgtcagtgtacattcagcagctactacacgctaggcatagtgccaggcagccctggggatataaacatgtaatctatcaccgctgttaacctactggtgatttgaagactgcatcccaggagaccaatgatagtgatggaaattggtagggaaggttgctttaaggtctttagtatcttctatttgcctaagagaaagagaacttttgggagaagaaaccatacattttatctcttttcatctttatgccttatgttatcaggaaaatatttaataggagttgccaataaggttgataattctagaccatcaaaaccatagaggtgtgatgtcaggtgtaggaagagatgggaaacacgatgtaaaatgtctgcgtggctcacataggaaatctgtgcttagagtgctgtggcagaagtagaaattgctgtcagccaactgattttctgattcttctgtctataaaagctgtgcccattgttaacwtaggtgataagttgaatttttagtttttttaggttttttgtttgtttgtttgtttttgaggtggagtctcactcygttgcccacgctggagtgcagtggtgcgatcttggctcaccacaacctccgcctcccgggttcaagcgattctcctgcctcagcctcccaagtagctgggattacaggcacccgccaccatgaccagctaatattttgtatttttagtagagatgaggtttcatcatgttggcaaggctggtctcaaactcccaacctcaggtgatccacccgccttgggcctcccaaagtgctgggattacagacgtgaggcactgcgcccagccaaatgttaaaagtatttttgagcttctcagaggaaaccaatgaactgaagttcaataatctgtggtttgtgttacaatattttgaatccttccggagactgaatgaaagatacatatttaaagtgaatgcagtaagtaggaagaggcactgcttcagcctggtaacatgcagttattgctttgagggtcttgcagaaagaatatgcacattgagtaagtaggagaaggtgtgtattttggaaaaatcaatcaacttagttcaacttgaaggttttcctatctgaaaagggatgtatcaaaagatattttttcttaggaggaaaaaatccacaactcgcaccagagcatttcattgagaattactgttatttacgttttggaatttacattgttaaaaagagagattttggaaaggcaggggtgggactagaattgtggcttgcatgttgcctataaacatagattcctttttttagatgtctgtgtttcttagtggattatgttcttaaaatagaacataccacattactctctggtttggcagggtgtggtgttttgtttactgcttgggtcaatgttctatgaacatgaatcttttcacagagaatcccagggctaaaagaattcttagaggtgagccagtcgaggccccagcacccgcttcccaaaggctcttcctgccagccaccaggcctcatgctccagtggcagtccagcccaagcgacaggaaactctcccttcttttaactggaatctcacatccagtggcttctctgcttgtgctgggtccctgctggggcttcccagaattctgtgcaactcctctttcctgtgagagccctcacgatgttagagatttggggtggggttctcatgctcactccaaagcccctacctctccaaaccttcctcaccatgctaaatagccccagttcccccatatgtgttcttatttgatagttaaagccctttgccactgatttcaaccttttaatgtgtgcagtcaagagagaaacctgtgttctggtctagaacatcacctatctggttctttggttcatacttttctgaatatatcccaaggtagtgcaagcagtggctttttgttttgttttgtttttttgagacagagtctcgctcttgttgcccaggctggagtgcagtggtgtgatcttggctcactgcaacctctgcctcctggatttaagcagattacagtagtgtgccaccacacccgactaattttgtatttttagtagacacagggtttcaccatgttggccaggctggtctcaaactcctgacctcaggtgatccacccacctcagcctcccaaagtgctgggatttacaggcttgagccactgcacccagccaagcagtggcgtcttaacataagagggtcaggctctaaaacaccgtaggaagtgaaatctgatatggtataaaaatcacccttgagatcacctataaaataaagtatataaaaacaaccagtagttttgtgtcagaaccctttgtaataattcttacgtacaataaagtttagaactgctgatctggcctaaagagtagaaataaggggaaaaatctcatctacaaaagacttctgcataaagatagtggattgaacacaggcatctacttgcgcccaccaccaaacaaaacatcatttaaatgatacaaagagaatttttggttttggttttgtggtaaaatgtatgcaacataaaactttaccattttaaccatgttaaggtatacagttcagtagtgttaagtactgaacatattgtgcaactgttgccaacatttttgtccagaactttttcattttcccaaactgaaactctgtacccattaaacaatgactctgtagggctgggcgtggtgactcacgcctgtaatcccagcacgttgggaggctgaggtgggcggatcacctgaggtcgggagttcgagatcaccctgaccaacatggagaaaccccrtctctactaaaaatacaaaattagccaggtgtggtggcgcgtgcctgtaatcccagctacttgggaggctgaggcaggagaatcacttgaacctgggaggcggaggttgtggtgagtcaagatcacgccattgcactccagcctgggcaacaagagtgaaacttggtctcaaaaaaagcaaaaaaacaaaaaacaaaaacaatgactttatattcctcacttcccccagcccctagcagccacccttctactttctgtctctacggtttggctactctaggtaccttgtatcagtggaatcatatagtatttgtccttctgtactaacttatttcacttaggggagttttttttaaaaaggcrtaagtctataaacacaagcataacagaaaacgaggcaacaacagcgtggtttttggcattaggatacaggggtgtgtgtggctaaaataaggaggcctagtctgttttaataatgttgaaacatttctgagcctttgcacttctttagatgaatcagttggttctcagccttccccattgacagcctaggatactgttttgtttttgtttttaagtctgcaaagttttttgttttttggtttggtttgttttttttcctacttatctgtctgctttctatcttgccaagttttgttgaaaaattccattggtagcaaagagaagatcctacctataagcttccagggggataaaatagatcacatacaaagagtcaagaataaaaatgggcttgacttcttaacaccaacactggcagctagaagacaatgggaacaaggcctttgatagcatggaagagcatgattttaaaactagaattgtatattccatcacactcttgtgagggtagaataatgcatttcacacataacaagttttcagaaagtaactggagaagatggtccactgagatgagggagtaaaccaggaaagaaaactaccagcggtagagcaaatgggatatccaacctgagagaggcagaggaaatttctagatgcctagggcgggaactcccagctgaccgctgtgctcctgaagcatgccagaggctcaggaagtgacttcctttgtaaggtggagttgatagaatatgtgaggcatcttggtgtcatgagaagagatttagagatatgatggaaaagtttaggcttgaattagcaagagctatataaaacactaagcaaaggtggggaaatactgttactaatgctgaaaacagtaagatgttcaggaaaggaaaactgaccatcattcaccatgtggcttagctgaaagtaatgttatgttattataatactgatcttcaaaagtttccatataattatattgggaagagtaccctcatatggtgagggcatagataggaaaaaccattaaattatcattctccatattgagaagttaataaataatgccaacaatggaaaaatcacaaagaagcaatgtaaattgttaccaaaaattacctaaaagaggttaaagtaccaaggatatccttggtaactatgggggggttggttccaggagcttcctcagatacccaaatctacagatggtccttaatatagaatggtgtagtatttgtgtataacctctgaagatctctagattacttatgatagctaatgccatgtaaatgctgtgtaaatagtttttatactgtattatttagggaatcatgataaaaaaaagtctgtgggtgttcactacacgtgctaccatactttgtttgtttgtttgtttttctttttttttttgagacggagtctcgctctgttgcccaggctggagtacagtggcacgatctcggctcactgcaacctccacctcccgggttcaagcgattctcctgcctcaacctcccgagtagctgggactacaggcatgtgccaccacgcccagctgatttttttttttgtatttttagtagagatgggatttcactgtgttagtcaggatggtcttgatctcctgaccttatgatctgcctgcctcggcctctcaaagtgctgggattacaggcgtgagccaccgcgcccggcctagatgcaaccatactttaaaaaatatattttccatcgtggttggttgagtctacagtgtgtaaccacagacgcagagggccaattgtacttactcttkggaggaaaaatcggagggaagcaggccgaagtggtgacccgtaggaattgttgttttctgtactattaggcgctttaaactatgtaactgtatgtctttaataaaaaatagtaattaaagttaaagagaatgtgtacaaaggaaagggaaaggtactggaggatatggtccagcaaggtgaaggggtaagttgaaaaagtataagaggtgggatacaggaaaccagggatatagaaactcaagaaaatataaagtctagcagtcaactaagcaagactggagcaggaagacccatggctgtgggacacaatggaacaggtggatttcttgatgtatggatgtagaaaatactactgtgatgtttcaccgatctggaactttgggccgagttagcaatatgtaagtagaaaactaagtaattgaggaatatagttaacttcagaggaaaaaacctcagaaaattagacaagaaaacatartatactctgtaagtcttcagtgcacaaaatttatatgaacctaataataaacactgaataataaatttgtgaagtaaataaaaatattgggaggacaagttgarggggatgccaatggataatgcctaaaactgataaatagaaagcaagatagcctaaacatcatatttagaaaagtgtggcaagtaccaaaaagaaataactacagcccatgcgaagtggctcacacctgtaatcctagcactttgggaggccgaggcgggcggatcacctgaggtcaggagtttgaggccagactggccaaaatgttgaaaccccatctctactaaaaatacaaaaattacctgggcatggtggtgtgtgcctgtaatcctggctactcgggrggttgaggcaggagaatcgcttgaacccgggaggcagtggttgcagtgagctgagattgcactactgcactccacctgggcaataagagtgagactccatctcaaaaaaaaaaaaaaaaagaaataactacaaagagttgcaagtggtataagactgagaagtgggagggtgtggggcacttgtttgacaatttaactcttaaactctgtttgatttttaaaaactatgtgcttgctatttgcattttaatctaatgaaggtaaaaatggattaaaatataaaaaagaaaagccatctatatgcagatgtctgggcagtataaaaggtctgagagatgtgcttaatactatgattattaaagaagttaatgtctrtgagagcacccagcacatagtaggcactaaataaatgtttgctggatttgaatctaaagcatgcttgatcagacctacatagaggcaattccttgaaaagctgcagagaatgacttgtaccatttgctgactttccaagatggcatttcttgctggggctccactgattattactgttgtacctgtgggcattgggctcatgaccccataggtgcgtgtgtgtacatgcacatgcattaagttgcaaagtcagtctaaatgacttgactatcaacctgtctttggcagccatatcacttttggcccagttggcaccatcaggtttctggacacagaggcagtattttccatccctgtcctacagagtgtatttgtctcaagtgttatgtacttttccagtttctttgcccccagtaaatctctagggtcatgaagatcattacaaaacagatagtcatttcatctctcttcttaaagcctctcacccattgccctaggaagaagaccccaaatccttggcattcaaagcctaggtggtcaatgatttgaccccctacccattgctctggctttatttcttgccactccagacttcactgtttacactcaagtaaaaccaaagtaattgcaattctctgtaaacactacgccattccatacctcaggtgactttgctcttgctatccttcctgcctggactaactatctcacatctccctgtcacacccaactcccaattctctccaccatgctggtccttctctctaacatggctaactctaccccacttyaagactcagctttatcagcccttgctatgagaagcctttgttgatcaccccaggaggakaaaggtgtccccttttgtgctctccatcaagagcatcacagaactaatgcatcatcttaatactattaatgtgtctgatgtgtcggagaggccccaaaggtttgaggaccatgtttgtcttgatcactgcacagtacctgacgcagctcattcccagtagggctgggactaatcttgcaggtcttcacagttgcaatcatttgttcagaggtggctcttccccagtctattacagaagcctcatgtctattcttggagagtcccaagaccatggcctctaaggttccagccttatcgtggtttggaggctccttcagttccttgtcatttgaatgcagaactggatgctgtgaatgagttctagaacatggttccatggggcagagttctgactttaaaaaagccatttactaaccaagctgcatggatttctcttttcccatttcatcaaggaagcaccccggctaggtgagctggttcatttcattcattgactcaacaaatatttactaagtgtctgccataggccagttactgttctaggcatgtaggagacagtagtgaggaagatrgatgaggtttctgtcctcagggacctgagatcgtagaggagggaagcaaacacagagccatttggagtggtaataagtgctgagaagggaagaaagggaatgtgggatgagggggctgcttagatgtgctgatcaagggaggaggtctctgagacaacagcatttgtattgtatggttctgaattgcaaaaaagagctgttcaaattgttatcagtggagggtgtccaggttcttggcatcttgaacaaagaattggacaaaatgcacaaacaaaggaaggaaagaatgaagcaacaaaagcagagatttattgaaaatgaaagcacacaccacaaggtgtgccttcacaagcagcaagcagctcaagggactggttacagaattgtctggggtttaaataccctttagagatttcccattggttacttggtgtatgccctatgtaatgaagtagtggctcatkattagtctgattggttgcaggaggggaccaatcagaggctgaagttacaaagctacaccctatgcaaacatctgattgtggaaagcaaccaatcagaggctgcagtgaagttacaaagttatacttctatgcaaatgaagatttggcccamrgccwamctgattggttgtgggaagggagcaatcagacataatttcaatttttcatctgccacacaagaaaagggtgggggatttgcaaagggagtagttctggtccttttgttactttggtgtggaaagttgaggttttccttttgattcagttctaggtagtcagcgtgaattggctttaggttccctgcctctagaccctattctcctgcctcaaaataaagagctatatagctgcactctccagccactggccacaagtagctattaaagtttgcatttacgtgtttttttttttttttttttttttttttttttctgagacagagtgtcactctgtcgcccaggctggagtgcagtgatgcgatctcagttcactgcaacctccgcctcccgggttcaagaaattctcctgtctcagcctcccaagtagctgggaatacagcttcaagccaccacgcccagctaatttttgtatttttagtagagctagggtttcaccttattgatcaggctggtctggaactcctgacctcaggtgatccacctgcgttggcctcccaaagtgctggcatttcaggcatgagccaccgcgccggcctacagtttgcatttaagttaactaaatacaatttaaaaaatcagatcctcagtcacactggccacatttcaagtagtcagtaaccagcctatggctaggagcaccataatgggcagtgcagagcaatrgggagaaagggcactggggaggcggatgggagaagcagtaagaaagggaaactagatcacttgttggagagcacatgtatgcatttcaaagaactgcctcctttaatttcacttgttgaaaatggggctgaagccaagactagttatgtctgatagaatgttttaaagtggaattaaaatgatctctagagataatataaagcaggtaaaaaccagccatgaaaagatctttattaaggaatatggcatggctacagcaagtcctgagatggagataagtactagttgattccaggggccagtggatgaggtcacagttaccccttggccttagaaggaggaagccagacatcctaactctgacaccaggagcatactttacctaaaatcttaaagacaggacaatgtttaaaaaaatcccttcttaacacaattcttaacaaaaataggattttgacttttgtgtcttaggaggctagaattgtattctcatgccattaccaggaacggctgtgccttgacttcattttgtatcgtgtttcacaagatgctcatccctttttgcacctgcctctttgctaaacaggttttcttcctctctgtaaaggtgcctttgtttgaaccaatagtgttacttctctttactgtaaacagtgtccagtgactcttccttatcgtggagagccagcagccttttacaggaggagaaaagtcttgaaggtcactttctgatgtttacattataagtcatcatgactttaaaagatgaaaactaaaacaacaacaacaaaaaaccacaactgcctactgcttacccagggcatgttatcctattacatttgaattcaagtaacagctagtatttgtcaaatcataattgatctgataaaatgtaatctgatcattagtagctgtgtaaacgtaaatacactcgactcctgtttcatttgcccttgaaggctgtaacatggttccaaagtgtacctttgaaccggagaagtcgggccggttcacattgcagcctgtgtgcttcctggggcagcgtccaccaggtgtgtgcgggcaggtacaggatgcgagctcagtcctgcttcccctgaaatyctgtgacctggcagagggctgtgttcctgtgtccttacatcggatgtcctactgaagaaagggaaactgggacgaagctgtaggcacagtgggttctgaagatcagatataactgagggaaagttaggtcatgattgccacctggatgctgttctctctcttcacggtaggtctcagttacttttaytgtggacttttgcttgctgcagagggaacttacacctttcatgcctcaagctcattaaggcacatttctcttttattcttcagggacattgcatttatgaactcaaggcattgagtcacccagagagaaaaagcatatcccaaacatttcagtttctgggagttctaaaaagctaatgttgtgttcccatggccaacatttctttaagagaggtaaagcagaataactctaggtctataaaaatgctgatctgcttcaagttctaaatttattgtgaattatttatttttccctagtaattactgtaataccttagtaccttcaacttatatagcatttttcaaggaggcaaagcatcagtagaaatgttctctgggatttttttacctgatgttttaatgctgtgatgatttctcagccccttagtaataatgttagatgcactgtggaaaaactaggcacgtagctgttaagctgggaatgtatgaacggtatacatgctatgctttaaaatctagctcaatttttttttttttgcattgaccttgaacatgctgacaacataggtcggcatgggtaaagctaaagaatggccttagggtttgaaaacaactacatgagctctgtttcagacctgctgctagtcgggcacttggcactttgcagggatttggggcaggttttatgtttgtgtgcttctcttagaagtcaaagagttggtgaggtaactgcaatcctgtctatatcagtgtagtgataatgcagtagtgtaatgaagaatggagctgcacgtrtgaggtttttcaagtccacaaagatcaggtattgtctacggtcaataaagatttttttaaaaaaccctcttaactaaagagaggtaacttccttttcaaaactctgaaatttacatgtgctgacttataatgtgtgtgatcctcgttgcttttctgatccttggtggttggggtgtgtgtgtgtgtgtgtctgtgtgatgggctttttaatctttgagatttattctttttttttttttttttttttgagacagagtcttgctctgtcgcccaggctggggtgcagtagcacgatctccgctcactgcaatctccacctcccgggttcatgccattctcctgcctcagcctcccgagtagctgggactataggcgcctgcctccacacccggctaattttttgtatttttagtaragatggggtttcaccgtgttagccaggatggtcttgatctcctgacctcatgatctgcccgccttggcctcccaaagtgccgggattacaggtgtgagccaccgcgcccagccaagatttatttattttttacttacacatagtgaaattcattctttttgctgtacatctctatgagtttagataaatgcttacagttgaggaaacatcaccacaatcaagataaagaacagttccatgatcccctaaatatattttgcttcaaatttctattggcatgtttgagtatcaagtttactaccacttctgaagatggagccaagcccttttgtaacaaatagcacagctgtgtctgacacttttcatgtgaaaggttgcctgagatgtcagaagtaagatctggccagttgcagtggctcatacctgtaatctcagcactttgtgaagccgaggcgggaggaccacctgaggtcaggagttcaagatcagcctggccaacatagtgaaactccgtatctactaaaaatacaaaaattagccaggtgtggtggtgcattcctgtagtcccagctacttgggaggctgaggcaggagaattacatgaacccgggaggtggaggctgtagtgagctgagattgtgccaccgcattccagtctgagtgacagagtgagactccgcctcaaaaaaaaagaagtaagatctgattgacttatccttttctcaaagttataaatgggaaaattgtacaatctgaatattgtttccttgtattttaattaatgaatgtagaactgtgtaatgtattatatgcttttttaaacccaaagaaatttgtaataaatactttagttagtaaaaagaatatactgaaagtgaaaaaagtcaattttttgcactttagatttttttttaagtgagcttagttctgtgtggttttaagggcagtgaaatgctgtagaaggactgtaatctgcataactcaaactggcttaataagtggaatttattggctaatatcactgaaaggtaaaggtacagggatagacttgaggcattgtgggatctagaaattcaaacgatgttatccgcctctctttccccactcagctgtgtttccctctgtgttggttctattctctagtagactcttgcttgctgtatcaaggtgactgacagcagcttccggcttttattctactttctcaattccgtacagttccaacaagtctcagaatggggtcwcatgggctctgattgcttctcctgctccttatgacccccagggatggggtgggggtgagcggcagtgctctgattggtcagacttaggtcacctgctcactcctagagctgaaggagtgagagctccccctagaccacggtgcagaatgaaggtagagagtggcagaagaggtggttctttaagggaaattgagggacatgtatgtcagatcaagaaaacacatgtcctctgcagggacgttcaggccatgtasccagttgttgtctttgtttttaaataatttttataaacacctaccctaggctaaccttccaaataagcaaaagtttcagaattgatagttgattgattgattgttttatggcttatgagatgacaactgtttactggatgtgagatgtaatattttgggaggaaaatagtggaaattgagtgactgcgggactcggctaagatgggtagatggggcaygaggagaactggtcctgtgtctgtcaagggatcaatgagtaaggaaaaatgggcttcaaggacaaaaagccaggagaaaagaaaaagaagataccagagattggcaattgaccaaaaatttagcaagattaccattgctgaaatagcagaaatattgtcttggatagaaatgctatcagggacatttaatgagaatttatgaagattcaaggctggcatagctactctaatcatgtgaagagtgattgcatctagaataaagcccagattcccaaacctgacatttgtgatctggggcccatctccctctccaggctcatctcccctgctgctgccttgcaccttacaacgagctgtttgtagtctggaaggcatcacactaccctgtttccttcactattcatgctctctcctctgcctggaatccctctcccgttgaccagactcatcttttaagactcagttcagatgacagtttctctgagaagcattctttgattatgcctctctggcttaagaattcctcttctatactctcgtgataccttgtgcgtctttcccagtggtctcaactgagggctgttttgtctccaaggggacatttggcaatgttgggatacatttttgattgtcatgacaggtgagcgctactagttggtggaagccagggatgctgcttaatatccttcatacagcacacaggacagccccaacaaagaggcacctggccccaaatgtcaatagcaccgctgttgagaaccctgcttaccattgcactggcaacattgttggatacatctgtttttagtcttatcttcaccactaggctgaggcccatgtgtgtgatctgcatctttgtatgtctaataccacaatgcaccactgtagggtagttcctcaggagagaatagtttaaagatgattgtatacattttcttaggatagtgaccaatgaacaaggcaactggaggccgtactcgtctttgcgctaggtagccttaaacttgaggctctctgtattagttagttctcacattgctatgaagaaatacctgaaactgggtaatttataaagacaagaggtttaactggctcatgattccacaggctgtataggaggcatggttctggtatccgctcagcttctggggaggtctcaggaaacttacaaacatgatggaaggcaaagggggagtgagcacttcatatagccagggcaggaagaaagggagtggggaggtgctacatacttttaaacaacaagatcttgtgagaactctattatcggaatagcaccacggggcgggggggcgggtaatctgcccccatgatccaatcacttctcaccaggccccacctccaacattggggattacaattcgacatgagatttgggtggagacacagatccaaaccatatcactcctttatcttgccatgcctttgtcttctcactcytctgcaaaaagagctttggggtttactgtagcaaataatggaaaacattaaagaagtattgttagcatagttcttttgctttcaatttttacctaagttattgtccaattttacattctgaatggtgaactgggtggcctggccacactatttggctgcctctggcaaaaacttctgccctcacttctgaccattacattttccccctaccgtatgtgtagtactctggattggtaacgtttgatgggaaagaaaacaaaatcagaaagcaacgattctgagagcaggaataaggaatgttaagtcccctttttgacggctgggctttttttcttatgccaagtttaagtgcaaagcagcagttcccttgtgccctgggacttttgcctaggaayaagggactgccagaaaacctcagaaaatccccatggagatgtctctgaaaaccatgtaaacagggacattgtctaagtgggtcatcctgaatatatgatgcaggatggaaacctatttagttattgaatatttcagattaagaggacaccgcagccttgctttgcacaatcttgctagctttgtgagtttcactggggattggaggggaggcccgccttcaacttgagctgcttgtgttttggtkggtggtaatgccttagaaacagaaaggagccagctccccttcagccactcaggcttctgcctgggtttccttttaaccctggaatttcatgtggaccctcagctatgaaaacagatcacatatggcctgctgtcaagcataagaattgcctttttgttcttggggaattgcacaaagcaagtaggagacggggaagaagaccgttctaagcaggaaaatatattgcattaattcttcccttccattgcctcctccccatcttgtgctatattctggtactaggacttttgcttttttctaggctgaatcacatttggccatagcagaggaaaagtgatagctgttaggggtcttggaaggagtattgagttcctagagtgggaccatcttggccaggccgcttcttgtcctcttttggggctgggactggtatgatgttgaagtagcccatctctaagtcttcccctcctccctgccagcttaattgtgcmacattgttcaatcaagtcactgaatcatcagccctgtgatatctacaagcgcatgcatgtgtctgagtgaagtgagctgggcagttccatgatacccttttctrtgtatggagggtgaggtgtttctccttggtttaccctgaccaatttattattactgttccaaaaaggaaactgcatgattaatrtcagaatcaggtccaaaggcctctggctctggtgatggctaatgtgatttggatctagattctgtttaataacctgccaaaggcacctagctctttctctttttttgctgttttttgtttgttttgatttttgtctttataagacagggtcttgctctgttgcccaggttggagtacagtagcaggttcatatgtcactgtagcttcaacctcctgggctcaagcgatccttccatctcagcctcccaagtagctgggactacaggaatgcaccattatgcctgaatttatttatttatttatttattaagatgggggtcttcccatgtttcccaggctggtcttaaactcctaggctcaagtgatcttcccacctcagcctcccaaaatgttgggatgacaggcatgagccatcacgcctggccttggctctttcttctgtccccttggtggggacgttggggtgacccatatgtggtacatggcaggtaatgttcttttcatactagccagtcttctgttgtgattccactgtgtgtaagatgtgtccaaaatgaggagatgcatccccgcacctagaggtgtacagtctagtggtctttctgctcttcctgcttttttctgggaaagagactttttgtggggggttgggsgggggtgagtccaggacagcaagttcatcataaatgcaaatgggaaggctattgatatttttattcatagcatgaatgatgtaataaatgagtcacgatgtcagcctcttttaacagaatcacagaattttctttttatttatttatttatttatttatttatttattattttttttattgatcattcttgggtgtttctcgcagagggggatttggcagggtcacaggacaatagtggagggaaggtcagcagataaacaagtgaacaaaggtctctggttttcctaggcagaggaccctgcggccttccgcagtgtttgtgtccctgggtacttgagattagggagtggtgatgactcttaaccagcatgctgccttcaagcgtctgtttaacaaagcacatcttgcaccgcccttaatccatttaaccctgagtggacacagcacatgtttcagagagcacagggttgggggtaaggtcacagatcaacaggatcccaaggcagaagaatttttcttagtacagaacaaaatgaaaagtctcccatgtctacctctttctacacagacatggcaaccatccgatttctcaatcttttccccacctttcccccctttctattccacaaaactgccattgtcatcatggcccgttctcaatgagctgttgggtacacctcccagacggggtggtggccgggcagagacgctcctcacatcccggacggggcgacagggcagaggcgctccccacatcttaggcgatgggtggccgggcagagacgctcctcacttcctagatgggatggcagccgggaagaggcgctcctcacttcctagatgggatggcggctgggcagagatgctcctcactttccagactgggcagccaggcagaggggctcctcacatcccagacgatgggcggccaggcagagacgctcctcacttcccagacggggtggcggccgggcagaggctgcaatctcggcactttgggaggccaaggcaggctgctgggaggtggatgttgtagcgagctgagatcatgccactgcactccagcctgggcaccattgagcactgagtgaaggagactccgtctgcaatcccggcacctcgggaggccaaggctggcggatcactcgtggtaaggagctggagaccagcccggccaacacagcgaaaccccgtctccacccaaaaaatacgaaaaccagtcaggcgtggcggcgcgtgcctgcaatcgcaggcactcggcaggctgaggcaggagaatcaggcagggaggttgcagtgagccgagatggcagcagtacagtccagcttcggctcggcatcagagggagacmgtggaaagaggggagaggggagaggggagagggaatcacagaattttcaaactggtttagcatgctggctctgcagccagactgcctgagctcraatgtcagttgacttttctgtaaaatgggataataatagtaccagtttcatagatttgcaggagatgtgagattacatgaattcacttataaaaagtgcrtgatacttaaagccatgttacctttaaacttccaatccattcattcatttattcaacaaaaactacatactgtgatggttgcacaagcctgtgaaaatactgaaaactaatgtattgtatactttaaaagggtgaattcaatggtatgtaaattaagtatatctcaatgaagctgttttaaaaaaattaattgattacctattatgtgctggacacagctcttttaaactgaggcctagagcaggtgacttgctcaaggtgagtgaatggcagagatagttctagaactcaagtcctctgacacatcagccaagctctttgcaaactgtcagggatccaaatgaagatcgcaatccagattggaaactaaagtcactttctgtcctggtatagaaccaaagtttaacttaagaaagaatcgtgacgtgacctaaggaccttggcattctacttcaccacctctctctgcaggtattctcatttccacgcacctccacattttcgaagacttcagacaaatatatcacaaataacctatataaattcactatatgaaaagcaggccaacatttccaccccatccttcctctttcccccagctctggatataaaacacatatttttcagttagattttttcagttaagtgattactttcaattcccctgtttttggcatttaaaaatgttcacttcttattgcaagacagggacagtctttaaagatttttctgctcaccaccactaccaaaaactaataacaaattttgtcytcatggggaagaaaatcttactcattcttgagatttcacagccatgtctaaagatctaggctatataagaagagaggaatgccttagaaatgtaatgctgtttttcctacggaatcaatttctgtagaaatagaaaccatggtgcatccagagttaccctgcagccttctgctcctggcagcttgctgtgtgttctctgccacatgctttcttctgggatttcttccttctactgacatctggtacttaggataagggaaaaggctttccctgaaccagtgaaattgctatcaggaaaaaatgactcaagtttccaggcagcyatgaatgaggtgtttttctgggcggtctgagcaactatctttyggaaggatacataagaaggtacaagctgccagcccatccatttccctaagatgaacttgaagcacgttttctttcagcagcccagacagcacaggcttttcctagcagatgggtggcattacctcactgacatttaatgaataggttgcccccagggggtggaattgtagcaaagtctattatgaaatctcatttgctttgcatgaatcagtttaggagtcccgagaaaacaaaatttgaaaaatgaaaagtggccacatagcttgccctgtaactgcttggacatggcaggtaataatcatagtcagtttgcgcttttatgatggagagggctttcaattgatttgtatttcttgtgagtaggaacaaagccagttgtaagtaccttttagctttgttccctcctttctcattttctaggactgtagcatctggggcatataattgagctctgagagccgagagctggagggggagggggtggtcagaggaaaattattcaattcacacatataacatgcatatatatatgtgtgtgtgtgtcttaaacatatatgcatatgtatgtgtgtctatatatatatatatatatatatatatatatatatatagaaacataaatattttatcaagttgagaatgggagaatagatttctttcagcaaacaacctcaagcctattatacatctgatttatgaagggtaagaaattcaaccttaacccaagcaaaggtttaaaaaggcagcatgggtattattgggcttaggaaaaggtgaaggctgccttgctgccgtcctggaagattgagacagtggtaacaacacgtgcagcaaccccctgcacttctagaaggaagctgatatctgtctacatgtttcagcgtttgtctctgaacctagtcttttcttggtcacataggggaagcaacagaggtggcttatcatagcaatgcaaaagcctttaatgaaaaatgggctcaggttttggttcctataagatggtgattcccttcccccacaaaggcctttgtgtacatggggtgaggtaggggtctgagaaaggccactggaaatggaaggcttaacggccagtcctctgctatgtcccagatggaaagctccttgtatctaagaaaggcaggaaaccatgtcacctggcttctgatatgtaacaaccccaaattattctccgaccccttgaaggccagctgggctcttttgcatcagggggattgtgtttagaatttgtgtcaactgtctttgtagagatccttctggataactactacaattcctgggatattcttacagtgggcacatgacaaagacatgtgacattggcccaaacccccctcaacttggaaaaggggtggattcccccagctgacttgaagattctggtctgtggattcagcaagagtctgaggcctctgctgagtgagccaagggtggcttccggggaggtgagtgcctggaggagaatgttcccagagccaagatgggatgcctcctggtatcaaagtgatgttcagattttttctggaaatctagaataggataaatgtgaatagagattagagtgaacatcttctaggatttgaagcccttgagagcttctaggatttgaagctcttggtcttgagaccaagcctctgcaatgcatctggggtccgttgcacaagtgtgtgtctttttaccaggtcttatccccgcttcagccttttctctcctgttagggatcaaaacttgccaaaacagaaattttaaaaagacacgcaggatgtggggctgctcctgggaggtttgctgtgtktgtttggggtcctgcaccctccactccactcctgagtgtccaagggtggatgtccagaaatttagccacctactcccatcagtgtagccagaacctttgctgggagttaatctctctccctcattactttctgatctgcttgaaagacaaatagaggttagggaaatatattaatatcagtaagtctccatggatggcccaggtcaaggcagacaaaggtagtcacacgctttcaggggctgaaagacaagtagaggttagggaaatgtatcagcgcatctccatggataacccaggccaaggcagacaaagaaagccacgtgctttcaggtgcaaacagcggccgccttttttcactggacatcattgggcagctgttgctgtcatttcccacggcctctctggaggggaaacacagctggcttctgtgggccagcctgaaaccatctgcagctgcttgcatgctttcaaatgtaagtaagggaatttcagctgaggttaatctgggaaatcctctgtatgaaacattttccttttcactgttccctttccttttggatataacatatgacccacttacgaggcagcctgttggatcactggtccccaaggagctgtggatgtcttcccagattactcctgccaccaccaatgcgtctaccaccatgagagctgctgctgatgggcactgcactgtgcatgttgcatatgtgatctcatttagcactgtgacactccaaggaccacactcttgtctcattttcggataaggaagctgaggctccaagaggtccagcagcttgtcttaacagtgaacaggtgcaaaaccaagatttgaaaccagtttttgatcttggtttgatcttgatgccacatcccagcctctttctacctctgtaggacggytttgtgtctcctctgcattttcagcctccattgctaatctgacaccatctaaagcaggaatatccttattaatggaatagtgcttaatgggattaggcttacttctgtattctagacaatatttactgagctgttagatgtaatgtgttcagaaataatacagggatttatgaatatgtattaaatattagagtataaactttatcaagcagagaatatatttgtcctccagtgttgttgaccttgtatgttttttgtttgtgttacctccagagctggattttgaaagattaagccaagaaaaaaagatgagacattcaaaagtaaataaattagtttaggcctggcttttctggggccatggagttgttatcccaaagtccttgcttggacctctcctcctctccactcctcccctcccctcccctccccattgggcactgccagggcccagtacaagtgaaacagatgctyaactcctagacttgtggaggcttaggtagaccagcaagtcactattaggacagaaaaacaagaccacgtcattccccagcccaatcccttatgctttctttcaatgacacttaaaatttaagacccaaacctacatgatctggccccatctgccttttcagacwcttcttcctcctcgagccccttaccccatcctagccaccgaagccagtgatgccacatcccagcctctttctgcctctgcaggacagttttgtgtgtgctctgcattttcagcttcaattgctaattgtcctctcttgtcctcacttctttcactcccatctcagggtttctgcatgctggttctcctgcctggaacagccttctacccaccctttgtgacttagttcacttcccagatttcagagggcagctcagctttcccttcctcatggaaacctcccctgacctccctgagtagcccaaactctcctattgtaggcactctcagagcgcttctcatagatgcaattttacgtttgttygtaattctgttttgttttttcacaacaataaattttgagagggcagctctatgcctagtctccaccctgtgtccccgatgcccagcacagtgcctgaagcacagtaggtattcagttgccttggtgaatgaatgaataaagccaagccaagcacagtactcagatctcaagctcatagtcactgcatagcttgtgctaaccttgcagcaagtgagacactaagcaagtgaacagcttacatttcttagtggtggtgttaaatttacaaggagagcatgtcacctctcacttcaagtttccacacttttaggccattcttagtgttaatagcctgtggaggactctttgaggagagaagaggggaattccaaagattcagcttgataaatccttcatctttgacctcatgtgtattctacttaggaattaaaacgtagagtatggctgctgctacaaatcttctttgcagtttttcctctggctgatttttctactttacctggaatttttatcctgaatttttgtccttttttgaatccatgtggcacacatacattgccctaccaggtttatttgtgtttgagatttgagatgctatctgaggccaagacctccagaattagatgggcctttgttcccagagcctctttgaacagagagaaattctttgctatgttggcaaaagatccttcatatctatctgtctttctttcttgttcagacttctcttttggccacgtgaacgtggatccacctgccccgtcttctggcctatgctgtgatccctggaacatttcaggtttgagtgtcagccacatcttctttaggaccagtcaagggtttgcctccaggaacagtggaatctattgagtgccccccagggagttccccatatgctggtttgtttgtcacttggccacacagttctactttttcctctttgtctgcaactgaacagcctaggaaacttacaagatttctgctttttttkgggggggcgggggggtaaggtatcgtattttgagttcaatctggtcgcaaactggattctgtccagatttttgttgggatttcagatgtttagccccaaacaaattgaaagttaaattgaaactggtccagatgaggtcatgcttaagatttctcccacagcacaaatcgtaccttactggaagctactgtaagggcagttcttgaatctctgcattcccaatacatactcatggtaaaaacagttaacagttaattcgcttgtgttccagtgacttgaaaaataagcattagcaccctggagacctcgtcttatcaagttctgaaggatggtttttatagctagtataaacccttagtttatcagcttcactggcctagaaacccctcagacctgaatatttgggatcagcagaatgggccaagcttaggaattccaagaaggcagactcaagatagagggctgccaaagctcacagatgtggaatgaaaccagtttcaaaacctgattcttcrctcagttggaatgtgttttaaaacctggactcacttgagatgtttgcacctggtaagaatgtttcaaaccttgaattctactttgtgtaattatctgtgaaacgtaatgatgatagctccaagctatctcataaagctgctgaagtcttcaaagcattcattctatcttcctggagttacagaaacacaaaatggtaacaggtgtgtcatatgcatccagagactacctcgaacttttctctctagaactcaagctccagacttgagatattagttaatagattgataaattgactcaggttaagtggtattatttcttagattatatagtgtcatcctacagagtaaccccattttacaggagaaacaaagttggccagaggacgaggctagaacccctttctagactgttaattcaggcagagctctgtatatgttttaatggttagttttctaaagagttttacctagaggccaaataaatcagaagctcaaacgcatatgttctctgtcttctttttagactggcttgcaagaaagcccttgggttactttttgccagaaaagagcatgcagagtgaacttgtgacataatacattccttgaagctcccacgttatagtttcctggtaacatagagttgtttatatkattgctacttaaaacttggttgctttgtagatcctacttgggaattgaattaacttcagtgaacttgatagaagctgcatctttctgtaaagttttgggcaggttttgtcactgacattaggtggtgatgattttaaaggactcccattacttatccaacatgtgcacgcatactgtatatatgtcattagaaataattaggagttaattttcaataaggtccatttggtggctacaaattaatccatttaaaacccctgatatttgaccctattaattatatcctgctgttcattggtgcttaacccacagagctaatgagatgcctaagtaccactatttttcattgctctttactgtagggaagtaggtctctctttttctttttaatgtgagtggacataaaatttatcagcaggcatatccacagaaaactgactttattacaagtatccttttagacttgcaagctccctcagctagttaattttgcgtttaagtctatgtgattttcattctaatgtcttttggaattaaatgtaatgttgtaagaaaagaagcgtcygaccaataaagcaaggcagtctaggctgttttwtatatatatacgcactttatcctgtctaatgtagtgctcctattttctttttcatattctttctgttagagccaaattcactactctgactttgcrtaatataaatacagatatccttactcattaagaggctgtgttgttttagaaattagtaagtggctacatctgcataattttgcattggtragagttggcttctttagcgaacatgattttgtatttttggagaggaaaaccttgggcccatcaggttagccttttctgagatggagactcaagtgggaccacccaggatggtcacagcttcaactcccacacaatgagaacttgtgactatagcctgggagagctgactatgcaggagacaagaaatcagagagttgggtccagaggtagctggcagaaagaagattctattaatattttaacctcagaagagcagcgtctaaatatgtgaaatgagtgctggcctagaggggaagggccatactcttaaccacctcaagctggtcttatcattgttgctgggggggatgtgtaaggctacaaccttcccttttaggtagagggaagagaggactcccttgtgggtgtgcacaaaggagtatgatgagaagagggtggtgatgggtgcttagcttgatgcttacattgtcccagtgcagctccatgattgcaggtaccttgagaggacccatgtgcagtaaggtgggaggttaggaaaagcagagaatgccagccagccatgagtggatttgagaggtctgaaggacaaaggcaatgttgctttgtatgggtgcacaaggggatatgtgcatttaaatccgtcaacagtccagaaattggattgccatttcagttcccaaacaaatggcttgtttattaaactaaaagcccctatctccattaggaaatattcaattccagcaattagccccagggtgaaagaggtctccctctctccagtctgtttttgctctgttcccaaacaatgctttgatgtgcaaggcactcctaatggaagataagtcatcaattagcccgatggaagrttaagctgaaaacagacttttcagggaagggattatcactgagctgttaatcactgattgacattatctattggggatatattcttatgggagacttactctccacccaggcagaaggtaacaaagatgcaaaaatattctagttgtttggtttttttaaaaaatgagttttagtgtcctatagcaccatagaataactgtagttaacaataatatacagtttcaaatagctggaagatgggcactgaatgttccccacacaaagaaatggcaaatgttcaagatgatgaatatgttaattgccctgatctgatcagtatgcattgtatgtacggaaacatcactatgtaccccataaatatgtacaagtaatatataataagtaaattttagaaataagagaaaagaaaaaatgtgagtttagaaataggatcttagatcaattgagtcggggtggagatgataatagttttctttctaaacaagtatcttttactttctttaagaattgttggtcataatatgattacattgctaatttatgaaataaaaagtaaggagaacctctaatttttttttagagtggggagacagtgtctcactctgttgcccaggcaggagtgcagttgtgccatctcagctcactgcaacttcctcctcccgggttcaagcgattctcctgcctcagcctcccgagtagctgggactgcaggtgtctgccaccatgcccagctaatttttgtatttttagtagagacgaggtttcaccatgttagccaggctggtcttgaactcctggcctcaggcaatctgcttgcctcggcctcccaaagtgctaaggattacaagcatgagccaccatgccctaccagaacctctatttttataagagtaagttgatatgaacaatattgtgaatgtaagcacagtgcacatgaggcaaatttgtaattctgtgcttgagttttacaagtgaaataagtttattttttaaactccaagtagtggcagatgagtgttaatttacctacaacttttcaggaaaatatcaattgcatacattaagctattttgctgttatttttttttttttgctttgtgccttttgtttttctttttttctttttttttttttttgagatggagttttgctcttgtctcccaggctggagtgcaatggcgcaatcttggctcactgcaacctctgcctcccgggttcaagtgattctgtctcatcctcctgagtagctgggattaaggtgcctgccaccacgcccagctaatttttgtattttttagtagagacaggttttcaccatgttggccaggctggtcctgaactcctgacctcaggtgatccacctgcctyggtctcccaaagtgctgggattacaggcgtgagccaccccgcctggctgccttttgtttttctagtacgctgatgagaccaaaaagaagatataataaaattaattgccaaaaatttagaaaatggaatagggtagttattctactaccctaatataatcaataactattgtactgcctaccactcttttttctcctgtttgctacaggggtgcaatccatttacctagattctgtttcctaattagcctcatagaatgtttcaaaaatcgtgacccatatagcttaatgagtacagagtttctgtctaaggggtgatgaaaaaatcttcaaaatagtggtaatggttacacaacattgtgaatataattaatgccactgcattgtacacttaaaatggttaaaatggcaaaatttaagttatatattgcacgacaataaaagaaagtgtatcaaaattatgcccctgcatttaaaaaaaaatttttttttggtagggggaagtaaaggattgacagatttcagagtctgtggtgctaggagaaaattttagggtggagttattctccatggggctcaaaacccaaaacttttcaatactattgaatattagcaataataagcttgtaattcaaagcagcagggtggtacgttgttaaaacttcagaaaccggtccggcgcggtggctcatgcctgtaatcccagcactttgggaggccgaggcaggtggatcacctgaggtcaggagttcgagaccaaccttaccgacatggagaaaccctgtctctactgaaaatagaaaattagctgggcatggtggcacatacctgtaatcccagctagtcagaaggctgaggcaggagaattgcttgaacccgggaagtggaggttgcggtgagccgagatctcgccattgtactccagcctgggcaacaagagggaatctttgtctccaaaaaaaaaaaaaaaaaaccagaaagaaagaaacatttaaaaaaaaaaaaaagaaaaacttcagaagccttctgaggttcagaggtcatgtttcggaggtcatgtttcagggtgcggtatttggagccytcccggaaacacaaaagcctccctggtgacattcttagcccctaggaagggcagtaatgacagcccacaactgacaagtactgatgaatagttcttgaaggcaaaccctgccctcagggagctctgccatagcttgrcatgtcttctaraactacgtgcaaggggtcgcagagcagctaattctgccgcggtatgggcagtcaccaggaaacttcaagggggagcaggtttaacctgaatccttgctgaaaatagatgaatttgcctgggagtgagagaggaaagggcatgcctatgtggaggtaccagcaaggggacagatacaggaaaagggtgccaggccccttaattccaggtttaggagtttcttttaaaaaaaaagttcagtctcaaaaaactaaaaatagaagtaccatatgacctagcaatcccacttctgggtatagatccaaaggaaatgagatcagtatgttggagagagggactggctggaggggagggggattggggagatattggtcaatggatataaaatttcaattatgcagcaggactaaattcaagagctctattgtacaacatggtgactatagttaataatgatgtattatatattgtacttgaaagttgctaagagggtagattttaagtgttctcctcacacatatgtgaggtaacatatagtaattagcttgatttagtcattccacaaagcatatgtatttcaaaatatcaagttgcataccataaatgtatacacttcttttttcttaatcagaataaataaatagtccgagggacatttattgagggcctagttgttgggcagcatcttaggcttcttttggtttctaaatggtgccctagtcagggcttggtgagtttcagatccccagaaaaagtctgttcttagctttgatgggggaaggaagacccagagcaaaccacagtggcactgctgatctagagcaccctttagggtggctgggggtcagattacagactggaccacactcctaactttctttacccctgagacctctggagtcctagatgtggacgtggtgtttatggtgcattcatgyttctgaactcttttttttttttttttttttttttgagatggagtctcactatcatccaacctggagtgcagtggtacgatcttggctcactgcaacctctgcctcccgggttcaagcgattctcctgcctcagcctcctgagtagctgggattacaggcacctgccaccatccctggctaatttttgtatttttagtagagtcagggtttcacaatgttggcaaggctagtctcaaactcccgccctcaaatgatccacctgccccagcctcccaaagtgctgggattacaggcgtgagccaccatgcctggcctatgctcctgaattcttaaatactccaaatgatgcgatccaggcttacaagagaggaaggagagttagatctatgaatctaattaggctaaatgttttaaacagctcttctctcaggatattgtttttgttcatatcccaattctgaaattcattagccttatagaaatttattaagcctgaattacagagtgaaatcaagaagcatttttttttccttttttcttttctttctttcttctttttttttttttttttttttttgagacggagtcttgctctgtcacccaggctggagtacagtggcaagattacggctcactgcagtctcaatggctcaggctccagtgatcctctgacctcagcctcgtgaatagctggggtcacaggcatgcaccaccaaacccgggtatttcttttaattatttgtagagatggggtctcattacgttgcctaggctggtcttgagctcctggcctcaagtaatcctcctgctttggcctcccaaagtgctggaaatataggcataagccactacacctggcctcaagaagtaatttttaaataatrtttttcataagaagttgagccatgttactgaaatgatgacatgctgaatggtgcattgcagcattgcatagtgaaattgaggggacttgactaagttgggagctggcaaaccccttgccaccaccacagcctttgcagataaagtctttgccttgctttcccatcccctaayggcaaaatgaattgctaagatgagaaaaaggaattttgcaccatctgcaccaattctgaggttttgcaagtgatcaccaatgtggagagtatggttcagggctacatgtttatttttatttttattttgcatccagcgtgctcagaaaaactaaaggaaaaaaaatggaaggatgaacattttaaaatacaacaaagctgcatcatcctccagtcaacgttttggttccagctgccttctagcattgcacagcttgagatgtttgttgcttgtgttcctgcagcattgaagcccccactcccacacccagcccctgtcatttcctgttttcagatccccaccttctgccctgcatgttggggaggggtccatggccagaacggaatggcagctctctgctattgtagratccctgctgttgtgctcgaacctgtatataagacaaacagtcattcttgggagtggccagacattatctagagaattccaaccactcagctgaagagaaagtcactcacctggagtatttagagaactccaggcatctttaagcaggtacaggtgggagacacagcccttgaagattaccatccgagatacagctaagagctcaaagtgaattcttagattcagtgagccatgacacatcatgtgttttggaagagcaaaaaggatgtcaagatgtgcttctttatagtgggctttggagagctggacaggccagggcttggctctcaactgtgcccctccttgttttgtgtctttgggcaaattacttaagctctgagcttcaatgtgttcatccacaaaatacggattagccctatttcacagagttgccatgaggatttattgagataatgtatgtaaatgtctacacattgtargtattcaattaataattgttaccatcatcatccatatcatctatatttcctgtcaaggaaactggcataccagctaagccagcaagcacatgcaaatagttctaggacccatttagagtatatgataaagtagaaaaagaatcttgaagccggtcttccttgttaagtttctagtcgagattgtcccagtttccacctttgtatctacaagaggcaagatagtggttaaaggccctgagacagattttcctccagttcaatcccagctttagcacttatggctggagcccttgggcaagtcacttaaaactctctgaaccttggtttcctgatatgtaaactacagctatcaagagtactracctcctacgcttgttttgaggaataaatgtaattatgcataaaaatcgcatggtctaatgcccagcatatcataaatgctcaacaaaggttatgagcacctcatcatcaactaaagttgctaatgcctttgaggactctcgggctctttgttccttctccagtttgacagggtacattaccattgccagctctgtgacaggctttgtaacctggcttctgtgtacaacagcatacatgtatgcttctgctccagctgggcagtcgataagcctgcagcctttgctggttgatatgcccttattccacaggtattctttgctgtttctgttttatctacaggtttttatttttgttgttgttgtttgtctttttgtttttgtttttgtttttttctttttttttttttgagayggaatctcactctgtcaccaggctggagtgcagtggtgcgatctcagctcactgcaacctccacctcccaggttcaagagattctcctgattcagcctcccgggtagctggaactacaggcgtgcaccaccatgcccagctaatttttgtaattttagtagagatggggtttcaccatgttgaccaggatggtctcgatttcttgaccttgtggaccttgtgatctgcccaacttggcctcccaaagtgagccactgcacctggacttttttttttttagacagagttttgctcttgttgcccaggctggagtgtagtggcacaatctcggctcactgcaacttctgcctcccggattcaagcaattctcctgcctcagcctcccaagtagctgggagtatgggattacaggcgcctgccaccacaacaggctaattttttgtatttttagtagagatgggttttcatcatgttggccaggctggtctcgaacttctgacctcaggtgatccacctgcctcggcctcccaaagtgctgggattacagacgtgagccaccatacccggccctgtctacaagttttaaaaagcatgaatatgttggggcaacccacctctgagaaggctcgaaaaatgctataattagcctgtggccagagtagagggcaacagtgaactacctggcattgaagtcctaccatgttcccattgtggggccagctgccttcacattctgtcctcttggaaatcctcataacagcctcagaaggtaggtgtattgatttcctagggcagctataacaaattctcacmaattacgtggttgaaaacaatagcaatttgttctctcacagttcaggagtcctgamgtctgaaattacagatggcagggttggttcmttctggaggctttgagggmgaatccgttccatgcctttctcctagcttctcgtggttgctagcaatgtgtaacatttcttgacttgtaaatgaatcattccaaattctgcctccagattcacatggagtttcctctgtgtgtatatctgcatgccctctctttcccttataaagacaccagtcactggatttggggcccactctcacccagtatgatctcatcttaacaaattatatccgcaaagatcctatttccaagtgttacattctgaggttccgggtggacatgaattttggggcggggcactatttgactcacttcagtacttattatacccatttaacagatgatgacccagagtctcagggaggagaaaatcccttgcataagcatcacacaatcagtttatgatacccaaggattcacaaaccctgacctgcttttctctagatttgtgtacttcccaccgtatcactttaccacatataaacaaacgtagaacaaagagtctaaaacctatggcagcaaaacggtcaacagcaggcagccctgggatcaaagagggtctctggagggtaaacaggatgaagcagaggctttgcaagcaaatggcgatcccttccttgtttctggttctcagacttcatcctgtttccataatcagtattacttattggctctcaaccatccggctgtgctcctgggattccacagtcgggcagagagattcttcataaatgagagaaggtagtagtcggtttcgtttgcattaagagaaggagcacatttctttgcacaaagtaaaataccctcccacgactccscactgctccccgtatccctgctggcttatgcttatcatgcatcccagtggtgaatggagaaattccatgctttccttctcctgcagaggttccttcctggcattcagagccgtaaaagcagtggacggaaacagctgaccagccctcagctgctcccagagtctggctgcctaaacttttcccagaggatggtccagcagtgctggtccagggtgggcttgggagagcagagctataggcaagagaggtgtgaatccatgtggtccccctggttctgggtaaaggccagggctggggcagaatcacagtcagaaccagggtcaggtcgtcagtgtcaagggcaaatatctttttctttaaaccacaagtgcacctctggtaccatgctcagaatcccttgtagagagtggcatccgtttgctgcatgagatgggagaaaaattagcggccctggctcgagtcttcattgccccttggctgcctgccgtgtcctatttctcatcaggccagtgtccccagtgcctgtcctgatccagaattaccacttaaccctagtggagcaggactctcagactgaccatctggactttcctcgagttctcttttcctgccagagtgtgtcagagtgaattggattagagttctgtttgctgcacagcctggcttcacatgaggctttgtgcttttgaagaaacttgagacaagactattcatgagttcccagagtgggtggcaattcacagtgatgctgatatccacgatcgtggggtggttctgtgcagggatctctaaaccttttagaaccttccaccagtttccctgcaatcaataggtrgctgattccatcagatcaaaccattttcctgttggaaagtggtaggtccttttgttaagtgttcttagaactcaccaatgatttcatcgaaaaagcatctctgatggtttttctttctcctctggcattgtgaacattgtcttggagaagtgaaggtttgccatgtaacacctgcctttgagcagggaagaacatggtgggtaaatctacgagagagacctgttctgttccctggactcagctcccatagagtccaccactgaccttagaccctcaggctccaccggatggataggaattgagtaacagaagggtaggaatcccatacataatcagtatggaatttgggattgcctaagtgcagagttacattctgttccaagccccagcattcactttaaacattaataagagatatggtgctttttgcctatggaagactagattgaacaaacccaaaatattatttttaaaactactcaaaattttaaaatactaaaagaaaaaatgggactcaaatttaatgagcccgtgtgtgcgtgtgtgtgtgcgtgtgygtgtgtgygcatgtgtgtgcgtgtgcgtgtgcgcgtgcacgcgcaccttgtaggtaggtgaggagattactagattgactctcctgtacatttaagttaaatggaacaaaaaaaaatgactrttgcttagaataatggataagccggcctcctattttttgttctctacttgactgatcagtccttgggaaattcttcaatgggattttcctatgacatattctgtctgtgacatagttcatgaaattctacgacatttgattcccaagggggaatctggttactcacagcgtgtttcacaacttttctgggaacaggcagctcttggaaggaaaatgtctatgtatagcagtgagccaataactcatcttcagtgaaaacggaaggtgatattgtcatacagctgtgtagagtgagagtactcctaaacagataataaattacagccagaaagcaaaacctcctcaagagatggccaagttttggtacacatttgttcactgtggctctatgaaagacctcactttttaatatgtggatggaaaatggagatcagaggtgctgtaaaacctaacaagtagatgagccctggccgtttaaaagtctaaatgtatttaaagcttgaatttgtaactttttaatttatgtatgatactctcaatccttgcttttccaattacaatactaatacatgctcagtcatatgcatctttgtttgtttttgttttgtttttgtttcttgtttgtttgccttttgagacagggtctcattctgttgcccagactggagtgcagtgatgtgatcacagctcactgcagcctcaacctcccaggctcatgtgttcctccggcctcagcctcccaagtagctgggactataggttcatgccaccatgcccggttcattttttaaaattattttttgtagagatggggtcccactatgttgcccaggctggtctcgaactcctgggctcaagttatcttcccacctcagcctccccaagtgctgggattacagacacgagccactgtaccctgccaataatccacatctctatgaaataaaaaccatggactccacttcagcttttcatcacmcctttagcactgagtttccccattcctattctccagggttaaccactgtctttgtctaatttctgctgctgaaagagtatacctgagtctgagtaatttataaagaatagagatttggttcttacatttctggaggctgtctcatcccatagaagaaggtcagagggcaaaagagcatacarcctgtgagagacaagagagagccagtcttactttgataatgaatccattcctgggttgaccattcgtgaggtcagagccctcatgaccttatcgcctcttcaaggtcccatctctcaacactgttgtatttgggattaagtttccaacacatgaatttttgggagacacattgaaaccacagcagccacagataagctatatatatatakakakagagagagagagaactatagagagagggcaaactatgtatatagaataaagtgtrtatatatagtgtaagatacwtatatatatatgtcgttttgtgtgtgtgtgtgtgtgtgtgtgtgtgtgtgtgtgtatgtagttctacttccaagaatttctactacagccatggaggcacatgtagaaaatgatctatattcaaggatctccaatgccacaatgtttgcaacaataaaagactagaaataacctaaattaatagggaactgatctttttataaaatggaatatatattatatatatatattccatgtatatatacagaaatatacacacacacacacaaattatatccttattttattatttaatttaattttkgtttttgagatggagtcttgcctatcacccaggctggagtgcagtagcacaatctcggctcactgcaacctctacctcccaggttcaagtgattctcctgcctctgcctcctaagtagctgggactacaggagcccaccaccacgcccggctaattttttgtatttttagtagagacaggatttcgcaacgttggccaggctggtctcaagctcctgtccttaagtgatctgctcgcctcggcctcccaaagtgctgggattacaggtatcagccactgctcccagccttcttgacttgtagagagtgaatttatctcctccaggtgcctaatcacccatcaggagtgccatatttccttttagtgctttcccacctgtctctctgtattttttaaatgcttacttccttttttcagaagttaatatatgcacatattctaacattggaaaggtgtagaaaagaacacagtgaatagaagcttacctacacctgatgtccagtgactcccttccccattccagagaaaatctctgtgatcggtttcttatgtgtccttccagggatagcttatgaatatgcaaatatagatacacacatacctacatatatacaaataaaaatatgtacatataagattattcatattcatgtttgttaacatcaaaggtaacgtgctctttataaaatgttccatagcatttattagtagattttgaagattgctacatataaattatcatagagctgggagttcttctgttcttttaaagttgtatgatattccatttaatgaaaacatcaggccaggcacagtggttcacgcctgtaatcccagcactttgggaggccgaagtgggcaaatcatgaggtcaagagatcgagaccatcctggccaacatggtaaaaatccgtctctactaaaaatacaaaaattagctgggtgtggtggtgggcgcctgtaggcccagctgctcgggaggctgaagcaggagatttgcttgaacccgggaggcagaggttgcagtgagtcaagatcatgccactgcactccagcctggtgacagagcgagactccatctcaaaaaaaaaaaaaaaaaaagaaaagaaaaagaagataacagttccctattaatttaggttatttctagtcttttattattgcaaagattgcggcattggagatccttgtgtatagatcattttctacgtgtgcttctatggttgtagtataaattcttggaagtataaccactgggtcaaaagcattgtgtattttaaagtggggtccacrttgccaaattgccatccaactttatggagttggatgagggtacctctctcattacatgctgataactaatatataggtggaaaacttgtagtttttgtgtttcttttttataaatgggattgagagtcattctgtatgtctaagaatagtttatatttctttttgtgaaccgtctatccatatcttttgtctagttttatgtttgggttgttgaccttttttatcgattgcaagggtcctttatattttaacaccatcaagccattataataacgtgagttgtgaatattttcctagtttatttctatttgagccaccattggttgaatcattttaccgtatggcaagccctgtggtgagcatgtcatgttttacaactgctccctaagttagcagtggtattatgccattttacagagaagggccccaggtctgtcggatgccaaagttgattcttaacttgaactctacaccccttttgcacatacctatttatatagcatcatttcaggttgtcatgcaattatgataaatatccttttcacaggttgcatagcattctattagttatacaaatcaaaattttcagatgctgatacttagactacacattttcatcacctataggttttcactgttataaataagattgtgatacatttcttctaaaactctgtcctccccaatgcaacaagatggtgccattgctcctgcaggagatgagataccatgcctgaggcagacagcagagtcatcttttgagtctaagatccttgacaagggaactcaacagattcggggtagaaatggggtgcatgtcaggggatggggacattttattggcctgctagacttctcagtgcctttcccttaaatgtcaccagtagcttcacctggttctggaatgaaatacaacacacattagggcttcagaccctcttctctctgaaagcctgccctttgtttttgagacagagtctygctctgttgcccaggctggagtgcagtggtgcgatctcggctcactgcaacctcygcctcctggattcaagygattctcctgccctcagcctcccgagtagctgggattacaggcatgtgccactacacccggctaatttttgtatttttkagtagagacaaggtttcaccatgttggccaggctggtcttgaactcctgacctcaggtgatttgcctggcttggcctcccaaagtgccgggattacaggcatragccactgcgcccgggccaaaagcctgctttttgatcagcaatattggagacagttgtaggaaacactgaaagactgcaggatgcagtggggagggcgaaggccgggagttgacaactatttttttttttataaaatagtatttcaaataatatttctaacaggaataaatgagatcatagtgcatgacatagctgaggggtccatatgtttgtatgttcttgtggattcttctcaaccctctgctctgtagctttctatgccctgagcaccagagaagcattaccaggtctgggtgttctttaagcctttctaaagagagttgctgtttctgtttgccttttctcatcattttccccttaataaattaagggctaagtgtgtcttagtttcccacactttactccaatcagggattcctttgggtaaacaaactcctgtcttaaattgtaagtattcccatctgattcacatgtaagggcaaattgttttaaagacctggctccatgctgagatgtagggtcttttggtgacggggcttggaggaggaacctacctgaaaggtaaggagggagaggacaagactgggcatgtgaggaggaagggcggttgtgaggcccaggcttccttctctgtgtgccttgaattgggccttggagcagcttgaaaagctgccccagcttcgctaagcaccaggaagcagggaggggaaccttcctagtgccaccctttcccctgcacctgctactttgcaattccaggcaatgggctggctcttaactgtgtttgaagccagcctctctaccctgaggacctcattccttcctgaccccttcaaacctgtttttggaactttctgtcacactaaggtgactggtgactgtcacaaatgggaaagttacatttagcagaataaaatccttccgttaaagagataaagttctgacaaggggattgtctacaagctgcgcctccttctaggaactcttaaaatccctctcagcaaaagtatcacctggtttccaaggcagctgctgctcctatcctctcacaggctttcttgagactctgcccactcaaaatgagttcacctttgcccaaagttcatgctaaaagcacagaacttacagagattaggagaagtgaattgtgagggtttatgtacctgggatctcattttaccgaccagaaaactaagacctagaagagaaatgaggccttcccaaagctcctagcagctggcctacgctttcaaagtcgtctcttgctgccttacattacagacacttcttaaggttttttcttttttgatcatggctcactgtagccttgacctcccaggctcaagttcctcctgcctcagcctcccaagtagctgtactataggtgcatgccaccgaacctggctacttttcaaattttgtagagacaaggtctcactacgttgcccaggctggtctcaaactcctggacccaagtgatcgattctcccgcttcagcctcccagcactgggattttacaggtgtgagccactggtcctggccttcagatttttttcttttatttgcattagcccaaacgcttcttgggtctgctccttcctgagctgcctggtgcggcttctatgagcactgctgcattttggggattcatggcttctagccagagctctgttcctaaccagcgggatgaccctagggggtaggtggctgccattggctggggtctgcccctctgcagagtgcatgataatccccactttgccattaatgggaggattaaatagaaggtatagaagggtatgtggcacagacaaggcacacagtaggagcaccatagatattggctgcgtgatgatcataatggtatcaattgtctttaaaccccagtggctagactttcataaattgaagtttacttcccagtcaaccaggaccaagtttcaaaatggcttcttttcccccagggcaaggcaccctcagaaactaacgaaatcaggttacggcaaaacagtgcaaatttattttcagaaaacccaccccaagctcagagtctacacttaaagggtgtagaggtgtgagctgcagctagacgttacctgctggattctactctggtcatttctctccagagactccactgtcatcaagtgtgggatggctctgtttatgcttttgcagcctcagcctagcttgctggtttttcatgtctccctctgcctctgagtataatccacttttctggagtacctaactgtgactttgccatagagtatttatctaacctcaaccctatttttgcagcttgggttgaggggagactcaggcaactgtgtgaatgtgtgtgtttttgtgtgcatgcacaaatacaaatgcatgggtgtgtatgtgtgagtatatagattagtttgttagggttgccatgacaaggtatcacacattggtggggggaggcttaaacaacagaaatttatagtcttacagttgggaggctagaagcacaaaatcctcagcagagttggttcctttggagggctgtgagggaaggatctgttccaggcccctctccttggcttataagtagttgtgttccctctatgcacatctctgtgtctacatttcctcttattctaaagaccctagtcatactggattagggcccaccctggtgacctcacttaaatgtgattacctctgtaaagactgatctccaaataaggtcacattctgaggtccttggtgttaggagttcaacataagaacttgtggagatgactcaagtcaacacacaacagtgtgcctgtgtgtgggtggagcatatgtgtgtttgtgtgtgtagtggactctggcgtctctgagacaccaggtcatttgcaaacctactccttggaaaatagtactttaagagcacatacagttgtctcttgtgaatagggcagatttaaaacctttttctaaaacaaatcttcccatgggtgtggaggggcaggtgtggtaatggagtgggtcccgggtgcccctcttgcatcgctggtcgagggcacttcataatggaaagtccttccctggttcttcattctcaagcagagcaatgccattggcatgtgatttctgcctcattttacttcagatgactaagtagcatcttgaagtgcctttggctacacaacagaacattccaattattccacagggcagcataaattcggagttcccttggagctccctggtgacttgataccaccaagtcagtcattgaggaactccccaatatttctaaataaatttggaaaatgtttttagcatatggaaaatgttgtttagatgctgtaaatagttgtaaagtctacttttagcctccttttcaaaagagccttcctgggctccatctactctgattatcccttccttgactcgtgtgcttgggagggtcccaggaggactgctatgctggctggtgtgcagaccacaggtgaaccctgttgcatctttcagctgctcaccaggacaaactgctctaaaactgaccccaaatgagctggccccacagaaccatgtgtagcgtttgtcatctttcccccagtttactgtaaatctcagttctctttgacctctaaaatcttactgaaaaagtgagtacttcatggtactgaactgacctggaattctgactgactttctagttctgcccgtaagttatgccctaaattttccaggtcaatgtagagttccagggaacgaggtggacggaatctggaggcagagttgagccagtgggtgttatcaggcagggggcactgataaacacgccaactccctgttagacttagtgtagtgctgggggccctattctgaggtgacactgatgtctctactcaaggcaaatgcacatctgttttcttgatggcagaggactgttgttagccatgggatggtgcagccacttcctccagatattccttgaaattagagcactcatctcagacttcagatgcatctgtccactttggcatggactataatgtagccacttaaaacatatcttacaagggccattaaataacataaaaagtgcttgtgaaatgatatgagtaaaaaaaaagttggcacagaattgcatttactgtctggtctcaatgatattaaatatgtatttctgagaagatgacaatggaatgaaataaaatattaactttttttctgattggaggggtaatgaatattttttattttctaaatgttctgtggtgagcatttgttatcacacacagacacacgcacacatgcacataccacatgcatgtacacacgcacaagcacacaccacaggctgtcctgaaaagtctgtctaactggagatttctccagggtctttcagattttttgctgcctcaatacccctgggatatcaattccctgcttgtcccagggcccacctctgaattgccgagaagacagtggtagctgattcacatcaatgctaactgattcacctcaacgccgccagctcctgcctccctgctcagccttgagcgtgacaggagcaggccgggcctgctctggctgggaatgccgctgccctccagctccggccagccagggaggggccaggcctctccgaaggaggttaaagtccttctttgtgtgaatggccttttagggagcagagggagggcccacggtgacatcacagtcttccgtcaggaggctcaggaggaatttgtccagcttgagccagggtgcacgcaggaatctgtctggaaaaaggcagttctcactgaggaggtttgaggcgcgcgctctgggcagggtaagccaagtctgctgacttatcttcgtgtccttttctttctaatttgaaaggacaggggtctttttttgaggccagtgtctttatggaggaggttttctgagtgtgtcatgtgctgtggagtcctttcttgctggagagtaggcagccgagctcagactggtgtcttgcttctctctctcttttttttttttttgcaaatcttgtaaaactctcagcttttgtgctaagaggcaaagaggacgctcagtcctgcacatatagtgcaaagctatatgagtcgtctgtggcagatcacgctttgaagatggtgcaagtgtgtctgtgagaatctgtgtgcccttttccagaacaaaaccaagtgactcggtgattctgkcgcctcgtttcttagccatctagcatttgttcaagagactcagtcttgtggtctacagctagccttctgtttccatgctgtggaactcaccacattcacagggtggcctgggggaatatggttttggggggaatgtgtggtgcttgtctcttggaggtcccatgggtatggaaggagaccctcgccagctttgttcataggcacagaatcatctgtagacagagggttaaccacaaatgcatctggcactgttttctcttttcttggggctctgcctcaatatagtggattctgctggtccacagtggtgtttggcttttgatctctgccatgacctgctcaccaggcgtgaacccaagatctggaactatttttaaaccaagagggacacagcaaatttataaagaactgaaaaactaggcttgcttttgtctttagcagaatcggttaccctagaaatctcaccttgcaggagccagagttccctctgtggccttgagcttggtttattctggggtagggactaccttgcaaaataatctccagtgaaaagggcctttggtgagaagagcctccgagggctccttgatagggcgctcagtatccctcattgaggaaaacatgaaactcacatctctccttattcacgggaaacccggaagcctctcagtcactcctgtaagaagtgggtctccaagtaacggaaagaaacaaccctttcatcagctgctgcagaaaaggcaacagcagcttccttcctttcctcccctccccgctgctgacccccaccacacacactgtcttcagtttctttcacagaaagcccaagctgtaaatatattcatcaaataacaccttaacattttccagatgtgattggagccactgacttttcagcagggctaagaggaggattgttcataggctaagctatggtgctgggggagactccgttctatgagaaattgaccagtctccttcactaggaatgtgggtcaagacacagggaagccttgtttccagtgaaggggtggggagttccagaagtattttcatcccrtcttcagacctgtacctgaggcataagacagagagaatagcagaacagtgattactcttttgaccaataccgtagaagctctcagaaaaaaaggctggacctgcaggagcaggaacaggactcctggcctccaaagggttgagttttctttttagaactgccctagtcacattgagctgtaatggcttcatggcaggagatccatggaggcaaaccaagaagtgtttttagtatctgccccttttaaggcccacagcattgacccgagcctgccgggtccaaatttagcctgcgtttgccccaggagtgcttgaggtctggagtctggccggctgtcttccatcagccaggaggggaggctctagcctctttagggagtggcttagttcccagtttcccacaatcaacacgggcccctagttccacaggccggaagaagctctgctcgggggatggaagaggaaagcctgcacaggactggaatgtggcccaggttatcacccggggcctctcctctcctccacttcccgcttataggctcggcttagaggcccaagtctaaccctcgcagcaagcagttcccagactttcctgctgtcagtgccttcaggggagggtggaacggcccactcggagtcccagctccttctccttcctgtcgtcgttagcagggagggccagaggaggtgcagccagcctgcttagaaactttggtgcaccgcgctttcttcaattctttttgcccggcacagtttgcgccgttgaagagggctggaagtttatttccagctattgctgcagcacttccttctcctagtgctgttcgttcttcttatgggaactggtactcactccctccaagtctgtgagcgtcttgctggggatggcggatcaccttggagctctgaggacctcgcacggcccaggctgagagcatatagctctgcagggtcccaggatatgcttatggatccaaggtagtgttgacctsttcaacttctgttcccttccttatgcttcgggttccctcggtttggggagttagcctcccccagacctcctgactgcagctttgcctggtttgtccaaagctgatgaggttcagctgatgtgggcatcttttaggtttctgggcatcatccaccagccaggtgcacttccttccatcccaccctcaccccttctgcatttgccttcatgctggagacatcctgacttagccagaaagttaaaaatttaggaagaasctctctaaagatagccacacatagctcgtggaaccagttcttcatcatgattgtcattgcgtcctgcgcactgaaaacgtgacttacaaaagagaggcaggatgagaagggaaaacggagatactctctgatttcacagctatgaggaagttttgttttatagccatgcctctgttcctaggccaagagtgagtttatatttttggtggaacttataaataactggattaaaggatcgggtcacctattatctggagaaaagcatttctaatttaaatgtcatggctttagtaggaagtaatctgggttattcaaagcagagaaacctggttgtacagcctgatgtttgagtaatttggttcacactgtgcatttaggctaggagcctaggaggtcgagatgggttaggcacactgtcgagctttaacagcctgaggatggtggggcagaggggaggctgtgaacacagtgaacattgtccttgtggtgaaggacacctttctgctctccgcctgggctcaggcagacctgctaaggaaaatgcacttccttaaagttatttctgtccatgacatgcctagctgtaggcctaggtaccctgggcagaaagaacacatgggtgtctatgcccagtggggcagggatcagggccctgctgttgtgttttctgtgcaaatgtaaacaggcttctagaatctcacttgtggtgttggtgaagagttgcagccttttcccacagtgtccatcataatgacatggacatgggatcttaatattttacctctggcaagtggccagaggaaacagaaccccttcagagaccagcccagagggtgaaatccccagaccgtgcaagaagtcacatttctagctgacacgtagagcaacagatacgtctccagagagttaactctccagggagttcatctatttctgaccaagactgaataaagaaggtaaagggatcatcgacttttaaagctaaattgtgagtctcacatcatctgtagagattcaagcaagcaaaagatcaaccaaaaagccaagctaactctgttttgatccatccactcttcttaccatttcccatgtcattttaaaagcctcctaatattgagactccattttgatrtatcaggatagaatgagaagaacccaccttcaaatcctggctagggcacttactagrcaggtgatcttgggaaacgtccctctatttctctatacctcttattctgaagttttaagactgaaataaaattcatgcctttcccacttaacagagggccakttttcaagcatcagctgacatatgtatgtgcatgtactgtgaaatgataagctattagrcatgtgtcaaccagaaaatggggatgccacacttacagcatgcccacaggacaggcttgtcagggctgtctcattcacttgtacatttacttggctagttgagttgtggagatggaccaggttctgttttaaccaatgtgtgacccctcctctgcttcccatgtgactggagccccaggtctgggtggttcttgactgctcattctacttactgcatttcaggacttaacttttaaggacattttgtgaaattactccctctgttgcagcacaactgtatcttcctagtcgtgttcagcttcaactaaaattcacatgtaaggatctggggttggggaaagattagggagattagagctgccatagattctgactttgagtctttcccgggccttttttctttcatcttttcttcttgatttcttttcttctaaaaatctcctgctcttttcccaaaagaaaatcagtctgctgccagaaagaatataatacctgtcatttaaacctcagtgtaaaatggcttaataatagtgaacatttgcattaaccgttttacagtttacatagtacttttaagtacattttctaacttaattctcaaaacagatttgggagatattattagtcctgcttatgaaggagttctgttctcagcagaattccataattacaaaaagtctggtaggacttttataggtagagccaagaaatgaccccagactctggtctttggacgctaaactctgaattaccacatttcctgcattctttaggtggagacataggcacctgtgttgtaaattaagccacgctaatttgctttgcaaaactattaaacactttttggtaaataaaggcgactttagttgcagcctggctaccaggttatgttaaacacaggtctctgggaccaaattctggcactcatacagacttgwgttgaataaacatttataaaaaatgctatgaggaaatctcagctccctaaatttctagatgctccaaccccaccttgcctgaagacagatgtggcaactttatgaagacaggattctgttaccattttagtgggtggtaagcaaccgaagtcccctgagccaaaggctagaaacaagatcgtttagttttcaaacctcaaacaccatccctaagggtgtataaaccaaagggttcgctctattggcatatcccctttatgaaagggtgaggaagatctctaatccacaaatttgaacaccaccaatttcacggatttctaacattcattatgctaattgacaggccactaatttcactaatgaaaacctatttctcaccttaattatgccaattagcaaagcttcaggggttcttgggagttaaagggagctaagtactggaggaagccacctgtggggcgtgggatctctcattggatcctagatgaccatcccttgagtttatattcccatttaggatggttgtcagaccctggaatgtaatttaaactaattccagaagcacacagctgtattaaattgccccgatcaagtatgtgaaagtaaatggtaggcatcctaaccagctgttaactattctagaatttagtgggaagggcaggtttctgtgtcgtggtattagggctctacctggagggtgaactgggccgatctaaaaagctcccacagcccctttgcaccytagtttttctctgaccttagaaaacccagtttgatgattctttcatatcctcctgtttttgcattggggcatagttcatttcaaaaaggactttcctggtgattgaatgaatgtgcatcttatctgaatctggaatcackttygcctaatttgaagcatggagaaaattctggaccttcttatcttcaaagagagcaataagcatttgttggtttaaacaagacatcatctgatgataccaagcccagattcctgccyaatccggataggttagatttccagcccatttccatttacctggtgtagttgccagtggctttgattctatcaggccatcatgcatgaaggcaaattcttactgctgacagtggaactcaggaattcgctcttttgttatcattgttgtctaactttacaaaacctcaggacctctggtgcatgattgtgaatcagtaattcagagttgtttatctctttaaatacttccatgccaattagaggttaaacctgctgcttcctgagtagatggaattgagtgtcatgaagaattttctgaatttatggggaaagggggactggatgccatatagctcacaagaaggagggcctctttcctgtttacaccctccagtgtctagaggtttaaaaaaatgtatcggaaaggaatcatcccaaattacactggaacccccaaactttgacttttaacaagtaactagcgtgtgtgtgtgtgtgtgtgtgtgtgtgtgtgtgtgtgtgtgtgatggagtttcactcttattgaccaggctggagtgccgtggcatgatctcggctcactgcaacttcctcctcccaggttcaagcaattctcctgcctcggcctctcaagcagctgggattacagaggcacctgccaccacgcctggctaattttttgtattttcagtagagatggggtttcaccatgttggccaggctggtgtcgaactcctgacctcacctcaggtgatctgcctgccttagcctcccaaagtgctgggattacaggggtgagccaccgtgcgggcttcttttttttttttctttttgakaccaagcctcacttcctcacccaggctggaatgctccaacttctgctctccgggttcaagagattctcttgccaaatagctaggattacaggtgtacaccaccatgcctggccaacttttgtatttttagtggagacagggtttcaccatgttggtcaggctggtctcaaactcctgacctcaagtgatccacccacattggcctcccaaaatgttgggattacaggcgtgagccaccacacccagccttttttgagacagtctcacttcctcacccagactggaatgcagtggcactatcttggctcacagcaacctccgctctccaggttgaagcgattctcatgccaagtagctgggattacaggtgtacaccaaccaccatgcctggctaacttttgtatgtttagtggagaggaggtttcaccatgttgatcaggctgttctcaaactcctgacctcaagtgatccacccaccttggcctctcaaagtgctgggattacaggcatgagctattattgcaccctgccaactaactagcatattttaaaatctcagtttgaccgatcacagaagacataactacttgtaaaataatttctgattcaaagataatggcagttttgtattttttttcaaacaattgcaaaagtatattgtcaaattgttgtcttagattttaaatatttggtaccaaaacaactatttctagttcaaaaagggtgccttggaaagagctgatacaatttttgaatcctaaaaagaaaacgtggaaagtcatctgctcattcatcatcgagcacttgaagtgtgaaacattcaacagaaagggataatgctgatgtgaggagcggaaaagtgttcttgggaaatggctttggagataagccccatcactccttcctctgtgattagcaacaagagacaaagagaagcaatttcttcacttgcctgattcagactaagaaaactctaatatagacttagggctttcttggaagtacagagaactcattttttttttaaagggtgttgtcttctggagcttattgttgctgctaatttcattatgaccctgcagaataacctcccctcatgtttaatgaacggattaattaattaaactatagaactaattatttgccttttagtttcctttactattacgttgcccttcttcctctcctcaggtattctaaagcatcttgtgtttcaggagagcagtgttttctaaccatatttcagtcctaccagcttcctactgatttcccactaccctccgcccaccccggcccccaagccaaaaaggatagaaggagagctctgttgttcccatgcagaatattagcagtgagtcattggccaaaagaagccaggggtgagggtgccataggtaatctgactcatcttagcagtaccgtgaatctctctttgtttgtcttcttatttcaataataattttccatggagtgggctaattttggcctaggtttacttgaaattgaatggcagccagtaagtttcagcattcaaattttgtgtaatgcttaatgatatatgagtagaagttactgacaatgtctcatccaacaaaaagtttagttaatagttttaaaagggctggccatgcagggtggctcatgcctgtaatcccagcactctgggaggccaaggctggactgcttgagtccaggagtttgagaccagcctgggcaacatagcgagactctatctctacaaaaaattttaaaaattagccaggcatggtaatgcccacctgtagtcctaagggagactgaggcaggaggatcccatgagctcaggagttcaaggttgcagtgagctatgatcacatcactgtgctccagcctgggcaacagagcaagagcctgtctcttaaaaaaaaaaaggaaggtggtggcaaaaactrctatttaatgatggtcaaaaataaaaaataaagatattagcaattataaatattaattgtgttaagtatcactcyttaacaaagaccagacctagactggaagaaaatcagagaatggaagatgttgacaaaagaggaacactcattatttgtgcctgttaatggagaagacatatacattacttgaataatttaagtctgaaaggaaatgtggaaagtgaagagtgaaggaaaccccccagttcatggataactcagagagtttttcaacattctgacagcagtgtagagcacttacgatgaactccagtgttttcttaggtctcaagaacaaatccataattatccacttttttgggaaggattttgaaattaatttcctgagaatcgtcctaaggtggtgttttaatattctaagcatttaaaattgttgaaaccttagataaatgaaaattacactctcttgcaattttgcattgtcctatgtcaataataccaggcacattataaacttgagacagggaaacaaagccaacctaggtgttgtaaggtccttgatggtaactcaaattaagtttatactttactggaattctttgagataagccagagtcctttgatatgaaaaagaaaatcatcttataatttgaaaattaatgtttctaatgccaaataacaaaattacataggctagataactggtagaaaaataagatggatgggttgggtgtggtggctcatgtctgtaatcccagcacttcgggaggctgaggcgggcagattacttgagtacaggagttcaagaccagcctgggagacatggaggaactctgtctctacaaaaaaaaaaaaatatataaatatatatatatatataaatcagccaggggtgatggcacacaccggtagtcccaggaggtagaggttgcaatgagccgagatggcacactgcactccagcctgggccacagagcaaaatcccatctcaaaaaaaaaaaaaaaaaaaaaaaaaagccctcaagacaaaaaacctccttccttaaaaaaaaaaaaaaaagaaaaatatgatgggttttaaaacattaagaagatagggttttcttattgaatcacaaactgaagatatcacatataaagcagttaaaaaactggaggagaggtaccattggccattagtttttcaaagcagtgctgacttcttaactaaagagtattattttgatgcaatcccagaaaacagagctgtgcagtcagtggctttggtgatggtgttcataaggcacatggtcaattacagccatggcagtgaggcactgtagcctgtgtgctgccattaaagggatctactgttttccagtattttattctgcaaagattttccaaaaagtttcttgtctccagaataactgcattacatctggcagagagtcatatgttttaaagatctgttcatacaaaaggaccttctttttgcaatcctattaatagtcgtattgcacagcctgcaatcatttgccgcaaaatacttgggaagactctggtacaataatgatgtaatctcttccaccttagtagataaaatttaaaaatggcactagcatgtaaacaaaatggaatccataaattagagaggattgggcacctgttactacaagaaaatgaacatttaagggattattagaaaatatctattcaaaagaatttgtcactgtggtttccattttccttcctcttarttatgagtcagtttgtcagcattcacatccataagagatgcagtatttaaccctgacttttgtttactctttattccagaagcctccccagctttctgaggatgatatctggctaaaaagcgagggagacaactatagtgccaccctcctggagcctgctgccagctctctttccccagatcacaaaaacatggaaattgaggtgtctgttgcagaatgtaaaagtgttcctggaatcacctctaccccacatcccatggaccatccctccgctttctattcacccccgcataatggcctccttactgatcaccacgaatccctggataatgatgttgccagagagatccgctatctagatgaggtgctagaggccaactrctgtgattctgctgtggatggaacgtacaatggaacatcctccccagagcctggtgcagtggttctggtgggcggcctaagcccccctgtccacgaggcgacccagccagaacccactgaaagaacagctagccrgcaggcacctcctcacatcgagctcagtaatagcagccctgaccccatggcagaggcagaaagaacaaatggccattcccccagccagcctagagatgcgctgggggacagcctgcaggtgcctgtcagccccagctccacaaccagctcacggtgttcttcccgagatggagagttcactctcaccacactgaaaaaggaggccaagtttgagctgcgtgccttccatgaggacaagaagccctccaagctctttgaggatgacgagcatgagaaagaacaatactgcattagaaaagtgaggccttcagaggagatgctggagctggaaaaggagaggagagagctcatccgcagccaggccgtcaagaagaatcctggcattgcagcaaaatggtggaatcccccgcaggaaaaaaccatcgaggagcagctggacgaggaacatctggagtcgcacaaaaagtacaaggagcgcaaagagagaagggcacagcaggaacagttgctgctgcagmagcagttacagcagcagcagcagcagcccccatcgcagctctgcacagcccctgcctcttctcatgaacgcgcaagcatgattgacaaagcaaaggaggacattgtcacagagcagatagatttctctgctgctcgcaaacaatttcagctgatggagaattccaggcaagcrgtggccaagggccagagtacacccaggctgttctccatcaagcctttctacaggcctctggggtcagtcaactcagacaagccactgactaatccgagaccaccttctgtcgggggacctccagaagacagtggtgcctcagccgccaagggacagaaatcccccggtgccctggagaccccatcggcagcaggaagccagggcaacacagcctctcaggggaaggaagggccctacagcgagccttctaaacgtgggcccttatctaaactgtgggctgaggatggagaatttacgagcgcccgggctgtcctcactgtggtcaaggatgatgaccatgggattttggatcagttctcaagatctgtcaatgtctccttgacccaagaggagcttgactctggtctggacgaattgtcggtgaggtctcaggataccacagtcctggagaccctatccaatgatttcagcatggacaacatcagtgacagcggggcatccaatgagacaaccaatgccctccaggaaaattcactggctgatttttctctgccccagacaccacaaactgacaacccctcagagggccgaggagaaggcgtctccaagtcatttagtgatcatggtttctattccccttcctccacgctgggggactctccgtyggttgatgaccccttggagtatcaggctggcctcctggtgcagaatgccattcaacaagccatagccgagcaggtggataaagctgtgtccaaaaccagcagggatggagcagagcaacagggacctgaagcgactgtagargaagctgaagctgcggctttcggctcagaaragcctcagagcatgtttgagccacctcaggtgtcttctcctgttcaagagaaaagggatgtattaccaaagattctgcctgctgaagacagggyrctcagggaaagggggcccccccagccactgccagctgtgcagcccagtggcccgattaacatggaggagaccaggcccgaaggaagctatttcagcaagtactcggaggcagctgagctgagaagcacagcctccctcctggccactcaagaatctgacgtgatggttgggcctttcaagctgaggtccaggaaacagcggactttgtccatgattgaggaagagatccgagcagctcaggaaagggaagaggagctgaagaggcagagacaagtcttgcagagtacgcagagccccaggacaaagaatgccccatcrctgccctccagaacatgctacaaaactgctccaggtaagtgaggtgcctcacatgagagacagatgccacagcagtctgttgttgttgattccagctcatgggtttctatgtggagcctcctctgtgtgtgtctggaataagtgttggggggacactggcatgagaattccagcatacagggacatgcaacaaaagtgtcaagagtgtcctctagaagaacsctgagcttgcatggagtttgccactttccagaggatgcaatagctccttctttgttgttctgctttggccttggtttattataaagaattgttctcttttacttgaaagcctgcctcttgtctgaaggagaggctgtttgtggcatagaaccagagtggacccatgtgtggactatgttggaatcagtagcttgaccctcagtatctagttaaacccatctgatttgggagttgtcctctactaactaaccccttctgaatgctggtttccttcccagcaatgatagtcatggcatggcattgcagactggtccatrcaaaatgcttttgttcatcttccgtgtaactgggtttttcttcttaagtcaccacaaagcaactactttggaatcaggagtggacgcatctgttcttgtcatgtgacccatttggaaaagttgaattactcttcacaaaggcaggtctttaatcccttcatattgcctgggtggtcccttttttgaatactttgtatagatggttgatgttaattagagtgctaattattattgctaccatatggataacagtgtgaccagttgtttttattttccatgtgaatgtgatagcaatcagggatccacagatcttcaactatggaaaacgctgctcaaagcgtggtccaagctagtccaggaatcatttgctactggttcattctaagttcagacatcgagagtaagcatttgaaaactcctattgcaatgtgatattgtcctgaaatccaagcgtgggatttttgtattttacaaaactattgcttcataatggactggtggggaaaaactgatgcttcaccagagaaaatttaagaatcgttaccctaaaggataattgttgacacttatcttggtccatccatatcttaatcttatcttgacacttggcttccatcaaacctacaatgactcaaggtcactcttctcattaactttttaaaattggaaagaatctccaacctaaagaaaagttcccaagtacagtacaaatgtctttctgttttgaatcatttgagagtaaattgccmacatgatgccccatcacccccaattttgtagactgctccctaatgtgggtctctgatgytttcatatgatgattttcaggttgtgcatctttggtaggaataccaccaaattgatgctgtgttctcactgtatccaaacaggtagcacgtggtattagtttgtcccattatggtgacaggtgtcaactctgatcacttaatattgattatgatcactccattgagggagtgtctgccagccttctgcacagtagttacttttttcttttgtaattaatatacattttgtagggcaatactgtggtattctgcaattttcaccccatttcttatcaaacttcatttatttatgtcggtatgatctcatggattcctgtgatattcaatggattcctgtgatattcaatggattataatccatttcttttattatttttatccgcaacttgttcagttacagctcacgggagccctttctggctaacttrtatgtcctttggagatgtccccgttttcctttgaatgcttcctcaatttctggcatcgcaagatattccagtttcatcttatactttcccaaccctgaaatcggtcgtctctctgaagagcactagtttctgatgatggagaatggtatttagaaacaaagatctgagtgctagctgtgctcattgttattgcattgtcactagccccaggcactctcagtggacagaattagaaattacacacatctctcttgaaaaccatgagtttgccctgatgctttttaattcttatttaataaaaagttcattcatactttctccctttccatatttgtgaccaccttcttgacaaaagatacttagtttttattatctgtaatatgtttattatttaactagccctccttcccccacactccagtataaccagtctcctgttttcctcaccaaacttgggctccgacatcattttccaggtggccactgccacgacccttcaccaacaccctccttaccctccctgggctccaacactacagcaggtaccatcttattcagcctggcctagtgacttttggactgagttgtttgggaaggaaaggaaagggaggaagaagaggaagagtgcagtgactttcttaatatatgccatcaaattggtgataaagtttcaacaaatgaataatgggggggcgggcacaaacattcagaccgtagcatgagtattttcaggcttctctgtctctatctcttaatcgaacccctcaccatattacctccaactttatttctagcacataaacaactgtctaatataaagacatttcaatgctttctcctgattcccccaccggctgttgtccatcaggcttccccaccaggacygaggttgccttaaacaagtcagcatcctaaggcttgccactggcatcccagcaacccagtatcaatctccccagtacttccctctatgctaatgctgatctcttctcccatatcccacccccataggattgatttctggtccctacaaggggatggtaattcatccgtgcaagtctgttccaatcttgatgtcgtattgagtacaatcatgataatgatatgcatacatgtcattccttcatgtttatctctagaacatttaaagcaggcacccgggcttcccagaattacaacatgagttgaaagaaacggaatgtaaaatacaattttcttcctgttcatgcctggaaatctttggagtattgcttggctggccaacctccaagttcatgatcggggagaaggctgacacrtgactctgagcagccaaactagacaattcatggctagggtcagaactcctggcttcagtggttttgtgaatggaggtgttaccaagttcctgcggcacatttcatatttcatgccagaagaagtgactccactagtttgttgtgtgactcagattgatgattggatactaggtgatgaaaaatataatttttaacttctctggtagaartcatgctggtggcatgctggaatcctaaaaccttaaagcaaataaaatccactgagagccaagatgtggtaaggaaggagaaatcttctaattctttccatacaaaagttatctagacagaaaccccatccccctggtgtggaaatgctatttgtttttgcttttagtgcttttgcttttaaaagatggacaatgaatgatagaagttctgttttgaaaaggatatagtcattgttaatgaccgggtatctagaaattatcttgttggttcttattttactttttttttttttttttttttgaggcagagtcttgctctgtctcccaggctggagtgcaatggggcaaactcggctcactgcaacctccacctcccaggttcaagtgattctcctgcctcagcctcctgaatagctgggattacaggtgtccatcaccatgcccagctaaattttttgtttgtttgttttttgtatttttagtagagacagagtttcatcatgttggccaggctggtctccaactcctgatccgcctcaggtgatccgcccgccttggcctcccaaagtgctaggattacaggcatgagccactgcgcctggcccttatttgacttttaaaggaagaagctccacttaaatagaatttgagtgacatttgtttatacagaggtgaataaaaatgtatagtccctgctctcagggaacttaatggttcagtaagagaaacaacattaaacaaatgaggcaattttatgacagagaagcacagagacctgtaggagcacaaacaaggaagaccatatcatttggaggataaagaaagtcttccttccttaggaaattactgtctaagctgagaactgaaggggtaaagttgggctcagggtgtaggggagaaggaagggcacctaagagaggctcaaaaggaatagagaacttggcacatttgagatatttaagagtaagttaatggaagagatttaaaacaaaacagaaatagatttggagccagacaaccaagagctctatcaatcatgttaagggttgtagactttagagtttaccctatggtcagtgagaagccagtgagagtttttaaaggagtaattatctgaacacaaccccaagctgtcctgccttcactgtgagttgatggactaaatgtcttcctattgtaatgcatccatttcataggcttggattgagctcttcctgcttatgagcacttccgaaggcaggcgccatcttggtgaacaccctgtatgttatgtgaggggccatgctcccaatagtgtgtgcatgtgtgccctctgctgatggcacttagaattagagactaaaaggaagaaggccaggggtggtggtgcatgcctgtaatcccagcacttttggaggtggaggcaagaggattgcttaagtttgagacaagcctgggcaacatagcaagtccccatctcttaaaaaaaaaaaaaaaaagaaaaattacctgagtgtggtgacacatgcctgttgtcccagctacttgggaagctgaggcaagaagtttgcttgagcccaggtgttcaaggctgcagtgagctgtgatcgaaccattgtactccaggctgggcagcaaagtgccaaaaaaaaaaaaaaaaaaaaaggagagagagagaataaaggaagcacctttgcaggtacatgagcctgatttgaaggggtaactcacacagtgctgtaaaacacccttgaggaaagaattagggggtgggatatccaaacattgtattgaagttgcagttcaagaccttttcaaatgtcttttcatattggggttgccaacagttctcactttagtatctgtgtctattattagatatcctggtttcacttccaagttctaagtatgccagagaaacccagttaggtgatgatttgtttggttttttgagagtttctgttttcatgccagatgttgaatttatttaccaagtcagatcattcaccccgtgagacctacattatggagagtggcaaaagagaaggtgtagtttgctattaagttccataacttggggtatctgttcatgtcttctaatttgtggaaagatgtgatagttataaatgttacttttgtaagctgtacaggaagtgttgacttctgctgctgtctgtttagataagattagacatgaggtgatcattacattattataaagattcttaactgggtctctgttctttccccttcattatctgcaaatatcacaaaggaaagtcttaggaaaaatatgtttgcgactgtccacacattcttcatgaagcagagcttggtggagtgtgccatgctaaattagagccacatgaggcacagtttcatttgaggtgccctcattgctccatgggggaagtccctgtgtcagcatctgacagaaggattgatgatgagagagctctccatcagtagtacacagtgcctctctttcctgcaaggcaggcaccaactgtgcagcttgtaggagcccttctggctgtgtgaagctagctaaagcttattgtggagtgtccacagatggttattgtccaccaccatatttctagaacattctctggttacaaaagtctaatcatggtagttacaatttatcaaggccttaaagctgcatataatactagttatttcacacttgtcatttcttattttctcactgaatcctcccaacagccctctaagatacaaattacctcaactcttgaggccggatatatttctagattcagactttttctgattttagagaatttataaagtatatactattatttagaaaagtaatacaatgaacatactattatttaacacaactggcaggttctgggtcaacaccctgtgatcaaattaaatttctactctaaaacttgagaagaagaattagttacattaagtgggtaaagactaggagaccttcatgtcagctcatgtcaggttttgctgccaaataagttatgaaaaatctttcttttcagagttttttggatttgggaattatatatgaagagttgtggacctgtaataatattctttttcaaagaattactactagagcccagagagattaagttgcccaaggtcactcagcttgaaaatgggagagcctggtttcaaactcaggctctcatttgtctccaaaatccatcttctttcccctaccttctccttcccatttgttgagcctgctctatgaggtatacagtaatagcttctctctccaacctgtagctcaggttccctctaccctttcccaatcttatgcccaacccctgcattttcctgggtccttcttgatcctccttttaggagccactgtggctctgcaatccttcttttgcggtggcctgggtgtataaatttgactctcaggggccatgaaacagtgcttccctagtgacccaggatgattcctttctgctttcagaactcaattccaatgccccaaattacagtaggcaaaagcactcgggctgtccaaagatctgagcggatagccaagggactaacttagtccacatcagccatctagcctagctgctcttgtgagttctttttgaaagttatttcccaggaagaagctctgccatttactccagaaacaggttcattccttgaaaacttcgaaagaactgggtactcaagcaaggaagaaatttttaaatttgaggatgagcagggataagtgttcattattctgttaactaaacatgaacatttttggtgtactagggtcaaagtcaactaagttagttgactggtgatcattgagcaccatgactacgtactgttctccttgccttttaaaaattgatctttctgccttggcccagacttccctgtgttctctttatctaaatccagcaagtatgttttcttgaaaaatgcatgccatttggaaaggaattggtaagaaaagactatgttgaagctatgtttggcaaggggtgaaggtgtgcaatgaaatcaggacttttcaaagtatagaattccacattctctttagatattacccttaaaggcttggaaaagacaactgccatggttaaacctgcctgtcagcctcactcttctttttttttttttttttttttttttgagatggagtctcgttctgtcgcccagtctggagtgcagtggcgctatctcggctcactgcaagctctgcctcccaggttcacgccattctcctgcctcagcctcccgagtagctgggactacaggtgcccaccaccgcgtccagctaattttttgtatttttagtagagatggggtttcaccgtgttagccaggatggtctcaatctcctgaccttgttatccacctgcctcggcctcccaaagtgctgggatttgggattacaggcgtgagccaccgcgtgcagcccagcctcactcttgagatcctatgggcccagaagtctttattctgtgacaagcctgcagttacagcttctgggcagcagaactttggaaaaagcagaacgttccccaccagctgaattccctggtacaagcaggttctgctgttcctgctgattgtgctgggtcttcagatagatccgtgtgtctgggttggctcctgctggtgctgggccaccatgtgatgtcctcattgcctacttctgcatggcctctccatgctgcaagttagttaggggagcatcttatgaggaatcagactcagccatgcacaaaaacagatgcatagttttcaggtgacagagaggaggtgaatcaaagaacctaattcttgcaagttccttggtaagaaataggaactaatcaaaaccaggcttgggagcaggatgtcctctgtgactgctggggttcagggcagaatatgactgtgtcttttaccagccatagttacttgctgtgtacttccctaaggagactggcatttcagatctatttgatctttgtgtgctacatacttayggggtggaaggctaggaggtgaggtggggcagggagagagtgtatggggcagacaattagagcaccaaagaatatatgtgtagttcttgtaacgagattttctttctcatggccttgaaggtaaacttaaaagggttcccaaaatgtgtgtgtatctaactcacaagtattaccagtctctcttttatttcccattactcaagtataaatctatgtgcgaggtggctcatgcctgtaatcccagcactttgggaggctgaggtcagcagatcacttgaggtcaggagttcgagaccagcctggtcaacacagtgaaaccccatgtctaccaaaaatataaaaatgagccaggcgtggtgtcacatgcctgtaatcccagctactcgggaggctgaggcaggagaatcgcctgaacctgggaggcggaggttgtagtgagctacaatccctactgcactccaacctgggcaacaaagcaagactctgtctcaaaaaaaaaaaaaaaaaaattatgtgtgatggtcagggagaatatatgctaaaatatgacagtcacttctctggattcatatctcaagcttcattcctgactaccacttgctagctttgtgaccaacttacttcacctctgtaaacctcagtaaaataggaataaagttataccaacctcataaaaatgttgagacagggcctggtacataaaaagctcccagtaagagttattattgttgttgtcattacaacattacaacattacagttgctcttttgttttaagaaaaagcttagaggctgatcgcttgagaccagaagttcaagaccaacctgggcaatatagtgagaccctgtttctacggggggaaaaaatagctgaatttagtggtgtgtacctttagtcctagctactcaggaggcgaggtgggaggattgcttgagcttgagttcaacgctgctgtgagctatggtcatgccgctgaactccagtctgagtgacaaagcaagaccctgtctctaaaaagaaagaaaaggccagaaagccttagtagaattatttgtgagttgctcttttgcagcagttgtgagcctgaaataaataaccgaacacacatgataaaattgctttctattcctagctgggatttttttcagttacttccttagaattaacatttctcttagaaacttgaggtcaggaataatgagttttcagtagtccactatgattcgaaaaactaaagagtaaaaagtccatcattaaatgtactgagtgaataaaattacatgtattaccataaaaatgttttccttctggggggaggtaatcttcacacagccaagcccaccatgctagtagaaatgtatttgaagagaggatcttggtggagaattactattcaccataattttcattcttactgttttaattaacttttttcctttttggccttaaactctgcttgccctgtaagagcagagttctttctttccttctagagttttcatcatcttccagttgtgttcataggtataaacccaatatcagcaactcatccaacaacttgacttacctttaagcaataatatttgacagtttctcagacttgtttgccaagcagtggtatttctcatttctgagctaagtttataatctgaagattcatatcatcacattctcccacccctggggccttcaaaggaggagatgaaagaagaagggaccagctcttggtgtgcgggtcacagctggaaccgcacaagtccgtgcactctggggctgacaagcaggatgttcccttgtactgagaggaaacgaaattgaaaatgcaagtctgagctcatttctttctggtgacttgtgggtcgcttcagatgtttgcaaccttatcccaatgctgtgtgaagaaaggaggtcattgaaggaggccctggcttaggcatgtcctctggtgagtgattttgttcggttcagtttggtttttaaatacgagtgggtgaaggctttttcttttattttgagaaatgtggaaacaaaggctctttgatttaagacctcagacttcatgcatagagagagtaataatcacccaaatcataatatctgaccaaaattttcaggacttttggaatccccattcctggctttttaaaagttagacctgaaatccagaaggaagatttggacagtcagggatgacaatagctgtattctgagtgcatgcagccttttctcgggttctttgggtgggaggaattgcagattcttttctctgcctcctgtcagcacggctcgccacagatgcccaagggaaatccatccggcctggaaaatccagaagcacagccaaggcatggcttgctttctctggaccacagagtggtataactatttatgataaataaacaggaaacaccaatttatgctttcccactcatgatgggactaaactagctagtttggagtgaaactctttgggcttccttgctgcttagtctaccttgcaatgctacagtcttgtgagcaccaccattgcagagatgaacagtttttttccttctgagctcctctgggtatgcaccgcctgggatgatggaagggcttgtggatctgcctagtccataaaagttaaagcaagcaggtttacctgcttttctcagcgtgggctaataatatttacaagaaaacttttctggtttgttttatattttaaaattaatttgtgctgattgtagaaaaaaatgtaaaaagaatcaaaagtgattcataatcctactcccccaggaataaccacctttctagattttctccatgcccataggttcatggaagccaatattgggttgatacttgcattcgtttctattgctgctatgacaaattaccacaaatatagtagcttaaaaaatatgcatttagccaggcacagtggctcatgcctgtaatgccagcactttgggaagctgaggctagagaatctcttgagcccaggagttcaagccctgggcaacatagtgagaccttgtctctaataataataatttttaaaaatacacatgcattatcttacagctttagaaggcagaagtctgaaattcatctgctatggatgactatctgaccaaaataattttcagaacttttggaatccccattcttggctttttaaaagttagacctgaaatccaaaaggaggattgagaccagcctggtctcaattgagacccctgtcccgcaaattcgtatactgaagtcttaaccctcagtgtggtggtgtttggaggtgggccctttgggatataattaggtttacatgaagtcacagagtggagccctcatgacaggatcaatgcccttgtaagaagagatatcagacagcttctctccccaccatgtgtggacacagcaagagggcagctgtctgcaatccagggagagagccttcagcagaaaccgaccattctggcacctcgatcttggacttccagactctaaagttgtgagaaaataagtgcgtgttgttcaaaccatccagtctatggtattttatggcagctcaaacaaacctaagactgggctaaaatcaaggtgtcagtgggtagtgttccttctagtggctctggggaagagttcactttcttccctctttcgttctgtatgctgcctacattccttggctcatggccccttcctccatcttcaaggccagcagtgcagcatcttcagatctctctctctctctcgctgaccctcctagttccctcctacaattacatcagacccaactggatatttcaggatagctttcccatctcaagtacctaaacttaatcacaactgcaaagttctttttacctctaaagcaacgtattacaggttttggggattaggacttggacattgttggtgaggccattgttctgcccaccacaggaggcaacatatagtgttcatcttatgctgattgagtgtctgccatgtgctatgcacttttgctttctttcacacagttaagaagtggtgaactaggatttgaacccaggcagtctggctctcccgcctgcactcttgaactcctgcaatatatctacttctgcagtctgctttttctcttaatatagtttgaatattttctcatgaccttaaccattcctctaagtttgagagtctaaaacatcatttataatggctaactaatacttcattgcctaaatgagccatagctaacttaaccattcttcaataggaagatatcttggtgtagttaaaaaaaacacagtgctgaacgttcttgtacatgagctgtgtgcccatacttacttattaaatgaacttgggccagaaaagttccctggaagctggttaactactgtacattagacaacagtatttcctaaactgtttttcttcttttttccccttctgtattcatttacttactttaaaatttttttccccttctgtattcatttacttacttttaaaatgaggtctcactatgttaaccaggctggtctcaaactcctgagctcaagtgatcctctgacctcagcctcctgaagtgctgggattacaggcatgagcctctgcacctggctttttttcttgaggcacttaatagattctatgaagtgaggttttctggttaactaaacttaagaaatgctgcactcccattcctgaattagagcttcacaatcatattagcactaaaaccagaagtcctctggtaaacaaatccctctctccctccttgttttctttaacccagagtttcccaagcttaatttgaccaaagatttttttctttgaggcatcaagtaactatcctacaaagctaaggtcacaggacacaatgttagaaacacatctttggagtcaaccaagtgaagccacttaccctcaaactccttcaaaggcttaagtctaaaattactccagatggaatagtttgaatatgatcacgtttatgaaataaacttaaacgtttcctatcctccactcggaatttcagtctaacattgttgtagtggttccttacgttccttatagaggtcacattatacctgttccctgctctgtaaatgtcagggctggccatcagccaagaccaatacggacctgccctgaggtctacatggcactgtgtgttcatgttgttgtttaaggatagtgaccgatgtccttcaagagagccgttctggccgggcacagtggctcatgcctgtaatcccagcactttgggtggctgagacagactgatcacttgaggtcaggagttcgagaccagcctggccaacatggtaaaaccctgtctctagtaaaaatacaaaaattagccaggcatagtggtgggtgcctgtaatcccagctactcaggaggctgaggcaggagaatcgcttgaacctgggaggcagaggttgcaatgaacccagatcactgcactccagcctgggcaacagagcaagactccatttcaaaaaaatgaaagaaaaaaaagtgttctatagagtgttcagtgcaggtgaggaactggatggcaggatgttctcattgaaaatggggcagatttcaggcatcacaagctattgaatcattacaggtgaataaaccaatagcagagcaaagtttgagggagtaagcaaagctggacctggggttactggggaagttctgggtgagatgcacactggatcagtgaaaaagaagcaccaaagataaccatcatggtttggggagtctaatggggcatgtcctcttggccaagggacttcaaggggccttatggggtcatgaaaaagaatgtgattgagctcccaggcctgtggcacagactatttgcatcacattcatttaatgatcttcaagacccaaacagtggtgctgtctgcagtgtccactattgggggaagagcatccggagtgctgtcaccgtcctaatggagaggacctctggctgcaaactctggacctctgaggaagttgtcaggtgtggaacaggtttctctccagccttttggcagcctgtgtgattcctaagatggcacccagaattctggtgcctggtttgaaccatacttggggaggatcatcagagatcacagggcccagcagaggagcctggctgagctagcttcccttgatactgaccagaatgatggccggaagtctggggatgaggcatagtgtcttctctctctggggacctgtgatagcctctcctaagggggtagatagaaccagaacatgggctcagttatccaaagcgaccattctcagcccccttgttcctggaagcccctgctccagaactgctaagccagcctttctttcctgctacttctctgacctctagtggctagaactggaaaaacttgctcaagggatgaaatcatcaataagcaggaaatgtctttgatgttaaatggctgtccacttctctatagtaatccttcaccctctttacaacattctttctgcatacatcccatcatttaattcagccatcatcaacactgggtttgggctccagactgtgactgtcactgtcttatgtaacttgggctggagttggcatctgagcctctgtggtcatgacatccaggtgtcacgacatccaccctaactacattccagggttgttgcaaggctcaaatgacatgaagcctacaaaagaagtggtatataaatccgcttgttactccaaagccattgagtctgtgattctgtaagcctaaaatgttttaattcatatattttggtgaaggcatttaagccctttcctctgattctctatgggagattctgtcccaatccataagcatttacttgtggttgttatatatatttcataatggacttactgattactcaacaaacatgaattgcctacctcgtgccatgtaccacagctactgctgggatctggcaatgatcagacaggcaaggctctaccctaatggagtttgcattcaaatgaattaaggggattcatagacaggtgaaacatacccccctgtcctcaggatgacattatagcttaattgagaagacaaaagcttcaatagccagataagatttaagtcagtatgtgaaaatggccttcacagaaatataaacaggagttccactgtgctgtgtgtgaaagggagaagctagaagcaatgaatataggctgtgctttctaggtgtttaactctggaagagtggctggtgggaagtgatctggacacttgagaggtcaactggaaaatgatgaaaattaacctggtaattggtgtctatttctggtcccagaagagatgcaaaaattttatgcagaatatgcatgaaattgttcatctcaccctatagtcacattattcttkgagattccaattaagtggtagctagaatcattagatgctttctgttctgaatattaaccttataaatattaactttgtcctcataataactatctgagggtaggtacccttatcatcatacccattttactgatgaggaaactaagatatcaaaagagtaagtaacttgcccaaagtgatttggctgccaagtcatggattcaagcccaaaccggctggctccagagcttacacgctcaccactgtgctatattgtttcttaagccttcaattaaaaagtcaatcggaattttcagagatacatactaagtgtgcaggagtgaggtgacctgaggtctgggattggtttaaaataattcagcaagtctaaggaaggaaggaagagccaattatgctaaaatcttgataaatgtttactctgggtgatgtttataatgtttataggggtcattatagcattccctaatttccgtaataaaaaataggaactgtttctagtgaacttggagattttgaaatacttattattgtactgttaatatcaaaagacttttcagttatctgggtaatttagatcaaagcaacaaatttcactgttattaatgtaatgtggccatgaaatgcagtgcccttttctgtatattaaaacctattttccacctaatccccaagtgtaacagctaaataccttaaaaaaaatcaagaagggtgtatcctgccaaacatatttgatagaatagcaaaacgtttgagttagaagagaccacaaagataacttcttccaaaattcccatttaaccgctatggcagttaaagctaggagaatttaagtgatcagcccacgattgaaatgggaatatgaaacgatgatctatagtcagtcacgtagccaagtactggaagagcaggagttaaaaacctgggtttcctggactccaggcctttgtatctctcatcagaaggaggttgtgccagtaaagggctaagcagcccatatggaaatgtggacaccaggcttcacttgtgattcctgctacatcaggcagttgccaagttagaagcctgggatgtaagatgaagaaaggtgagtccccttcggcttggaactggaagaggtcaaatggccctttcccctcccaaacggrgccatgcaagccccatttatcttgtgtgttttatccacattccttgttcacaggttttagccgcatcaaccacaaagggcataattggaaaaatcataattgttatacttgaagatacttctcagaagtgcatttggggctctgtgtcaataaacccaccccatgaagggccagaagccagggccaggcatttcttgggagggagggatggaaatggtcttggtgagggtgcgtagagtcaccacaccactgttgaattaatcactgacctcatctctccatcctgaggattcttggaggacattgcgagagctaaaatctcctcattcccaaggctggtgtgcaccttttccattgcctttgttggtgtacacttcttaaggtctgggaggcctcaaaccccaatgtttcaggaccccagcaggtgaggtaaatgaataaagctggccagtgtaagaccggggcaaactgagaagaacaaacttcatccttattcaaaggttttataacactgggctgtctgcacaaaaagcctgggcaggtcagcagacaattgacttcctctgctatagaggatagaccctggtgaggaaagcaggaggcctgggtaccatcactggctccctatgacttgagtacagccttcccttggcagagcctcaagcgctttcatctgttaagaagtgggtctgtgagtctccaaggtgccaccacctctgacagtctaattctgtgatctgtgatagaatacatatctcaaaacaactggagccactgtcggtctgtccaacatatatttgcaaaatgcgtgctgkgcctgtttgatctaactgactttttggaacttggtgtccttgagatctttggatgggtttgtgcattaaccttaagtgctttgatccctgtaatataataaaatggcctacacttaaccatcattctggtaccactctctgtgtcagaggttgttgctcttttatttgccrgttttctttctaaaagcagtcatgagcagacaagcttagaaagggtattytcttcgtgttgtttcagggaaaatagagaaagtcaaacctcctccatcccccaccactgaaggccccagcttgcagcctgacttagcccctgaagaggctgccggaacccagcggcccaagaatctgatgcagaccctcatggaagactatgagacacacaaatctaaaaggcgcgagagaatggatgatagtagtgtaagtttttcctcctttcctctttcacttctctgagyrcggccatcggtgtggcgtgtggcattccagttcaggcacaaatgtgtatgtcgttgtctggtcagcattagggttccagtatcagttttcatatatgtggtttcacatgcctggaactgggtttgggtttttgcctgtttcaaaaaaaaattgttgatcttgcagggagctggtcctttgctgccaagtatagctggagtcgaccagcaaggctagtgtgtaagatgtttggtgcatagaaagacagcatgcaagggccacgcagggagaaggttgcaagtgccctgaaatcatccctatgcacctgggagctgatttctaccattgcccagtagagattttatttctctagaaaaggatgaagatgctgttccttcaaagccgacactctaggcaatccctaacaatgttacagtgcttaaaagactgagtgtgtttggggctgttaacaagcccatgtgcatagcttgamagcaaagagccagtgaaaatgacagttgaaaaccacatggctactctgctacacccaagccctcggaactttgcacataacgttcaaattaactgtgaaggaagtcacatgctctgtggtttctttctccggttagagacataggaactgttgctctacacagtcccaggagcctggagatcagcctcagggttcatgccaacctcctgtgggtcttctggcaccagtctcttagcacatattgaagtcatcacctcctcccctgactgcacttaagtcacagatagcttgggttggttgaggatcctactgagtttacctgagacagtcctggcttatgcctgttgtggtgttgtggttattaatatccccttcaactcttttgttgttgttgttgttgttgttgttgagacagggtctgtctctgtcacccaggctggaatgcattgatgtaatcatggctcattgcagcctcgacctcctgggttcaggcaatcctcccgcctcagcctcctgaatagctgggaccacacgcgtatgccaccatacctggcttattttttaacttttttgtagaaaggaggtctcattatgttgctcagactgttcttcaactcctgagctcaagggatactcccaccccagcctcctaaagtgctgggattacagacatgagccactgcacccagcctgcctttcactcttgaaagtgtcccagtttgggtgataaaccatctggtcaccttaaacttgaatgctatgaagttcacagtaagaattccctgctgttttattgccttttatatcctarctggctaagttaaaggatttctggagttgaagcccagatgctgaaagttgctttcaaaatatatggyggtaaagaaaggaagaaagcaaatggatatctggcagcctggcttctcacttggcatctcccaggctttcccttttgtttacacctgaactgcgtggagcactggctcagctgctgtattaggctgcagctattctactgggctcttcactgtattagacagtgggatgatgcccggccctgggtagctgctgcagacatttccactgctgaacctcactgtaggggagccagcagctcctttcgtgagcctgcaggatttttccctggctactcagtcactttcaccagcccttctttgaagccccacttcaaaggataaagtttgccttaagaattttctgaaagttaaatcattttgaaacttggtgctctaggtgtctggtttcttttctcccagtgactctgctctatacatcagcagttttggtagaatttagccaagtgggtgccccacactctgatgtggatggggaagaacaagtagaaccacttagcatgtgacccacgcgagtgtttgctgaacacactctacttgtcacttgtgtatgtcttttgtgttggagtgcagatgatagggaaaaatactccatacagaagggtagaggcagttctcactcatttcgtaaaggcagagggctggaagctcttttgtgcacacgctgacactctggcagccacctaacaaatgccaaccaggttgagtttttcctctgcatgaatgaagctgcttggaatcagcgttttaatatgctgattgcccttcacttacaaatcaaagaggcagcctcctgtctctatattttccagtaaataaacattttgaaaaagaaagagacctaactaattaagctgttaatatccctggatcttggattcaaagccaaatgttttgcactgttattgctattacaacagaaccaagtttgctgttgttgaaaattcttaggatcaggacaaaatctaccaatccactatatgctcatttaagagacccaaatctaaaacaacaaattcagattgcttctaaagcaaagatatgatcatcagtcaggcttcaaatgagagccttctcctagcccttccaatttaggggaccttttctcctgtatctgtgtcaatcactggtgaatgtgttgaagtttacctgtagggatgaacaaacattcatttttttcctaaccaatctgtggccccttttccattttttctttttctttaataccagaaggatagtaatagagagcagatggattgctggggggatgagttgtgtaactggcttacctatccgtagaagcataaagttaattctcttaaaggtaaagtaattctggtctctagcctccatttacatacactattctcacagagaaacatggcttcttagactctccaccctctaagcacctcagtggctcacacctacacacccagcatctccccatgttatgcagcatcacccctggcacctccatttgccaatattttttccagtaagccacttggcagcattttggcatgccgttttggagatgataaaccacacctgagaatcaatgcctgtcgcgtgattagaacacaaccatgtgtttgcccatcgaaagtaacagttatttgtgaattgagcaaaaataattcttattttttattctttttaaggagaaggcagagttaaaaacaagacaggcgctgatcattggaatgtgtataaagtgtgatatgttagacacaatgatatcgaggagagtgaaagacagaaggagaaagatagaatgtagctacggctgaagttttgctgagtgagaaaaactgatctttgccatcaaaacaagttcagtgtyccccgagcccccatcrggggtgtggtggcctctggggtcctgtccacagggactcagctcagggccctgctctctccagttttccactttataaaaagtcatatgcagagaggcccctggcttatgggagtcagggagtggtgttatccaaaggttgtccccaaccagccatatttgttactagctcagaacttgagcaaagtactccctttagttgccacagtcttcacccacctgggctgatttctttgtcctgtatattggagtcaccaatgagtatctccagcctcacttattaatggacctcttggctaattctgagggcaggaggattaccatccccamccctacccacttacccaaggctgtttaccaacctatgcaaggcctttgtgtgaattaggaaaaaaaaccacccttgttcctctatgaagatatgaagatgcagccctgcaccagccacacatttggggggtagagtaggggactgggctttagtaccattcatccctttagtctgatgcttttgtgcagtgcacacaacacacacccagatgcagcaatcctattcatattgtgggtttctcttatctggaaatgttctcttatgtggaaatgtccacttatctgggtctcataccatttctgctcagtcatgcaattcataatggactagtgaatcctagtttcctaaagggcttcttgatgccttgcaaagcgactgcctccaaggtggggttgcccactcatggacctggaagacatttggatcagtgggcacaaatgatgggctatttggatgtttttccttcaggcatgaagaacccctctaggaaactctgattcattagtccatcctgagtgacatgactgtatttaggcaaacagtatttttccagccaattgtttccctaacctgacctgagcctcagaaagtgaagatgatgggtcattgagtcaatgatgctcatgaacatctcgagggtttgctttgcctttctcagttgaagggatgctgaccagagtccaaatcacagcctcctggatgttcagccccatctttacttttagcgcaggatctgccctcagtggggttttccagtgtgctckctctctctttctcatcccatgacttcattactgagaggtcatccaaccactctgtctcatcttagaacaagagaagacctcgtcggttttcctgggctacgtcaaagctgagagttcctggcacacattacccttccagaccaggacatgcattgagagttgtggccatactctcgctcagtgtgtgaaggaagcctatctgcctcctgtttccccagacgctacaggaagctcagtgatgccttgtgcttccctaactctctcttacgttctcactcgtaccctagtgaagatgcaaaggagagagaagagctcctgacttgtcagctcccagccattagcccaatcatgacagaactataattcctaagtgctacatataagaagcagtcagcaatcacagatgtgtgatcccacctaactagtctatggctatcaatgccccaaaccaataaatgctttaaatgccccaagcagtgtaaatgtacgctcattaccataattctggagagggatgtcccaaattggtcctgccatctcattttccatagtcaggccatttttttctgtactttgagtaagacttttagtcccctataggaactaaaggatcatttcagttcctaagtgctcatactaataatcctatataatcaccagaaattgctatcaaaggatgatcccactctcaggaacttacccaggcccccagggttctgacgagggaggctgtgtggtctccctaggcaagactacccttaggccggtttcagagaatctgcctccacaaaccaactgctgtgattaggatcttcttttaatggaacaacaggttacaagacggctttggggttcagagaagcctacgggaagagaaaaggctatttggctacagactctagcaaatccaaaatggcccccaacgaccttgctggtgggcagctgattgtgtacagaggggaaggaatcttgttaattcaaagtacagaaactgaaagcaacgttttgaattaacaaagtacggcttatctgatatttttattagtgaacaataggktatctagttgctgcaaagaatagacttataaataaactaatatcagatggagaaagttttggcatgggtgtagaatggcctcctggtatwacttcccctcccatcctcttctggtgtggtgcctgttcccggctagggggtgttctgtaagtgtgtcactgccatgtactaaccctggtcttttccctctctgccagtacacttctaagttactgtcttgcaaggtgacttccgaggtacttttcaatttgtttgtcttggtcttactgaatgcatgatccaggtgcatgctgttgtggtttgccatttcctgatgagttaaacgaaaatggcaagaaaaatgacttgtctccatatgtatttttttgtgcctgttctgaawtatgggactgcctcgaaatgttggagtccatgcaacagtgatatacaatggtgtggtttgctgtgctgtgctgtgggggcgagtgggagggtactggggaagaccttgcctgctcacgaatcttgaagacgtttggaccagaggacacaagtgatgggctattttggtttttaaagtttctttaggcattaatagcaagtatacttggcctggttggaaaacagtgcagctcatgcagattgagctatggattttcacccattctttgtttaccttaacataaagctagaaagctccattctatagatttaagatgaaccatcctaatctacagatttatcaaatgtaaaccatcctagacctccctccctccaatctttaaacgtgtatttttattttagaaactctaagccttgatttctccaaaagcctccttgtttaagagacaaggtcttactctgttgcccagggtggagtacagtggtgcaatcatagctcactgtagccttaacctcctgggctcaagcgatcctcctatctcagcctcccaaagagctggaactactggtgtgtgccactatgcccagctaatttatttttttatattttttttgtagggacgggggtctcgctatgttgcccaggctggtctcaaactcctggcctcaagtgatcctcctgcctcagcctcccaaagcattgaggttacaggtgtgagccactgttctcggtccccaaaagtcttctttccttttacacagatttcacaaatatatgtgctataaatatgtgtgctatgagaaggcataatatttttctcttttaatttttttctattttgtccattttttctttttgctgagaaagcacaatatttttcatatttttatttctgtattttattttgattttaaaagaattatttcaaatatacagaattctagagagaatcattcgttcattcatttaacaattttcaaggctctactatgtgtcaggcattgttctaggttccaagaatacagcagtcaacaaaacaagttcctgatatcatggaactggcattcagaataatataagataataaaataataaaacccacctacccagctttgtccattcttatcatttcatgatatttaatatttttaaaagaaattagtattgcaaatacaatttaagccctctcgtacttctcccagttccctcctcccttacaatctcgcagaggtaactatttttgagcttgttgttcatcatttccatgcatggttttatacttatactacaaatgtgtatatacataaacaacaccttatttttgcatgtttgaagacattctataagyggtaaatcatgttgcagtatcttctgctcctgactttgttctgtctgcattgttttgagatgtgtccttgttgatcactgtggctctggttcattctttataactgctgtatggtattccattgaatgaatatatcactatttattcaatcttctrttatggaaatgtagactatttccagtttttcttaccgttagaaataatgcttttatgaatgttattatacatgtctctttatgtacctatggaagaacctgtctctatatttaggagtagaagcactggctastagcctgatacatcctaacatttactagatattgtaaattatttttcaagttggttgcattaacctgtagcataataagttttttggtctctctatttagccaaagaattatatttaaatatagagctgacctgctgattatcagtaattttctttcataagatatcaaatgaatactgagaatatcattctgtaccttctttaacgtctaattgtggttctcatctggaggatggcagtttgagaattaggactaagcccgtctcccctttgagtccatttaaaacaatgaaaatctggtcaaatatatccaaggaagatagagttgggcccactctgtcttcaatttaaaagcaggttggaagatgaaatataaatattaatatgaatagggtgatattatttaacatatctgtcttttgtttcatatgtccaaattaaaattttctatattgattgctttcaaagttaagcaattcacttgaattccctaagcattagagagaaaaattaatattaaagggttgttgagagataattgttttttattccctaccagacctgaatgtgaatttgtgaaaacaataaaactttgtttatttatttagtttacttttttttttttttttttttgagacaccgtctcactctgtcacccaggctgaagtacagtggtgcgatctcagctcactgcagcctctgcctcccatgctcaggcgagtctcatgcctcaacctcctaagtagctgggactacaggtggcagccaccatgcccagctaatttttgtatttttagtagagacaggttttcactatgttggccaggctggtctcgaacacctagtctcaagcaatctgcctgccttggcctcccaaactgctgggattacaggcttgagccactgcacccagccacaataaaactttaaatcagatcgttttttgttttcccttttccatttccatggggagtgttgattgctcttctctggtgtgtctccttctggactccttacagccattgggcagccagatagtctggtggcctcaagcatcaactctgcacccagagtgcagagttcaaatcttggttttgccttctgctaactgggtaattctgggcaagttacttaacctccctgtgcttcaggttcttcatataaaaaatgggagtaataacagcataaatgtcatagactagtagtgaggattcaaacagtaacatcgtacttaggacatgagtatgacattattagagccccagagacatatgcctttttgcccagaaaataaaggaatgaactttagaaagtgaagttaatatgcagtaataaacaagtaataaaagctctaaatttgctagagattcacacacacacacacacacacacacacacacacacacacacacacgtctgaattaattacagaacagatactcattcaaataccttgatttttgaatcttctgaagaccagttgtggtgcagctttactcccagacacccctgggtcataagccttatgaacccaaagacagctttatatcaagattgccaggtatttcagtaaggatgtttattttcttgtctgtgccattactagaggctttagatttcactagaaatttattgtatggccatggtaagtgattgtatgaccatggtaaatgggcatacatactaggggaatgaattaagaaaagagagctcattgttggtataagtgaattactggggctcttgacaagtagatgtccaaacccaagctatactaaacgtttccataattatgagtattatttttctgcccattatacttttcgtcactaaactccatgagggaagggactattctatcctcaacacgaagcactgtgccttatacttggtaggaaactaataaatatgtgtaaattggattgatagatggcttgtaacaagagttcctaaagagcagagcaaactcaatttgctcaagttgtttgagaattaaaatagggtttaaataacaagacaaagaacattccaagaggatggggaccatagtttttagaactttagatttatttttagctttgatgtaaacctttctgtttgtatctgcaatctgaaaggcaaagagatgatccttttatacaatgtagagttctttataaaacgccctatttgtatgccacttcataatttatatatccctttcacatgatgatagaaataattattccatcatagtttgagagcttactatgtgctgggaactatactttacatacattgcctcattgatttatccgtccaactttatgctgtagtttttatgatccccattttacatggggatactgaagcacaggggtaagtgacttttccaaggtcatgaggatttgaagtagacctgcctggacttctgagtccacagtgccttctgagaaagcctgtgaagtggggtagctgtgttctccatgttatagataagaaatgtgagataaaagatgaacaacaaaggacaaaactggaaatagagcccaagacttccacgtgcagtccagtgctrtttttcagttccatgctaccacacattagactattagaaaatttctctatttaactatacagatttggaagcatgctttcctcctactaatttgttattcgtagatatctgtggatattgagtgagtgaccgtgatatgcttacatacaaaacacattatgcaaaacacacatggcttgtgtgcttaacaatgcatcattcattcagcaaacgtgactgaggaggaaaaggggaggcttcacagaggaagatatgttgaagctctgggtggtccattcctttgacaaaggtgcagagaagcaggttgagatggacccccgatctcccatctacccacaatctgcttatgtctgggctcccacctctgcctgtaactgyatctccttgcttctctggagttgccaactgtattagtccattttcatactgctatgaagaaataaccaagactgggtaatttataaagaaaaagaggtttaatggactcacagttccacatggctggggaggcctcacaatcatggcagaaggtgaaggaagatcaaaggcacgtcttacatggcagcaggcaagacagtgtgtkcaggggaactgccctttataaaaccatcaggtctggtgagacttattcactatcacgagaacagcatgggaaaactcgctcccacattgaattacctcctatgagtccctcctgctacacaaggggattatgggagctacaattcaagatgagatttgggtggagacacagccaatccatatcaccaacatcactgtcccttgcctaactgattatatttagaatgagcagtgccttcattgcagtttgcataatcaaccaatgttggctctactggacttttcttcaaaatcagaaactgtacatcctaagcaaatgccagaacaattggcaagaatgcctggacttgttttctgcatggtcatgaaatagaaccatttttcatatgttggcaacctaaatgccattaatctggaatctcttcttgatcaaactgaaactggaccagataggctgaagtctcctctcgggattccacagactgccctagtgaatgggaggaagggaggctctccctcagtggtggtgagcctacttgtccttagtgttgtcacctttcatttcattgattagcatgtggggtctgaagttgcatcagaatgctgagattgcttctattgatccaagaacttttttttttcatgtaatggcttttttagtttaattttgccaaagtaggtttttatactataaatatcatcatggcttatataggtttgcaaagcttgatggactgaatccacactggtcccattgtttggaattattttctggtttgcttgtttatgaagagactaagaccatctatagtgtgctgtctaatatggtaatcactagtcacatggagctattcaaattaaaattaattaaaatgaaataaaattaaatatttagcttctcagccacactagccctatttcaagtgctcaatagccacgtatggctagtggctaccatactggatagcagagatacgttttcatcattgcataaagttcaattggacagcactgatctgctgcgtgtagggatctgctttatctgaaaacttgatgcagaatcacggctagttcaaagaaacttgcagaacatttcatgaaaattaaatttctctatggtgaaaactaggggtcaagtagcagatgaatactggctgtgagatgaatgcataaccagaacctcccattcccctttttccagcgtctctcctatctcccagcagtgctttatcactttctcctctcaagytgayaaagagaaaggaagaaagaaacagagaagtcggtttatgttcataattaacatccatgaactctgcataattttttcccctctctttacaggtcctcgaggccacacgggttaatcgaagaaagagcgcactggctttgcgctgggaagcagggatctatgccaaccaggaggaagaagacaacgaataaacttccttcaacccaggaagcgtctttggtgcttgggagaccaagaaaccaagaaattaacaactgaaagcattttaatggactayttattaaagtgcaaacaaactcagcaatccttatgtagaccagaagctgcaatatacaatgatgaaaatgaaacgaaaaggaagtccccccatcagactctggacacccaggaatcaaaagagaaaggacttttttggtgactcaatcccagtgtctggtttggggccaatctacaatggatccaaaaggacaaaacatgttacaagcaaatcaacatagttgctgcaggcggaactgagaccagcctctctgggcgatgaaggacaatggtggtagggccacttagagagcagtagggcccaggctggtgcagcctacatggcacaggatatttccctgcaccagtttcccacctgtcacttgcagcatcagagggtgttgcattaactccattttctccagcagccataaaatgaatggcgtttctctccatatttgcccagaagaggcagttatgattccacttctcctacatttaattatttttaattgagaacaactcatgatcacaattcataaaatccatattttaagacaatagttcttcatgtcacaaacacaatctattctacatgaggaggctgagaaaggggaagagaaaaacaaaccaaatggatgatgttagctttaggatcgtgtctgcttataatattcactgatctgcagtttatgagaacacattttcacagttatgtttcttcataggaaaactatatttagtgggcaacaactatttttatgatgggatgggggagtatatacacgtatagaatctgtacgcrttgaacaacttggttcaagatggtgggggcatttttagagcggcaataattgaaaaaaaaggcgaactctgccttggagaggtagatgataagaaataaaaaggtgtttataactattttgtattataaagtgggccttagagataggaagaagaatgatggattccttttggatcaatcagaaaggaaacacgaaagaaaagtcaggaaggtagagagagaaaaagggagggaaggagaaagaatgggaataaaataaggaggtaagagatactatttttgctgagcaaccagtgtgtttcaggatgatacaaagaaaaatatagaatagaaataagtgcaggcttggaatcagctacaaatcctaaagatggggtgtgtgtggatgtgtgtgtgtgtgtgtgtacaccattgtgtgtttgtaaaatgtgtatgttcatgagtaagggtgtgtgtgtgtgtgtattaaaattccagagtgaccgtggcacttgggtgtacaggtaattcctccagagctgtttgctggcttcaggagtggagtgagaatttcttttttatgaaaagggatataaaggcaccgagctgatgcagtatttgtaatattaagttgacctaacaaggtatttgcatgagtcacaattacaaagttttgagcggttttgtaatttgacatttaggaragtctcctatttattctcatactttacattcatgcttagtatactatagaggatgccagctttaatctttctgtcatttaaagcaatatgataagggtattcaataattgggtgccctaaatttctggatgagaaaattttcaattctggccatgagaaagaaaaaaaaataaacagccttctttttttttcctttgttttaaaactgtggttttttaaaaaagcaataattaactcagacctcactaaaaatcatttttgtttttatattgttatgtcataagctctattatgttattctaacaagtagcaatttcacaaaatttgtatgtagatgttaacgcacatttcctttgcttcttttattagactagtgttgactttggggggggacatttattcacaaatgagaagtaggcacaaagtaaaaaatggaaccatctactaacaaggatcctttaaaactgccaagggagctctaacttgaagccacatcctacagatggcagcccaaatagcacatgggcaattggcaccatctttatatggttgagtctcctgaatattttgaatgaattctcaacaaaatgtgctagccactggggacgcaaaacaagtaagatccctgttgcaagaaattcattttatagtgagggaggttggcatggagactaaaattctcaggaaaatgagatccgtgttagattagaagtcctgatgtgaaatgggaggactcaggaaggaggatcgtctttacctgaggatttctagccagaggtcccagatgcctgggctgagaacccagcgataagggggcgttcccaaagcagacacagggataagaacagaggaggcagcagcattgcacagccccaggcacagtggcagttaggatggctggagagtaggatagttctatgggttgcccaaaaaatgtgatgygcttcaygttttctctgactcatggatctggtagagaccatagacatgatatagactaacttccccatttttcacaagaggaaaccatccttatgacttaccttaaagttttttgttctgttttgaaggaaaccatgtgcttcatgaaacctacagttgacaagagaatgtacagctaagagaaaagcttaagaggccacactattcgcggaatggctttagaggcagatgaagtggtctttgaccacagttgattgaaccagagcacttattgcttaaagaataacagagttctagagctgggggttcttgggccatgctccgtgtgtggataaggaaagaaatactgtttctgggactctcccacagtcacaaagctgttttcactgtggcccctacatctcttaacttttgctattactcctatgctgccttccggattactgctgtctatcttcttgctccactcactgaagatcctattataatcccatgaaaatgtaaattacagtttacttgggagagccagattttctctgtgctcttgagttttttattcattcaagaaaccttgggccaccgctttgtacatagcaccgtgctaggctctgggatcccaaatggacccttttaactttctgaagatgggaccgtcccctggaggaaagtcattcctgcctaatccatcgagagaaagaggcttacgaaaaactttgcctctgatgctcagccccacccccaaatagcacacaagcttgttaaccccacctcttacaaaatgtttagattctgtaggtgttaaaagcctttctggaagtattgcattctgccgtgtttataggtgttcactttcctccagagctgattaactactgacatgacttggctttctcatccagaaattatggaaacagggtctgtcagtggcaggaggccgtgctgtgttttacttggatgacacaatgcagtttacttgcctcttcatacccatgcatgctgctcaccctagacaatgacatataagccgtatatagatcaatgtccacatatatatacacacacacatatatatatataaagtgtaacaaggaacactaaaacagtgttgattcttgtctctgaagacaaataattaaaccttttttttcccaactaaagaatggatttaattaaactatgtattgaaaaaaaagtagcctaagtgttagagatggtgaatatattccattttagttaaagaacaaatttcctgaattttaagcattcagtgagctgccaattttgattttgtgttgctctttacccaaattattttttctttgtttttctttttttgggggaggaggggaaaaaagcagcaatactgtgtttggaaattatactctgtatctggttttcctgtgtatgttaaccacttaaatgttattatcctgctttggttttagagtgattgtgaggcattcaatgcaagtatacagttattttctcattaaaatccaatgtgtgttgagtttttataaataatggctgcttgtttgaccgtgagggaggttggaagactgggccaaacagtggcacgccagcgtcctacttggccgctactgtgtgacagcttctggttcctcatgtttgcaacaaaggaatcaatccgagctgagggggcactgctgcaccaggctgttcccacagcccccttttcaatgctgtccccagccaccctggctagatgccagaagctgcaagtgcctcttaaggacatagactcgaagccacagcaagagctggacaaacagcaggacgaacggtaaactccagccttgcctgtagcttttggctctaacctttagaatacattatgagcaccggccgggcgcggtcgctcacgcctgtaatcccagcactttgggaggccgagacgggcggatcacgaggtcaggagatcgagaccatcttggctaacacggtgaaaccccgtctctactaaaaatacaaaaaattagccgggtgcggtggcgggctcctgtagtcccagctgctcgagaggctgaggcaggagaatggcgtgaacccgggaggcggagcttgcagtgagccgagatcgcaccactgcactccagcctgggggacagagccagactccgtctcaaaaaaaaaaaaaaaaaaaaaaaaaaccacattctaagcacctgtatttggctctcctctgcaaggaatagctgatggctacatgttgacatgaaggactccttttgttgtattcaacataaagcccctttccccaaactcttactctggtttctttattttcctactcttcgactacccccaactctttttctttttctttttcttttctttctttttttcttttttctttttttttcttttttttttttttttgctagagctttattgtggtataatttacttaacaaaatttattcatttcaagagcatgcgaagaccacaagtttctcaggaagcgtcctcccttctacttcctccctcccgcttcagtctccggctgctccatcccatcaccgagccctgggcccctgacccctgaccatcagttttcctagtctttccctcggcccctcctcttcctggtacttcctttccagctgcctttttctctctctccgcatttgtaactcttccagcctttttctccccaggatttccaaccatatcttcctgttctgagcatctgggggtgttctgtggcacctgtcaggggtgatatctttcaacctctaagtggtgagagttctgaatttggaagtgggggcacccctttaaaaatttgatcaaagtctagtaacagtggataacacttgtgaatgtcactgagaatgtgacaggcactccaggctctccatgactatgatacatttatatttatatttatattgatttccattttacatagtaggaaactgcagccccgggaggttagtttttcaatgcatagcttgtaaatggtagtgcttgcatttgaaccccggctcttaactgctcttcccacagaagcacacattggcagcttcacatgcgtgtgaagtcgaaatgggcttgcaccatctccccgcactgtactgtccaggaaagaggctctcagggatcaaagccaaggctgtgataggagcccaagtctaggggaagagtgaggttttggtgggagcaacaaagaactttcttcctttggatgaactttctctgggctcttctcttcgagatcatctctcccaggagatggtgacagcagatggcccaggcatcgcagctgccaaaagaaaggacccaaaattgactgcaaatagggtgataaaaatgtgataaaattaaactgtggtgatggttgcacaattttatttttattttatttatttatttatttattatactttaagttttagggtacatgtgcacaatgtgcaggttagttacatatgtttacatgtgccatgctggggtgctgcacccattaactcgtcatttagcattaggtatatctcctaatgctatccctctcccctccccccaccccacaacagtccccagagtgtgatgttccccttcctgtgtccatgtgttctcactgttcaattcccacctatgagtgagaacatgcggtgtttggttttttgtccttgtgatagtttactgagaatgatgatttccaatttcatccatgtccctacaaaggacatgaactcatcattttttctggctgcatagtattccatggtgtatatgggttgctcaattttaaatgtactgagaatcatacacttgaaatgagtaaactttgttaagtaaattataccacaataaagttccagcaaaaaaaaaaaaaaaaagaaagaaagaaagaaagaaaagaaaaagagttggaggtagtagagggagtaggaaaataaagaaaccagagtaagagtttggggaaaggggctttatgttgaatacaacaaaaggagtccttcatgtcaacatgtagccatcagctctctcactaatgaggaataaagcttcctctccaggctgcctccaggaaccaggggcagtggtgctgtgaccacgtatggattcagtcctggtcctgtttccatccatcactactaacatctggaggcctcaggcagaggtagggatgagatttggcaggcaggcgtgctgggaaggaaggaactcaggccatgtgtgaaaaagcaagtctcctgcaatggtagaggagggtacaacactcacaatggaagttattttttgggatgctctaaccacaaaactaccaatgttaaaaggcattaaccctttacccagtagagggcagttatgcagggtctttgctctgtgatgtgtatctgtgggaagggatgggggcctgtgtccattacccaggctcatctcccctgttttgtatttgtgacagaggctgtcattgtgagacacacaaggccatgaggttactttggagcactgctcattttagttaggggattcctgggccatgagagggcagtgactatactcctccctacacggaactcacaccaaattcagaattgagctgctagggacatagagaacaaatgggaaattgaaaaggagaatgcaaaagattttaaatgtacaagatgacaccaagtgaaaaaatggggactcaggaaatacctggagatgccacatcggcaatttctaaatgttgcccaagcattcacatgctttctctgggagaaagaagagtatttgcatggtgcgcattgtttcatgttgcgaagacatggtgatctcaatgtcagttaaccttgatgggagagttatccaaactctggatggagagttctctttgttctaagttcaaagtgggtggactctggacaactggaatgagtctactgctacctgagacaagtaaaaacacaaatcagtttggtttttctctgtctgctcatgtatggaacattcagtctctgcagcggtcttcagctggttatatcaaagagcctctggtgagccctggctctcaaattggagtgagttctgcatcacctggagggcttgttacaaatctgggccccatttctgatctactgaatcagatctactgattctgggtcccatcccagaatttctgatcagtagatctggagcgaagccccagaattttctacctagctccctggagatgctgctgctgctggtccagggacctcctttgagaaccatcggtctagagtatgagaaatgaatatgtctgggcctgccacttatgtttgaaaatgggggaactgatacatgactgataagctgcaaacacagccacgtgtggttctggggtgttgtgaatatttgttgggggcttttgtgtgtttgtgcagcctaccgactcaccattttgtgggccttggtgaagcagaactttgactccacttagattctcgaacgaggcccctccaactgtggctaaacagattaagaagaaagtgggggaaagaggaaaatatctctgtatgttcagactttaatttcagggtaagatcaaggaattcatttgaccactggaagaagtttttattatgtgggctgatgcacaataacataagtttggacttttttttttttttttttttttttttttgagacggagtctcgctctgtcgcccaggctggagtgcagtggcgggatctcggctcactgcaagctccgcctcccgggttcacgccattctcctgcctcagcctcccaagtagctgggactacaggcgcccgccactacgcccggctaattttttgtatttttagtagagacggggtttcaccgttttaaccaggatggtctcgatctcctgacctcgtgatccgcccgcctcggcctcccaaagtgctgggattacaggcgtgagccaccgcgcccggccaagtttggacttaataacataaggaccaataacataagtttgtttgagtgacatggttacataatttgagatgagaagcaaagtaagaagttattcttatttggtcgagggcagcacatctcaattctgactccacattagaatcacccagagagttttaaaatttggattcagttgacatgggttggggtccaggtattaatatgctctaagagcatcccaggtgacccatatgcagcaagccttgagcaataccaccctgtgcagtggctctaacctgtgcttacattaggatcagctcaagtgattttaaaaatactagtgctggctgggtgtggtggctcatgcctgtaatcccagtactttaggagaccaaggcaggcggataacttgaggccaggagttcaataacagcctggtcaacatggtgaaaccccatctctactaaaaatacaaaaattagccaggtgtggtggcacatgcctgtaatcccacctacttgggaggctgaggcatgagacttgcctgaacccaggaggcggaggttgcagtgagccaagatcatgccactgccctccagcctgggcaacaaaatgagactgtctcaaaaatcaataaacagacaaaccagtgcttgggcctcagccccagatattctaatttatttaatctaaattggtctcagacatgagtgtgaacatgggtatggcggcacacgcttgtaatcccagctactcgtgaagctaaggcaggagaatggcttgaaccccggaggtggagtttgcagtgagccaagctcatgccactgcactccagcctgggcgagagagcgagactcttgtctcaaaaaaaaaagaaggaatataacatgtggtgaaataattgatcagcatacatcaaatacatataaaatacattaaatgaatgttaataggtggtgccataaaacaaaatatttaaatagataatacaggtaaatataaacaaacaaatgtatgcttgtattgctctgtcaccaggctggagtgcaatggcaccgtctcggctcattgcaatctctgcttcccaggttcaagtgattctcctgcctcagcttcctgagtagctgagactacagacgtgtgccaccacgcccagctaattttttagtatttttagtagagacggggtttcaccatgttggccaggctggtcttgaactcctgaccttgtgatccgcccacctcatcctcccaaagtgctgggattacaggcataagccactgcgcctggccgtttctttctttctttttttttttttttaagtctcacctggaagcaggcagctagttcctgcacagaggtctctggacaggaccctcaaatagactttacttttgcaaatgtctgcccatcctcacccgaccctccaaattcaaaggaaggatatgagctttccctgaggttctgcaggccacaggatgcatcctttgttgccctatgattgtttgactcatctgtcacctccacacctaagaatgctgggcactgggaggaatacagccaagattgggttttttttttctgtgccctgcagcctctggtgtttgccagtggctgacacacca

SEQ ID NO: 6863 - DNA, 78878 bp, Homo sapiens
  misc_feature (1)...(78878): n = A,T,C or G, or insertion/deletion polymorphism (see Tables 1-2)
tcttccctacaacctaaaagggagaggagttgaggcagatgggctaggactaggctttttggtaggcacattatagaagactgggtaagaaaggtgggttaggtttttttaaacttcaaactgttaggaaaacgaggcaaaagcaataaccataccatatgttcaaacagaagtaggttaaaatgtagtagttatcccttggtttacataggggattggttccaggaacttccacatatacccaaatccatacgtgagaactcaagtcctgcagttggccctttggaacctgagtatatgaacctgctctataagtgggtttcgtgtttggttaatgatatatttttgactcgtttatagttgaaaatagtccatgcataagtggacccttgcagttcaaacctatgttgctcaagggtcaaatgtatttacttctggattatgggatgatgggtaaattatttttacttggctacttaaaactcttctgtattttctaaatcttcttcaaagagctttgtttgtttttaatcagaaaaacatgccttgcatgccagttgttagagagatgcaagagaacagtgtgagtacatgggcaggccagatctggcaggctgtagacaaatgggaaccaaggctcattatgaagacagagagggaaaactaagtgaagcactaggcctcccctgcatatggctggctgttaggtatgctttacatatactggttcttctcctttagtaccctgatggtttaggccaggtaacaagaatcccactttgctttttgttccatgtcaatcctcatgacgtagctgttgtggcattaatgcgtttcaccatgacttcttcatattgtttttgtgtcagtaacccttctgttatgcttttactttcttcaaatttgggtaacacaactgcaatgtagccttcagtagatggctggaaaggaaagaacatttagtactgtcaaacgatgaaaaaaaaaccaataaaaggtatgtggatgagatcatattttttctctctcttttaccttttcttgaagaatagatggcttatggaggatgttttcattcacttccatcaaacgtcctctaacacaactattaaaaaaatttaagatttcagcatgtttacttagttaaaaaaaattgtttctaagaaaaaaaattacctccctttggtctcctaaatggtggctaaaaagttactcacctagacacagtatattcttcaccatctgagcagtaaatcttacagagaggtgcaagctctgttagaaactgtgccccctgtgtaatgagacggaagaagtaatcagttgatggacatttccactttcctttgagaagtagcccttaggtgtataacaggatgtattcctggaactggtgttttaaatcagttacttcagtatataaaaaccattcattaatttcagaacctatatgaatataagtacctactgtgtgccaggtgccatcctaggtctagggaaaaaagctaagacacatgataaatgggaatttacagactgataatatattttatcaactgtaaatgaaaaagctacatataaccaggtataaagatttcaaaagtatgggaaaatccatcaacaagaaacaatataaaattcaacatgacacagtatgacagcaatattgtataaagttagtttcattaagatttctacctcattttaatattagaacttaatagataaaggaacttatttaccagggtcaatcactaagactttttgaagaagggatattgttctttcccccccccccctttgtaattccccagtgtgttagtaagggatattttttctagttaagaaaaacaaaaacaaaaacatgcactttgaggaaaatgtggaaaacaaaagttttaagcagcaaaataaaaataattgacccatgagtcaatactacattttgatgtgtatgtatttgaatgtcatggcatggttattgtttcatgtactccactagatggatatacctggggaggctctcacaagtatctacagggaggctcatgagagccagtgcaggcatgtttcatgtgttgccctcttttctcccatgaatttttcctgtagtggacataggcatttcaggttaagatgctattctttatgacccctttatttaccactcaaaacatttttagatggcattcagatattactatattggcttcactcctccgcacgtgggttcttcattttaaaatactagagtcattgtgactttctgcttttggaaggaaggggaaggcttgtgttaaaagagcagacacaaaagagctaggtctgtgccaaaacagcagaaatgttttgatgcctttttgtcacctcctttgggagaatgattggcagttctgagatccagtgaaaacttactgtagtgggttcaatatgcaggtccctctctgttcttcacttgtaacaggagtgttacttttttttttttttttttttgagacagggtcttgttctgtcatccaggctggagtgcagtgctgccatcatggctcactgcagccttgactcctgtgctcaagcaatcctcttacctcagcctcctgggtaactgggactataggcacatgccaccatgcccagctaattaaaaaaaaattttttttttttggtagaaatgaggtcttgttatgttgcctaggtttgtcacaaattcctggcctcaagtgatcttcccgcctcggcttcccaaagtgctgggattacaggcatgagcaactgtacctgccttaagtgttactattttggacagagatttatcattgaaacttcagaagtcttaagtgttattgtaacttgtagactatcgtttaagagaggtgcatgcttttctaagtccactagtttcttgagtgaggaaaaatcagtaattgtaaagcacaataaatcagtaattattaggggacttcaggcctacaaaggggggtttgaataagggtctcctagaatagtgagagcaattagcagaaactcttagtatgaactcagtaaatgaacgacttaaatcatccacagaaactttcccaaccagtgggtttgttaagacattttaacatgtcactaaattctccttggcatgatactcttttaataatctgtccattttgcctagagttacagagggtagagatagcattctatataaccgagtgttgtgtgcaggtacagggggtgggtacatgagtattacattgacaatgctttaggaatggaaaaacagtaaggagcaaatatattttctcgtattcatgtttttgtttttgtttttttgagacggagtcttggtcttgctctgccgctcaggctggagtgcagtggtgcgatctcagctcactgcaacctccgcctcccaggttcaagccattctcctgcctcagcctcccgagtggctgggattacaggtgcccactactgtgcctggctaatttttgtatttttatagagatgggttttcaccccgttggccaggctagtctcaaactcctgacctcatgatccacccaccttggtctcccaaaatgctgagattataggcgtgagccattgtgaccggcccatgtttttctttttttttttctaactcccttgggaattttttttctgtttaatttacatgtggaaatatatggtaaagaagagttagtcacctaaattttacagaactcgacatactagtttaatacaactagaagggacaaaatatcttgttatattgctattagagttctcctttcaaaggcctgccttccccctcctccatcctgggcattatagggatagtagcacagaacctaatataacagatactacacctcctgagatacctaatttgggggagctgagaatttctttaggtgaaagtatacctaaaattagcacctcaaactgctagagaagtatgctaagcatatgctactggattctaaggttcattggatctgtcattaccatgaatatagaggatgtaagtagataatcacagaattacaggaacatacccgcttaaatttcccagagaccttgttctgaagtctgctacagttggtactgatctgataggaaatgcttttaattgtttttccactttgaagaactggatgagattctgccaatgtgatgacacatattctacaaggagaaaaagttgatcctgtgtgattgcttggaataatttttcctcccataactcctattggaacaagaatgtatgaactggtatttgtttagtcaaactatcatcttccccctttttcctttggctactattggggcataactgtagaatagagaatacaataataaaagagaaaacaagattgaatttctttcccaggaaagggaagagtaccagaggtctttaggtaggtagcactggggtagaagacaaagaaataaggcatgcctgtgtatacgagataccatacatgtctctaccgtagccctttctgtgggctctgaacagttcagtagttgggcacagactggccacttcaagtagcagctgatgatgtggtcctccatttggatgtttgagtaatcaaatttatatgttcagagtggccaggcactggaatactcattcttgccaaacaaactcctataataataccatttcaacacagtagaagataattaatgcatgtttgtttagtgaacatttgttcaatccaagaccacaagaccataccaggctacaataccaggaaaaaaaaatttttgataatttaaaattcccaatttgcttaccggttagagtgctgtagtatacagtggtcctcacaaaattttcctttgacatctagaagaatacatgagtctgttggtggctgaaatcaatatttactaccactatgtggtactttctttgggtcatatagttgataatgaagactggacacatacatgctgcatgctgatcacgggtatcccttcattactcaaaaagacatacctaaaggtttcctagaaagtatttaaagagatctggcccagatagaataatttattcaacattaaggtaattaactccttgctccatcttactttacactcacttcaaaatgagtacacgtagtatttttgctaggaaaatgcaattagcatcccgttctttatgatatatattttttgttggtggtttccaggactgtcctgatgttggtgcaagtccgacattctgggaaacccctcagtcatgggtgaactaggacaggttggtcaccctatgtttggccaacagaaaatatgctacaatatatattttttaaactgagtataaccattatcactgaatgaaaggaagaaaggagagtccccaacgatgctcccaccactggttctgcttacacaaaacagtacaaaaagaatacctacttctaagtggcagatggcgtctcttaaggtaaatgtatagattcttcttctttctaaatgtctctaatctaacccaccctcttctcgccatccctactgcctctaccttagtttcgatctgatcatttaaataattttatgtatcgctactccctgtgagagtgagcccctcaatccctccaggcacttaaggactgttgcaacctagccctccgcctacctttggggcctccgtttagagtactcatcttactgcgagcaacaccctagagctcgcactgcaatcgcyggccccagaatgcgccctgaagtatttcaggccaccaggtctttgcaaatgccattccctggggctagacggaacacagaagtccagtgccttctgacgtggggacggagagccagggagagcgcgcgtggcttatgatctgtcaacatagtctacacagcattaggccagtgcggccaaggagggatcaacatcactccgcacttacccggtttgtaccagcgagtgaagtatcgatccacgagcgaaggcaccaccggctccgcggcttcgggctcggtagccatggcgacctccggcgccgccacccccgccctccgggaccccagcgcttcctccgcgcagcccggactgggcgtgctcttccggcgcacagcgcgtgtcgtgcgcacgcgcgctgctctcaggtccgcaggttccacccccccccccgccccccccaattacagtgctttggggttcgacatcaaaacagagatcaaatacaaaagtttgggcagatgggcaagagggcagagggacaggggacgcggccaatgtagctcctctacctctacggtgccaggcctacaaagaaggccggccgccgtaagtgaccagaagcgggcccggcctcgccccctccgcctggtgacgtcactcccgcgccgcactcccagtgctgsggctgcctagttgacgcacccattgagtcgctggcttctttgcagcgcttcagcgttttcccctggagggcgcctccatccttggaggcctagtgccgtcggagagagagcgggagccgcggacagagacgcgtgcgcaattcggagccgactctgggtgcggactgtgggagckgactctgggtagccggctgcgcgtggctggggaggcgaggccggacgcacctctstttgggggtcctcaggtaagcgatccatccagggtaggggcacgggagtggacctctccgccggcggtgtccgggtgaaggagacccggagcckcctctgcctgctgcgggccggsgactggagtgcgggctgcaccacctctttcctagagccttaaattctttttgcagccttgccacctgctccatcgggggcgctgggaggcgcgacagcccagggatgcctgctgcccctccagccggacttaacccagcctcttgattgcttgcagggggttgataataacgctgaaagcgagagtattaattcacgatggaaggcggcgrttaatagaggctcgggtgctgtggtgcgggtcctttctcgcgtgtgagactttttcgtggaggtggtgtcctctgtgcttctccatctaacgtggtgttttacgtggctttctctcccgttaacgatgatctccgtggagacagtggctgagtaatcttcagatcccagtacttagcaagtgctcagtcggtgttggatgtaggccacaaaccggatcgtaaagrattcaactgtatattgacagccacggaactaatcaatgaatagatccgtatgaagagtaagcaaaaaggcagcaaagacagtttttcagcttggggacatagagtagaaatggtctgtccccaaatagtgggaactgtcatttgggggaagaatagcaagttctttgctttccaggtcgcatttgatgtgcatgtgagacatgcttgtgattctatcaggaggttgaaaatgtgggtttagtggtaagtttgggctaattcagtcagggctaggcatttaggcctaatcagcgtattggtgatctacctggtatatgtaatcatgcatgtgatgtctagccaagaggtggatagtcgaaggagcaagggaagaaaatgaagcagttatcaggaaattaagagagaatccacgattgacctttggtgtggagggatctttagcacatttaagaactgcgaagagtttgaatcagtggaggcaggaaggttggaggttgcagatgtccaagaaagagtactaataggcctaggtcctgtggcaatatggaggatattcctttcctagcctggaaagaagtggarggaagtcttcctccgagaagataagggaataaggctgatgggtgtgaaatttcagagaaactagttttgaggcgtttttatgatgtttaaagatgaaaaacgcagccaggcacggtggctcaggcctgtaatcccagcactttgggaggcagaggcgggtggatcacttgaggttaggagttcaagaacagcctggccaacatggtgaaaccctgtctctactaaaaatacaaaaattaactgggcatggtgccgggcgcctgtaatcccagctactccggaggctgaggcaggagaatcgcttgaacccgggaggcagatgttgcggtgagccgagatcgcgccattgcaccccagcctgggcaataagagcgaaactccgtctcaaaaaacaaaaaaacctgcatgatatgttagaggttcaagtaatttctagcagttcttgaatataattgtcaccaaaacttactaaaatcattgtcttcctcacttccatcatatataaacttacctttctcttatcccacattatatattatataattcctatgacacttgacattatcttctgtgtactattaggattgattcatctttattctttctatgtcatacatatgtggggtgccaagatgagagaagtctccttggattaaagtgacaataagaccggtgtggtccttgtaattgctacccctaacataagttagggacttacaatcataagccttaaagggatctgaatataaataactagcacagtaacatttttttcccctacttaggtaatgttatgcatttaagcaagcctgattttgccagaccaaagtagatgtcttgtttagcactcttttctcacgttttatattgtcctgggaaaagcctggccagaagaacaaagttactggaagtagttatgtcaggtcatcagggtccttgaaatgttggtcatcattttgaagtaaattgttgtcatgtcccagtattttctcttcccctttagaacagtaaatgcttttctatctttgatttcagtttttttatgaatgtataaaaccagtttataaatgaatagacctggtgaatattaaagtcatttcagattctcttcaactgccagtatataaaaatggattttcaaatagtgctaatcagtgggatacccttttgtttttcctcatgattttataaagatgtcctaatatgcaaaaataraatgtttccccattcatttgttctttcaactttcccaaaggaataactgatattacatcttttttgaagaaaacattctaaagttgagaatcttgcctctcctaaaaagaacataaaataggtttcagaattcctaatttgtagaccataactgtatagagtgggtcaggttgctgctataatccatacatgggtgtgtactcagagaggtaagttttttcttttcttggttattctgattctgactaccacttcttcaccccctgaatcatttcatttaaataaatatggtcatttatcactattaagctatttatttttctcttagagattaatgattcatcaagggatasttgtacttgtctcgtgggaatcacttcatcatgcgaaatctgaaattatttcggaccctggagttcagggatattcaaggtccagggaatcctcagtgcttctctctccgaactgaacaggggacggtgctcattggttcagaacatggcctgatagaagtagaccctgtctcaagagaagtaagttactgatgtagaatgccagcatgtgggtatgacccttgatttctcttcttccaaatttctttccccacatggtctttctttatatcttattgaatttatatcctcccaaataaacatcttttgcttcatatatatgccrtgttagacatagcttaaatcgtaatccttctttaactctgctgctattttaacctaagtcagtagaactctgaccttactttttgagtgtgtgccgtactttttaccctctttgtcatgcaaattctgtttataagagtggtttttttttttttttttttgagacggagtctcgctctgtcacccaggctggagtgcagtggtgtgatcgtggctcactgcaagctccgcctccccgggttcacaccattctcctgcctcagcctcccgagaagctgggactacaggcgcccgccaccgcgcccggctaattttttgtatttttagtagatgtgcggtttcaccgtgttagccaggatggtcttgatctcctgacctcgtgatccgcctgcctcagcgcccggccaagagtggtttttaattgggaatgaacacgaaagttgcccatggagctttctaaaagtttgagcccacatctcatgtcaactaaatcagaatctttagtgttggctcctaactatatgtactttaaaaacctctgtgggttggttttgatatggtcccttgattatgttcttctactaatacattttaggcagttacatcctttagtgccttttccccatactatagaaatcttagaaaagcatagctattagcatcatattttagtggacaattttaaagagaccaggcttattgtttttgtttttgtgtttgtttggcaaaaaggtcacattacctatttttcttgttagagatgacagagtagtgatatttctcaaatgaaagtttggattttcatctagaaaaaatatttttgaaagcttttatgtaataaaagaagcattaaaaagtatttctggaaatgttatcaattattcttgaaagtagactgggttaatttgcttgtgtttactttggtgaaaggtgaaaaatgaagtttctttggtggcagaaggctttctyccagaggatggaagtggcygcattgttggtgttcaggacttgctggatcaggagtctgtgtgtgtggccacagcctctggagacgtcatactctgcrgtctcagcacacaacaggtaagtggaagactccagtgaggggggagtctcaagcatcctcaaataggttacttgctatttgtggaagttttcaaatcagtagccataatagttacacttttgctaattaatttttgcattatatatttctttatttaaaaaattgttaacatggctttatctatatgttaagattcttctaaaactgagttttgtctgctgcatctattaatcagagtgatcagaatgttccaaatgagaatatatttttttaaaagttaaaactggctattcttatgtggtgtagatcacctcttatcagaccctcatcttgagttgcaacctttgtttctcaatttaggaagtctttgtttatctgacttagattttctgttatgaatgttgattggctaaatttagagtccctgaagtctaggcactaaagtaaatacattgtcattacctgcacatgtgatgactgccagtagagctagacttcaagcaattgcttctttctctactttagtgtatagttgagtttctgatttctatcctcaccttcttaacagcaagggtttcaaattacacttggctgattctttaaatcttcttccattacttcattagttgtgatctccttaacattgattatgtcacagaagttagagtattactaatagtaggataatgatagcagcttacatttattaactatcatgtgcctggcactttttaaagtgcttttcatgcaaatttatttaatcttcaccatgaccttatgcagtaggttgttgtttcctattcttcagaagaggcagttaaggcacagagtgcttaagtaattagaccagggtcacacagtaatcaaatggggtttgaccctagcagtctaaatctggcacctctgctcttaaccattccatttagtacaatcataaacctttacttgcagttcatggtgggaaatatcaaacttgtcatatacagcttgttttyttttcgtatttgaaagatagatgcttttactttccaaacattttgtagcattgtttcctggttactgagctcttccagtctatttatcttcatttaatggtgctgattctgccctttagtggcttctcaattgtctgaaaggtagagcccactattgtgccttataagcccctttcactatctgttccccacattcctttttagcctcatccccccattgttcctgtgtgtacgtaaaccttatgttttagttgcagctgatttttaactgctcttttttctggctttgtgcctctacactgtgttttcttcctggtctctctttcctgtccttattaccactctttgaaacacgtcagaaaaactttttctggactttgggccacttgtcattccctgtgctgagacgcattttgctttccagagatcttggtcattgctgttatcctctgtagggtcttcttttatctccctcgtgagacagctctgggaagaaaaagatatttatttctaatccctgtgcctaataacaggtctattctcttgatatccattactgaagaaatgtttgttgagtaagttcttgttttaatttttaaatataaatttttaatttttatgagtacatagtaggtacatatatttatgggctacatgagatgttctgatacaggcatgcagtrcaaaataaccacatcatggagaataggatatccatcccatcaagcgtttatcctttgtgttacaaacaatccaattacagtcttttagttattttaaaatgtgcaattactgttgactgtagttaccttgttgtgctatcaaatagcaggtcttatttattctatttttttttgtacctattaaccatcccaacttccctcagcccctcactacccttcccagcctctggtaaccatccttgtactctctgtgtccgtgagttcaattgttttgatttttagatcgcacaaataagtgagaacatgtgatgtttgtctttttgtgtctggtttatttcacttaatgtaatcatctccagttccatctatgttgttgcagatgacaggatcttattctttttttatggctgaatagtactccattgtgtatagtaccacaatttctttatccagtcatccattgatggacacttaggttgcttccaaatcttagctattgtgaacagagctgcaacaaacatgagagtgcagatatctcttccatatactgatgtcttttcgttttgtttttttaattgttttgattgaagttgcagtcagtttttactgagatgctagtgtttgaatctctcttttcaattttctctgtctcagctggagtgtgttgggagtgtagccagtggtatctctgttatgagttggagtcctgaccaagagctggtgcttcttgccacaggtaagcttgttactggtgcctcactggcttttttaaaacattattccagatgtcttacaggcttcatcagctttaggctgcttgaatttcaaaaaatttctttgaaccagtataataccaattatgaaccagtataataccaattatgtatgtgtgtgtgtatatatatataaaacgtagagtgatttttttttggtgactgaagttttgcctcttagtctatcattataaaaagttgtttcatgtaactttttaagtctttgggagtaagaaacaaagtcataaaacttggggaggctgctaagtccccagttagagttaaaaatgtcagcaatatgtattttaacttattctaagagttgctgtatggacacattctaaaagcccttcttgggttctgttgctgtttttcccctttaagtctcatcattccagatgagtttagtaaaccagctccactgatgacatttatatttagaggtatcttggggacaaggagtgttgaagttagtggaggagggctttgtggacttttaagttcaactgtacacacattaatagctgagcataagcaccaggtgacttatctagggaaagctttttggggttttttgtcattgttgtttttttaagtcaaagcattttggatgaattctgtctgctctgttcagactaactccagctccttagcttacagtgccataggtacttaggaatggcaaatttgttacatgaaaacaaaatcatttttgtttgtgtttctctaaggtcaacagaccctgattatgatgacaaaagattttgagccaatcctggagcagcaratccatcaggatgattttggtgaaagtaagtatagctttgtgcaatattttgtgacctacrtttcttcccatttttgaccatttccttgtgcactaatagccatgtcattaggccaaagaactgtgaaagttaaacccccagctattaaatgtctattagcccagttccttcagcccatcccaaatcttaaaaggcctactgatgcctctccaggtctgagggtttaaggtcacttagatagttattacccaaaccctaggaaagtcttaggctgggctttcagtgaaagggactgtacaaggtagtatttctgggatacagttttagggagaagaaaagaagaaagatggaatagaaggctggtttttgttactacgattagatccaatctgcatttccatgggaacaatcagattattttcttgctaaaatctagccarggtcatctgggcattaaggctgtgggggtattgaagggcagtgcaggagaagagagacgcttattaagcataagctttggccatcttgaagtcacaaagtagctggcctgattgaagagggatggggaagaagatgttccaacttctgttatggtctaacttcctgccttcttgctccatcaactctgagaaatcatttagacaacttctacccatttatttacaaataatgtatttgttcagaaataattttggagggctgggcacagtggctcatgcctgtaatcccagcacttttggaggatgaggcaggaggattgcttgagcccaggagtttgatactagcctaggcaacgtagggagacccagcatctacaaagaatttaaaaattagctgggcttggtggtatcagcacagtaatgacatgatgtgcaggtactggggtagcataagggaaggaaacgagtaactagagagggatgatttatttcccctaggaggccaacttgagctgagtctcagctgaattggtgttgggtaggtgagggataagggtggggagtagtcagctgaattggtrttgggcaggtgagggataagggtttggagtagtcagctgaattggtattgggtaggtgagggataagggtggggaacagtccaagcaagtgaatgtgtccatttcaagtgtccatttcaagggagggttatttcatagaaacattgtgggttactcagggaactgtgagtaattcagcattgctgaagtggcagaatgtgagtgtagaatgaaataaatggaacagatttgattgagtttgtagtagggaatatggacattgagttatagttgatcagccattacaagttttgatgataagaggtttaaagagatttatttaatagaaagatggctcgtgatggcatatttttgttgtttttgtgtgtggagagggaagagatgagaggcagggtgatcaggtaggaggttgctacaggaatccagatgaaagataaggaaggtttgtgtggggctagaagcaggaatcattcaggaaaaaacttgattcacaatgaggatgggagtacattttttagaattagctgggaaacttttttagaatatatgtgcatgattccccttctgccctaggccagtttgagaaataccaatttagaaagtgaaataaataggctttgcgtatgtaaggtgaataagaaaaagttgagcaggactccagccagaacctcaggtgttgggaataaagatgccagtaacagggaagatggagaagtgctggtctgtaaggggtgggtggtgagatctgttttggatttgttgaaggaccatatgtgattgccatgtggagtatgcaaatataaggctgaagctcaggagaggccagagctatggactgagagtagtgggtatgtaggaaattctgacagttttgggaacagatggactgtctcagggagcagatgctgtrcaggaagagtctagaatccagggtggaactctggggcatccagctttgaggacagtcagagagagagtaacagcacacagtatactttgggatgggaaagtgctctgggcctggtgtttcccactgactttttcacacaaatcctaatgcagtaaatcaaaggaaatgtaggccaagttaagatcttaggtctcagaaatgtgtttctcagtacaaaaaaaaaaaaatcattctatggagtgatgaatatttttcctctatcctggggtcagtagacttgttctgaaaagggctaggtcatgaatatgttcagctttgcaggctgtatgatctgtgttgcagctgctcaattctaatgttgaggtgtgaaagttatacatgatacataagcacatctatgttccagtaaacgtttgtttgtaaaagcagatgtaggctgtagttttgcaaatccctgctgtaaccscatcatttcttgtcttccattggaaaagttctctttcttcattccttggtccttaatctttctgtggaaacttgcagatagaagcctgggggtttgcaccaggatagtcactaccatttgtacgcagcagcaattgaggtactgtagcacttggatgtgagcagacaggaaatgrtcatatggacccataatttataggaattgcaaacagccctgcttcatcagaatcagaatcaatggcaggaggaaagtattgggtcctggattaggtgatgttttcaggaccatctttattgtgcttcttgcaaatggatcctacctccaggaacagaagggttgtgttgtttcagcaactctgcctaatagtttatataagagaagtgttacgatctagaaagaaccccagtcagcctggaaggcagaagacctgtgttctaacttttggctccaccattagggagggtctcaatctctaagtctatgtgaggagctgttttgtgacctgcagcccctctatcaccagtgagagcttgcaatcagaattttattcccagttctcatcttggggttttatgttccggacatattttgtaaactctttatgtttcattcttcttacttataaggtgagggtgagatcgctgacttgtgtcatcaaagaaacttggaatatgtaagatggcagtaaaatgctttccaaaataaggaagggcatttcaaattcttcaaagtcactgctgcatataatatgaaatgggttttgtttgtttgttttgagatgggggtctcgctgtgttacccaggctagagagtgcagtagtacaatcagggctcactgcagccttgaactcctgggttcaagtgatcctcctactttagtctcttgagtagctgggaccacaggtgtgtgccatcatgtccagcttattttgtatactttttgtagagatgggtgtctccctatgttgcccaggctggtctcgaactcctggactcaagtgatcctcctgcctcagcctcccaaagtgttgggactataggcatgagccaccatgcccagcctgaaacataggtttctcaaatattgactgctggtcaatttattgagaggcgttagaggacctgagtaattgccaatgactaacttcatgaagaatagcagtgaaactgtttttgtttcatttcatgtggcttattagttgtcttgccaattgttctgtaggcaagtttatcactgttggatggggtaggaaggagacacagttccatggatcagaaggcagacaagcagcttttcagatgcaaatggtaagtttggtttgatggataaaaagccttgactggaacaaatgtaagtttgccacccaccaggaactctttggtgtccacttagatgccagtaatgaacagttctcttctgctttagtaaaactgcctagaaccttcaggaaatgaatccctctagaaagatcctttttttccttgttattgccaagttgctttgtgatttattttcatagtagcaaataattataaccaatattcatcacccagtttaaaaaataaaacatcacagacaaaggaaaccccctgtgtatcccgtcccgatgtccctccccttcctctccagagagagctgccatccttcattcacatgcatgttctcatacttttcccatatatgtgtatattagatatttttctttttctgttggatgaaactctttgttttccttacttctggattggaaaattctgaagaccatataatgatgtcttgatgactcaaggcaggactttttaatcttctaatgtaggcggggcggsccctgaaggcagaggtgtgtggacacaagaagagtgcagactcttggggcacctggggaagtagtgtccgtgtcacattaaattcatttaaactcttatattttattttaatttatacaatatgaatattttttaaaactatgaattgaaaagtattacccttgagtaaaattaatgccccaagaagatgtgccatatttaccctctggcacactaccaagtacccccaggggcattacagatctctgttagaaaagtacagattacattatcctcataacatttagaagctatgagaccttggcagggaagtttcctaatgtttctgagcctcagtattctctgtaaagtggacaacataatgtctccttacaagggttgagatgggcaggtaatagcatatataaaacagctatcatagcatcagcacagtgtaggcactcaaatggtagttgctgcttttrttttagtagacaaataatttttgaaactttttaaagcgtagtttttatttcaaaacaactttattgtgagtaaaatatgcatagtgggtctaatttaacattctgaaagctattgacttattagaacagtaaaggattattagagggcagaaacatggagtaagtactctgagacacaaccttgcttctttgggggtgatccactacaactgcccagctttggacaagtggttttcatgtccccctgatttttaagtgattttttttttttttggcaggacttaaaaggtatccttgactaaacaggaacttgaccaagtaaatagttggtgcaatttgaatattctttcttgctataagcaacaagtaaattatggtacagctttctaagaccatatcttttcgatttaaaaatagcactttactcatacatgttatgacatgggtaaacctcataaagattatgctaagtgaaagaagccagtcataaaagatcacatataatatgatcccatttgtatgaagtgcccagaaggggcaaatccacagaggcagaaagtagagtagtggttgggtagggctgtggggtggggtggggaaggggtgactgctaatggatatggggtttcttttggggatgatgaaaatgctcaaaatttagattatggtgatggctattcaactttgtaaatatactttaaaaacattgattcttaccactgagtttaaacaaccaaaaaaaaatcccaaggtgcattgaattgtgtacttcaaatgggtgaaccttaataatatgtaaattatatcccagtaaaggtgttaaaaaatagtactttaaaggaatctatggtagttttgaaaataaggcagttttccatactttgttaaactctggagaagatgacactttactactggtacctgctagagtaagacttatctagtattaacaaaattagggtttattaatggtataggatgatccaggtaatgggggaaaaaaaccgagcatcctgttatctaatgtactatccagtaaactactctagctttttttcatgaactttttctaaaggctttctagggcctcgtcttggtttgaaagttcacagctacccttcagaaaagaaaacaaaaatccatggagtaggcagatacaagtactcatgtgagcataatttactttgattttttaagttgtgttattctagccctcagcctgttccctgcctgggctctcctagtgcccagtaacactgattcaagaggttgcatttagctgggcacagtggctgatgcctgcaatcccagcactttgggaggccaagttgggcagatcacctgaggtcaggagttcaagaccagcatgtccaacatggtgaaatcctatctctactaaaaatacaaaaattagccaggcatggtggcagatgcctgtaatctcagctacttgagaagctaaggtagtagaatcacttgtacctgggaggcagaggttgcggtgagccaagattgtgccactgcactccagcctgggccataaagcaagactccgtctcaaaaaaaaaaaaaaaaaaattgggtgagagggaggaattgaggaggataccaagggttgggcctgaacaaatggaagcataattatatgtagaaatttctatgagctactcttctagaatagatgactcaataataccctgcttgccatctacgttttctgtccttaattatttccagttctatttcatataatgcctatttcaggccttaacccttcagtaaaggaggtttggtttctataccctaggacagtttcattgagaataaattttkttaggctacctatgtattccctactgtgcagactacagtacagtactagcagaattcttaggctgttactagaatatgatgatgaatgcccgggtggtcatctgtctcccacccggtagagttggcttcaggattgagatacacgtggccctggaggagacgtttcttcccgtcatgctgcagaatgagaacatttccatgttttcgtcattgtctgctgctgcctttaccacctctgtggctcmtccctattcaccttgttcacatcttaactcatctgtgccctgttgtgaagcttacacaatatgtaaacaaaactctaccctgttggacaaatggaacacttgtttccttgttgtagttacctgataggttccttagctcattatattcaggatctagatctgtagctcttttcctcttttgctgttctcagaggccactttttttttttttaatgccgaaaggaggattttgtttgttttacatttttttcttctttttgatgatttctgcgttctaagaaccaacccttggatggtttctgattctagaggcaggctttcaaagtagcttaaacctcttaaaaaacatctgtatctagtggtctgaggcttgtttgattctgggatacttaaggtcccccagtaatattggtgtttgttcccctttttagcatgagtctgctttgccctgggatgaccatagaccacaagttacctggcggggggatggacagttttttgctgtgagtgttgtttgcccagaaacaggtatggaaatatattgcagttaaacaacaataaaaaatttttatcttattaaaattaaggaaaattttctttcttttgctttgagtagggtattaattatacatatgaggcaaggatgtgctgctttaaatgtgaaatgaggttagagttaagaattagaagagtcctttgaggccatttggtccatcctcctacctggtggacacaaatttgtaacaaaattaatctaattggctatgtaaaaccatggcagtttttatttgtaaggaaggtgtttgaatagttctgaattgacaacttttatcataatgttttaagtgtgtatgtgtgtttgactccactcccgcacaggggctcggaaggtcagagtgtggaaccgagagtttgctttgcagtcaaccagtgagcctgtggcaggactgggaccagccctggcttggaagtgagtgggagaagaaaccttagagaaattcttggaaccagagtagaggtggtggtacacrtggatacagatgatacagatgtttgtgtaacacaaaaggatttttacgtttcttcatttggttataaggctgtatctatctttgtttcttcttttttttttttcttattccctgaagtctgaattcaactcgaatagtagattttacgcttcttcacagatttcrttgttccaaggccgcatatattttgcattcctaactcttaaaaggctgtggttttaaggcagggtatatatgaagccattgtacagagcagaaaatggtgtttagaagggaaggcccagtttgcaaggctctgtggggcaaatggtgcttttgtggaaattagggaaagagcctccttccttggcacaaaattcctacagcagaggatctgcttgccaaggagcatgcaggctggattcagaccctgctctttccttccattctcctccttggcccagtacccttgtgcaggttacaatttgcctgtcatatgtggctgcctgattttagatagaagatgtatctcctctgtttcggtgatatctgttgtatgtagacctcttgtttcccaccagtatctgaatggtattatatgatagagcagaagagaaatgtatttgaattaaaaccctagagacaaatatgaataagatgaggcaattaagatgttttcaacatttggtgaagtcttaaaaaagacctactggagcatagaatatttgctgaagttgtataatggaaggagaaatagattttgatttttaggacattatacctggaatggtttagataacttattatttttaaagtcatccaaatgcaatgtaaatatgtaaggttttgtgggcaaatggagcctctgtgtaaaacaggaaaaggcactctttcctctgggcaagtacagtcccacagtgggatgaaccgctcgccgagagacaagggacacatgggatttaaaacttccttggataaagatattcattaattcgttcattcattcattcatgtttgctggaaaaaaaactcttctggattttatctattctttagttaggtgagctttcgatattgtaacactctgagtttgctttaagaccctcaggcrgtttgattgcatctacacaagataaacccaaccagcaggatattgtgttttttgagaaaaatggactycttcatggacactttacacttcccttccttaaagatgaggttaaggtaagtgcctgagtttgtttcaccctcgaatgtagaggactttccatagctatagagggaattttttttttttttttttgagatggagtttcattcttgttgcccaggttggagtgcgatagtgcaatctcggttcactgcaacctccgcctcctaggttcaagtgattctcctgcctcagcctcccgagtagctgggattacaggcttgcgccaccacagccagctaattttgtatttttagtagagacggggtttctccgtgttggtcaggctggtctcaaacccctgacctcaggtgatccacccgcctctgcctcccaaagtgctgggattacaggcgtgagccaccacgcctggcctatagaggggatttatatttgatatggatatataaatagtagctttagagtaaatagtaataaaaatggtggcttcctagaactgatttttatttaataaaatattgtttttccagtgattttgcaaataatagcatttgtcccccaccttagataaaacagaagtaggaaataaaaatgctagtttttattgtttattttgacaaaagcataatttttccagtaatgaagatgtttttcatttataacatttaaatcttaagtggtttgtataccattaagattcttgctgaagtgagaacacatcaaatggtatctctgtgtaaaattttaaacatcctaagttgagagacgagtttaatgaactcccatgtaactattactcactttcagtagataccaacattttgcaaaactattttcatcggtccgcaactctttggcctatacatayatatacttacatatatttttatttcctggagttttaattctagaaatcatattttcaatatttatttataacagttaaggacatttttctttacataaccataattctattattacatcttatctctgtgttgtctaacacccagtccatattccagtttctctgattgtctaaaaatgtcaccttgtatttggttaagtttcttaagtctcttttaatctttaagcataatgtatttcttttttttaagtcctctacataataatgacatattttacagatttgtttaatgcctctgtaggttagtgatttacagctagggatgagctcaggtagtgggattatttgatttgagagaggaartacagctattataaagatttggaagtaaatccataactgaaagccartgacagatcttttttcccttctaggtaaatgacttgctctggaatgcagattcctctgtgcttgcagtctggctggaagaccttcagagagaaraaagctccattccgaaaacctgtggtaagacagctgtagtaccccagccttctgccccataaaacgtagttgaaagtagwcaggtatgggatttccttcatcccttctacttagtcccttagtagaatcaaagatgctgaagtgggtaggtggaaatgggggtggttaggttttgattgattgtggatttcagtcatgtattggttggggttctctagagaaacaaataatacatatatataattcgtccctcagtattctcgggggattagttctaggattgcccatggacgccaaaatccacacatggtcaagtcctgcagtcaaccctgcagaacactcagatatgaaaagtcagccttttgtatacttgggttttgcattcctcaagtaccatatttttgatgtgygtttggttgcgggtatagaatccacaatatgaagggccgactgtattcattgaaaaaaatacgaatataaatsgacctgtgyagttcaagcctgtgttgttcaagggtcagctgtacttacatagagagacggtgagagagggaatagggtggggcgggagggagagagagtaatagagtgtggatagatttactttaaaagattagctaatgtaggggatggcaagtttgaaatttgtgggggcaggttggcaggctggaaattcaggtaagaattgatgttgctgtcttgagtatgaaatctgtagggcaggctggaaacttagggaggatttctgttacagccttaaggcagaatttcttcttttctgcgaagcctcagtttttgcttttaaggtcttcagctgaatgaatgggaccttcccacattatggggaataatctgctttccttatagtcagccgattataaatattaatcacatctacagaataccttcacagcaacatctggagtttcagcagatagctgggtgccatagcctagccaacttgacacaataaaattaactgttgtaagtcatcacgtgctttccctagtgcatggtattaccacagaaaaaacactaaccaaaggaattctgtggacgtgaaagaagatttagattaagcgtaaaagtaagaatatttttatagcttttaaaatgtataagtgtgtggttttaagtattaaataatacttgaaartgttagaaaataagatgagaaaaaaatctcatagttctaccacttcgtaataatcactattcaaattttcttgtcttctaggtttttcatgtatatatctcagtatagctatcatcttgtttttgttaaaagygtagtaggtatgggccaggtgcggtggctcatgcactttgggggcccagcactttgggaggccgaggcgggcggatcacgaggtcaggagatcgagaccrtcctggctaacacggtgtaaccccatctctactaaaaatacaaaaaattagctgggcgtggtggcaggcgcctgtagtcccagctactcaggaggctgaggcaggagaatggtgtgaacctggaggaggcggagcttgcagtgaatggagatcgtgccactgcactccagccttggcgacagagtgagactgtctcaaaacaaaacaaaaaaaagtgtaggtgtgatacatctgcatcattttaaattgctgtataatactcgtttattctcgttcattaaatctcatgctgttagacatttacagttttgtcatttctcattattgtaaacagcaatgcatggtacatttttgttcataaatctttttacttgattattttctaagtagctttcaaactctttaatcagtagaaccccccccccctttttttttttttttggagacggagtctctctctttcccccaggctggagtgcagtggcccgatctcggtcactgcaagctctgcctcccgggttcactccattttcctgcctcagcttcccgagtagctgggtctacaggcgcccgccaccamgcctggctaattttttgtatttttggtagaggcagggtttcaccgcgttagccaggatggtctcgatctccatctcgtgatctgcccgtctcggcctcccaaagtgctgggattacaggcgtgagccaccgtgcccggcctcagtagaacccttttaactgcaatgttaagaaactcattattcattcaacacaayagttcttaaccctggccacacctttagaaaaaaaatgatattcaggcttcatctcaagagttcagttcagtgtgttggaatggagattatacgtaagtatttaattaaaaaccaaaagcccccaagtgattttaaacagccgcagttgagaaccaccgattaaccagtgtgtcaagggatggcactgtgatatgctgagcataaaaatattgcacaggatgaaaccctgtctctactaaaaatgcaaaaattagtccggcgtggtggtgcgcgcctgtagtcctagctactcgggaggctgagacaagggaatcgcttgaactgggaggcagaggttgccgtgagccgagattgagccactgcactccagcatgggtgacagagtgagactccatctcaaaaacatgtatatatatatatacacacacacacacattgcacaagaacagccacaacatctgtgctcacagaacatcagcatgtggtctaacttcaaagtgttgtaataatgcggtttgagactaggttatgtttgctgtgatcactaagttaagcattagtgagcaaggagattgagaaaatccttaatataaataatatttcttaatataactataattcctaatataactaaggtcttaatttatatgtcatctgtttagtaaaggttggttttggcatgattaagtcttgcttgcttaatagatgttggaaggataatttcatgcttatcttctttggacagctgaatcaggattaatacccagatagccttgaacataagtgcttgcaaagcacctgaaagaaaataagcatcttaagcccaatacaacacaatgatgctagtctagatcttggattaagtgttttaatacttttactctaattgccaagttatcttcttcctaaatcttcatgagaaaacccactaaaagaatgctttttcctggtagccttccattgtgatcataaagtttggaagtaaagttgaaaataaacatgtgggccagrcrcggtggctcaggcctgtaatctcagcactttgggaggccgaggcaggcggatcacaaggtcaggagatcragaccatcctggctaacacggtgaaaccatgtttctactaaaaatacaaaaaaaaaaaattagccgggtgtggtggtgggcscctgtagtcctagctactcgagaggctgaggcaggagaatggcatgaacccgggagatggagcttgcagtgagccgagattgcgccactgcactccagcctggccggcagagcgagactctgtgtcaataaaaaaaaaaaaaaaacgaaaataaacatatgaataaaagttaaaaatagaaaaaaaacaagaaaataaacatatatttctgaccttattgattcttgatattttatctgcatggaaagctattttttggcagttattattgttcttattttagagaygaggctgagcaggaagggtcctttgaaaaagaaaagattgcccttgaacccctctggcaagtgggatgaagtctgcttcccagcctctaacggccttcttttyattttcccttgcagttcagctctggactgttggaaactatcactggtatctcaagcaaagtttatccttcagcacctgtgggaagagcaagattgtgtctctgatgtgggaccctgtgaccccataccggctgcatgttctctgtcagggctggcattacctcgcctatgattggcactggacgrctgaccggagcgtrggagataattcaagtgacttgtccaatgtggctgtcattgatggaagtaagctcctgggaagtgtgtccatgagcctgcaaggggtcctgagcctagggcctgcagatgtggtggtttgactggaacagtggggaatctttatttgttttggctgtttgggttacttgtttttttattgaatgggatataaggtggggtatgttctctcctgagaaccattgtcccccctcccccaccagtttcctgttatactgcatctgtggccttcacacgtttacttgcctggcctttgaagacactgaaaactttgactctaggtagagaggatgacaacagtacagtcttgtgggattgggtgtgttagctttatctgtttgccctgacacagatttataattgacccttataccaccccacttgtgttgctttgtttcctgatacaaatgcttgctgatatatacctctccagtatgttcagttcatgcataaacgtttgcctaatatgaagattaggtttatattttataatgaggtagaaggtttttttagggggtggggtgggaagggcaagactgaagagtcaccttaatgaatagtttcattgctgatatgaaagggagcactggcttctaagattgtaatgtgaggtggtatattaattcatattctgtgtaatattctacataatactgattttatagtcatgtattctatatagagaacttaatcagatctgygttattaccaaatccacacataggaaagtgctttaaggattttgaaagtattaattcccttggtttagtgtggcttggttgcaggcccaggtttaaagctagaggtctgacctcttggcctttttgccttagtcyctggcacctgaaactccaggtactgagatggactcccctaggcctagaggtgacaatagccaattatggacagaacccatgacatttccccatcccacactgtttttagacttgttcctgagaaaaacrttgaaagttatttttttgtgaattgccattattgtttagatatactgtgatgttcagatggctwatcttacaaattgaatatcccyaggtctaatcctcttctttctttttcactgcagacagggtgttggtgacagtcttccggcagactgtggttccgcctcccatgtgcacctaccaactgctgttcccacaccctgtgaatcaagtcacattcttagcacaccctcaaaagagtaatgaccttgctgttctagatgccagtaaccagatttctgtttataaatgtggtatgttataaaacttttgccaagatgttctgaatcaagtcccttctactcctacataaaagcaaattatagtttggtgttgccataggtctagtgtttctcaaaatttttaagtctgcagttgatatcattatcattatgatatttaattgscttgggtttttgttttttttttttttaatcctatactggtttgtacgagccattccttttcccttactgacttgaagagtcagttatttaagaataacattggactctggaaataacatagtatgttatacattgttaacatgttttactcttttcatagcctttacacatattttcagttgatctcatccctcctaggagctgtgtcagagatggggttttcctcttttgtagatgagggaacacagtgtcagaggttttgtaatttgtttgaacaagaatggacaaggacctcaacacaggtgttctagctcctaatccacttgtcctgccacagccccattgctgtcagttcttcattactttcctgatgtgctggagaatctgaaatttgtttttacttgtgagytctgtggttatgtcataaattctgctggcatatggcagtgttagccttgttttcaaatatcttttgaattctcagaaaaagcctagatagttgccaagagagaataatcaaaattaattaatttaaatgggaagtccttactttcatatcagcttttctgttaagtcagcagcccactgtgtacatggatcctatctggatgtmtcaccagtttctctgattatagtttcagtgtgtaaaatgctgttacagtcctccttaaacttttcaaaatagctttaaaaaaaagtgcaaatatgttcattgtcaaggcaaaaagaatcagatgtaagcttttgtgggacttaactgtatgatgctaatgagtttatatgtcactttatgatgtatggtatgttttgttctgcattcacttaaaaaatagctttatatcattcatctatttaaagtgtacaattcaatggtttatatgtgtgtgtatgaatatatatacatatgtatatgtatatatatgtatattcacagagttgtacagccatcaccacgatcaattttaggacgtttttatctcctcagaatgaaaccctgtaccaccctgcattcattttacttgagagaaaactccctgtgatgagataggacaggttgagagctccacttttgaaagattgttcggcatcaatatgtggggttggccataggtcaggggcacctggaggcagagattctagttaggagaagctgttgtcaagtgtccaggcaggagctagcaagagcttgagccagagcagtgttcatagaaatggaaagaagagaaagatcataacaaatccatgaagtaaaaaccctgagaagttaaagaacccactggggagagtttggatataagagaatctggaaaaagagatcttggactggaacaggtcagggctccgtgcccaagtggaagggaaattaagaacttggagtcaagtggtagacatttgagtggtgtggagacaagttcgttgccaaagttttcaaagatkgtgtttgatgcatcctgagtatcactcctttttccccctcattgcttcttgattgtttattatatgccaggcttttttctagtacttggcttgttgtactagaaaactagttgtactttgtctacaacttgttgttctaggtgtagacaaaagatatcaattaaatatgatctatcagatggcaagtgctgtggagaaaaattaagcaaaataaggggtagggagagcttaaggataagggtttacagggggaaggtgtctttcctatttagtgtgatcccaaaggcctctctgtgaaggtgacattgaagcagagacctggtgagaatcacagtgggagccacgcagacatctggggtaagagcgtcccaagcattctatgcttgaaggcaaagaagaaaaaagaaagagcgttccaagcagagtaaaaagcaaccaccgaagtgcctgttgtgtttaggaaatagccaggaggccagggtggctgcagcagagcaaaggaggggaaggtggtgggtgagttcagagtggtgatgggaatctgctcttgtagggccttgcggcttttactccgagtgagataggagccaccagagggcttagaacagaggagtgcagtgttctggctgaattttttaaaggcttgcattggctgctgtgcagtgaataaactggatgaagaatagaaagaaaatgtcttttaagcaggtgcttaggactttggagaatttgaggatattgagaggtggttgaagacagtggaggaaattgtccacagcactgggctgagagggtagccccttcacctggtcttgctgagatgtggcctttgtcagggaagattatgactgatgtgttcttaagaggaaagcagarattttaaggaggttgagatgtgattattttctagattgctgtttgccttctagaactcattaattgcagacaccatccccttagtattaggtgaaatcttataatttacgatgatartatttgcatttttgttttccaggtgattgtccaagtgctgaccctacagtgaaactgggagctgtgggtggaagtggatttaaagtttgccttagaactcctcatttggaaaagagatacaagtaggttcttaattatcttgggcttctgggaacagaatcagccagcatgcagtcctaaattcagccatctgrtaacagttctatgcctgttgctgagtggaacaagaaataaagacaacacccaggccctgactttcggatctgattggagaagccagtcakgtagtttgtctgaatgccatataatttgataggtagcaggagagcatgagttgtaagccagcctaggacctactcccaatagcgcttggttctccaggaaaaatcatgtgggaaagatggagatgacaatgataaggcggagctgcattctcttacataaatgggratgtatgggttgttaacatggatgacctaatgcagcctctgtctttgctccatcccagaatctagaacttctgggtgctgtgctttgaggctcctgggatggaaatcagaatgcattcttccattgaaacagtattgtaaacaattggatgttattkaatacctcaggtacactataggcatttgcaaaatgacctagaawccaaattataatgccacatctgtgagagaacttttttaaaaagtaccacttattgagtacttacagattaaaaaaacaaagtgtagaggttaggtaacttacccaaggtcatggacctggtaactagagaatttagggtttgattctattctgtttgataagtccatgttcttcattactaaactactctgcctccagggaacatttattgttagattaatagaaataattaactgagtacaacaaatagcagaatttaataaataatgtttcttaaatatatgtgatatatttaataaatacagcagaagtgttcaacctctgtatgattttgaggctgcctgtataatgcttagtagtttttaaagagcatttacatgcattatttcacttcatagacttgaaaccactagagtagagatagaggacaaattagaaagtatgaggcagtttagaatatagtttcatttaaaaaaaattgatggggataatgccaattcgtctgagatttcacagaagacatgagtactcatcgtgatcttggggaagggataggtttggggttggcaaagaattgggaacattgggtctggtggggaagaaagtgtcagtgaaaaccagaggtgggactgatcctccatgggatactctatgtgaatgcaatggagagcctgagtccggggagagatgtttgaggaggaagatcaggctagtgaccaacttcttcagtgggagctgcggatttgccacctgatctaaaaggcaggaagtagccattgtcggttcctacgtgaggtgacaagaacagtgcgctggtcaggtgtataaatgctaccaaagaatgcattagagacatggagaccatctctcaagctagtcagtcagtttaatgtgaggtgcttaggaaaggacccattctactgcaagtgacatacctgccagagcctggtttgaatgctggtaagtcatggcagtggaaaagctctggggttcattagtgtagggactagggctggtaattttcttgtgtagtcagtttcctcaagtgttctcttcaaatttaaagatttcagggtaygagaaatttagggaaaatataaaaacgtattcttaagccagacaaagattaattttagattttgtagtatttggtagtatctcaggttttgyccctccaaataattaggagtggactgtatacaagatgcttcagtcttccttcatccaggaacgtctcagtggtttttaagttttattcatgtcttggatattcttcaatatttacaatagaatccagtttgagaataatgaagatcaagatgtaaacccgctgaaactaggccttctcacttggattgaagaagacgtcttcctggctgtaagccacagtgagttcagcccccrgtctgtcattcaccatttgactgcagcttcttctgagatggatgaagagcatggacagctcaatgtcaggtattgcagtttttccctgtactccacatgttaagcaaatggagttaggtttttgtcttttatgagcatacaacttttgacttctattgatcaaggttgaggagcagtagctttcttgttagacacacttaacaagaaggttaartctagttatgagccatgtcaaaataacagaccaaaaatatatcaaaaagtggtgaaaaataggataaatattagtagatgaagcaactttttaaagatatgttaaatattttaatttagcatctacccacatttttccagcgtgattgttatatgttataattgattttaataactgtcaagcataattagagtggctaattctcatgggctaatgtgatgggaagaaattttgtataaatgcagtcatgcgcatatatgtgtrtgtgtgtgtgtgtgtgtgtgkgtgtatacataccttttctatgtttagatacacaaatacttgacatggtattacaattgcctgtagtattctgtaaagtaacatgctgtccaggtttgtagcctggtagcaataggccataccccataggctaggggtgtagtaggctacaccacctaggtttgtgtaagtactctatgatgtttgcacaatgatgaaatcacctaacaacacatttctcagacgtatccccatcgttaaatgatgcataattgcacatatatgctttgttttgatgtggtgacttcaaaatgcttcttccagcctcctcttctatatatcctattttgtacctgactacatttaccattagaaagtctctattcttctttgctgaaatttcactgttctctgggcctgagttttgttttgattcctgactatatcttcattatgtaacaggtttcagttaatgaatgctcttctgtgtaatgtaagccctgttgtatagttgatagcattttctagccagttcccagaactccttgtttccagtrtcaatacttggcacctttgtccactgacactaatccccagattaatttgtaattaaagccctactggtgagatttctgagaaacgttgttgcaaaattaggaacctttcctttatatatatacattacataaatttatagacataaaacattttaatgcagtcatttgctgctactctttgactcatagtctttcgtgatattttgaaaaagccttttgttaacatgtctaaatgcagaatatgttctagaaatatgtagcacttaaagtaagccattagattaccttttgaaaagcggagcaatttactaagtttctacttcttcagatttgaaattcttcatcattagcttgtagaggcaaaagcttgatgcagtcatctcatttgctgtaaaggaaatgagaagtcatttacagtatatttctactgctttgacttttatttctcaaaaagactgttttgttcatataaaatattaatgcttttgaggactacaaagtccctcgatttagtttacatttactttagcttatactttgtaaaaaatactcttctaaatgctttgtctgttttagcttacttatttctcataatmcctctgtaaagtatatgccatttgcaccatcattttacagatgagacaactaagacatggagcagttagrtaacttgcctgagatcatgcaggtggagccaggatcaaatcccagcgagtctagctccagagtttgttctcttcttgacagataatttatcctcacaaaatttgaagcatttgtagaggaattccctattgttataatgtttagtttttttgtagattggttaaaaactttgaattaaatgttagcattaacatcatttgcttttatcactacttctttgtctcttttttctttttttaatcactacctcttcctcctcttttgagaaattctgcttccgtggctatggtccaagctacttgagaaggtgaggtgggaggatcacttgagcctaggaggttgagattgcggtgagctgtgattgtgtcaactgcatttcaacctgggcaacagagcaagacactgtccaaaaaaaaaaaaaaaaatagtgaaattttacttcgctccattgactcagggaaaaaatgtaatggtgataacaaattcccttcatctcattagtgaaaatccacaattttccatcaatcgatatgatagtgatagagatattgagtgtgctcattttcctacagaccagctgctttaactattttaagcagacagaaatgatattggtaccatccatgtctaatgaaggcaatactttgtaataagttgcagtaagttgtggccagaagaggaatgatgacttcacagtgtaaacaactaccttattgggtttgtggaaaatggtgtcatgtagcagatgtggctttatctgggctttggtttggagtagttttatctattcatctaaccgtctgtctctaagtgtataagtgtgtgtgtgtgtgtgtgtgtgtgkatagtattgggtgtgtatatatgtattttgtckacattgtattgaagtaggtagtgcagcatcaaaaggaaattgttgattttcaaaatcagtgaaatgtcactatttttgagaaaaatggtctgtttacactcccttctccttttttttgtcagttcatctgcagcggtggatggggtcataatcagtctatgttgcaattccaagaccaagtcagtagtattacagctggytgatggccagatatttaagtacctttggggtgagtatcaaggtgttaggaaagcatgttatgacttacatagatgcttagttcttaagaacatgtacttgtatcttgtcagttcaatattgattgtcaggtcttttaactaccctggaaaaccctaagctttagagtggaattggcaagtgtattctactcctgtttcctcttttaatgaactaacgtactcttaaaaaagtgattgatgactatcgcagggacaaaaaaccaaacaccgcatgttctcactcataggtgggaactgaacagtgagaacacttggacacaggaaggagaacatcacacacctgggcctgtcgtggggtgggggagggtggagggatagcattaggagatatacctaatgtaaatgacaagttaatgggtgcagcacaccaacatggcacatgtatacatatgtaacaaacctgcacattgtgcacatgtaccctagaacttaaagtataataaaaatatatatataaataaataatgccagcattagagaaaaaaagtgattgaaattgcatgttaagtgttttagcaaatgttgatgttgatggttttttgcaaagagcgcatcagctatttgtgaactagatctgtgaatcttgcagagtcaccktctctggctattaaaccatggaagaactctggtggatttcctgttcggtttccttatccatgcacccagaccgaattggccatgattggagaagaggtaggtgaacayggagcaggaaatttacttaaagtagttacccagggactgatggcattaagtagaaagagcgtgggctttggaggtggacttgggtctccactaaatgcctagacaatagtgggaaatgatctcactttcataagccacaccttattcatctataaaatgggaaaatcagtatctgtctatcagggttcagaagactaaatgagataatatatgtgattagcaaccttttatccctagttgtacaaatcattcaaagttaattttatttagkaggggaaacagaaatgtgatcttgagaatagttttagtagatttttattcaacacatactagaatgcctataattgtggtggatggtagaatgcagtggctggaaaacaaaaccgcttgactaattcctgctcttctggaacttgtgatctattaatttcaatgtaatgattccctttgttgggagtgtgatggaaatggacagagtatactggtagagaatactgagatgtttgaggggtaatttgaggatggtggctatgagaatgggagtcctgcatctggtggtccaggaaggcctctcggaggcagtgatgtgtgtgctgagatgtgaagaaaaagaaggctctgtctccaggcagaaggaacaacaaactccttgagcttagcaagagctcatcttattcaagggactggatggaagtattgtggctggagctcagtgacagtcataggagggaatttgggttctttaattgaacaaagattagaaacttcttgtgatttttaataacagagtaatgtgttctgcttcatggtttggacagtgattctggctgcccagaagagacttgattggagagtgacgagactggaatatgggatcaacaccggttgagtggagttagtgaggggaaaaaggagatgggtttgagatrtgtgtaggagatggagatgtcagggctcactgatggattggatggcttcacattccrttttgcactggaccagccacrtcttaggtatctatctttagtcctgattacaggaacttaggtgtgaaatcatagggtggtagaactatgtgatagraaaggtaggtttaactgatttgagatagaattgcttgtgatttcagttttatttctttgcaggaatgtgtccttggtctgactgacaggtgtcgctttttcatcaatgacattgaggtatcaaggcttggtttggtgttggatccttttcacagtgttagctccgagtaatctagctagctttcrcccatgcctctctggccttctcttgcaggttgcgtcaaatatcacrtcatttgcagtatatgatgagtttttattgttgacaacycattcccatacctgccagtgtttttgcctgagggatgcttcatttaaaagtaagttttcaatgtataaaayagaaatggtccctyctccaatgtcttttggagtcttgatgactttttgaattmttcatttattttggctttttatcaaggagtcctaggctggagaaaatctttagagttattttacttagaccctaatctcaacataatatctcagttaaatcattctgcactttagtaaagacatccaaggaagggagttccttccttaagcagcacattctaaagttaaaaacttttcaggaaattttattatgtaactgatctaatattttatttggaattactatgtagatccccaatgttttaccttctgtgtagtcttttcccactgtgcccaccctccactgtacatctgcgctccatctagtggtttgtaggatattggctgcattttgtcttctgttccatgccctatctatctctgtgtgtgtggcgtgtatgtgtgtgtggcgtgtatgtgtgtgtggcgtgtatgtgtgtgtggcgtgtatgtgtgtgtggcgtgtatgtgtgtgtggcgtgtatgtgtgtgtggcgtgtatgtgtgtgtggcgtgtatgtgtgtgtgtgttccttattctaaaaagccaacttattttctttgcttccaacttggaaatagggaatctttctttcattgatatgattatagtacactgataatgctaagaaatagagaagttgccccaattcttaactgtgtttctccacatcatttgagaagctgtgtatgtgaatgtgcatgagggctctgtaagagagagggcaagttccagggatgagcgtgttcatcagcagggctgatagtcttgaggttcagtgggagagctaaggcacatggttgttatttgttctcttctatttcacataatgtgtgnngtttcaattgcagttaatggagagtggcttgttgtgataattaaggcttattagttaatggtgtgtttagcattacaggccggcctgagcagcaatcatgtgtcccatggggaagttctgcggaaagtggagaggggttcacsgattgtcactgttgtgccccaggacacaaagcttgtattacaggtaagctggtttttcagacaagatagatagtctgattgtcattcagccaagtaccaagcataattcttgcaggttgtattttaggctttcttattctttgtatcgtttattgtaaacctttccttgatagttytctgttagctttattcaaaggagtgttgatacaggctgtgaccataaggctcaaagygaaacttttcttgaaagtcaagataaatatagagaacaacaagattctgctaaaagtgtgctgattttagagagttgtggtaattctctgtgaagagttaggtaaaatggtgtatcctggctatttaaatgttttctacttaattaaaaatgttactgctttaatttatttaagatgccaaggggaaacttagaagttgttcatcatcgagccctggttttagctcagattcggaagtggttggacaagtaagtgccattgtactgtttgcgactagttagcttgtgatttatgtgtgaagacaataagtattttattacartttcgagaacttaaaattatgaaaagccctcattacctatatcatcaatcagattcttagaggctcttttttttttttttaacttttttactttaatgcagtattttgtagtggagattcctagcagaaagaatcgtgacactcatcatataaaggagggcttctcttaacctgagggaacacatgtgggttttaggtggcctgtgaacccagggagattgtacacaccaaaccttgtctttgtgtatttattcaagtagaaagcccacagctttcaatagatttacagcggggcctatgacccagaaaagcctgagctactcttgtgaaggaaatgactgattttctgaacctatttggaggaaactttgtattggaaagatctatactaatgttttgtttaaaaagtagacctgaattccatgatgattttctttgttttttttttgagacagagtcttgctctgtcacccaggctggagtacagtggcgcaatctcggcttactgcaacctctgccttctgggttcaagcaatcctcccacttcagcctcccgcatagctaggattacaggtgtgcaccacgcctggctaatttttttttttgtattttcagtagagacagggtttcaccatgttggccaggctggtctcaaactcctgacctcaagtgttctgcccacctcggcctcccaaagtgctaggattacaggtgtgaaccaccgtgcccgggcttctgtaatgattttctgttgtatgtatgtgaagatgtagttctcagacagtcatgatgactaaattacaccttttaagaaggtaaatgaatgtggtacctgatttttttattctgtaatttcagagtagaaatccagtgatagyagcttggcattggggctgtaatstgattataactggtttgtatcataatgaaaatatgctgggcccatggagctcagtttttgtgaatatcttttctattctttctctgtcttctcacagacttatgtttaaagaggcatttgaatgcatgagaaagctgagaatcaatctcaatctgatttatgatcataaccctaaggtaactttctaagctgtcatttactstagcttactttgtacttaaactaatatgatctgaacgaagatgttttgtcctttttttggtaggtgtttcttgraaatgtggaaaccttcattaaacagatagattctgtgaatcatattaacttgttttttacagaattgaagtaagtattttgaataattcatgtgtatcttttccatagttttctctcttcttgttaaggaaatcaagcrtaaatagctagagaagaaaaattccttactgttcatttttaaaaattgctataactcttagatgccagttggttttttgctcttttcckttctttttaaaacagcctgtttaaaactatgtccttaaaacatgtcattcagaattattatttcacttgatttttaggtatacatataaaactacttgtttttcctaggagactgaaatcaaatggcatctttctctctgatgatctttcccctcaactttttaatgaaacactttcaaaatagagaaaagttgagagaattgtccagtaagcaacctatatataccccacctggattcgccagtttatatttttctgtatacacattctcattctctataatctgtccatccatcattcatcttgtttgtagacaaattgctaagtgagttgtagacatcagtccactctaccacctgtacttctccttgtatatcattaactagagggcattctttgtgtatgggttggttttgttgtgttttttcaggtcatatttatctacagtgaaatgtccaaatcttaagtgtgccacttagtgagttttggcaaatgtacacttcatgtaacctgaacctctgtcaagttagagggcatttactccttttcagaaagctgcttcagattcctttcaatcagtccctgtcccattccccaggcaactactcttctgaattttttaccataaatcagttttgcctgttcaagaacttcacctaaatggaagcatacagtattactcttctgcataaagctgttttcattcagcatattgtcttgagattcatctgtgtttttatatgtatcactagttcattctttttttattggtcagtagtatgccgttgtgtaaatacaccactatttgcttattcattcccctgttgctggacatgtggattgtactaccctgtttggggctaatgtgactaaaacatctacaaacatttgtataagtcttttgtggacatgttttatttctcaatatttttataattcaactcttttccaaaagtcatttttatttatcatcatcagcatgccaggtgtatgttagtaatttgatcgctgggctacatgttctrttgatgaccattccatacacacctgttcttagagaagaagatgtcacgaagaccatgtaccctgcaccagttaccagcagtgtctacctgtccagggatcctgacgggaataaamtagaccttgtctgcgatgctatgagagcagtcatggagagcatraatcctcataagtatgtatgctgtcaccaggtggcatcctttgaaaaaccgaagtgtgtagttgtccttgtccagcctacttacctttctcattctggtgttcttcacttattacctcagatactgcctatccatacttacatctcatgtaaagaagacaaccscagaactggaaattgtactgcaaaaagtacacgagcttcaaggtagagatccgctyacagagaaagtgcttaaggtggccgtgactgctactagtcttctgcaggtgacaatcaccatgtcattgccacaccacagatttaacatgtgactttttagttgccattttaagacccttgtcagtttttttcagtgctgccctctaaagcatatataaaagtatcagaagtatrtattcttctgatgtccagttctrttgagaaaaatttattgtctttttggttatgttgttaggtctgtggattttttccccmaatgattgtgttctgttttgttttctaaacactgttaggaaatgctccctctgatcctgatgctgtgagtgctgaagaggccttgaaatatttgctgcatctggtagatgttaatgaattatatgatcattctcttggcacctatgactttgatttggtcctcatggtagctgagaagtcacagaaggtatgtggagttcttacttttatgccatttggttcttgtttatataatgatagtgtgaaaccctgcttctggtagtgcagtagcttttctgctatcactctgtgagtgcagggctggagacagatctgtgagtttctagggcccacattcctaagcccctgtgcttatgaaagtgttttgattgtgaggttgaagaagtgaagtaaaattgcatggcttttttttgtttctttttttttgagacggagtctcactcagtcgcccaggctggagtgcagtggtgcgatctcggcttactgcaagytccrcctcccgtgttcacgccattctcctgcctcagcctctctagtagctgggactacaggtgcccatcaccacrcccggctaattttttgtatttttagtagagacagggtttcactgtgttagccaggatggtctccatctcctgacctcgtgatccgcctacctcagtctcccaaagtgctggaattacaggtgtgggccaccatgtgcggcctaaaattacatggttatttttaagatgatgggcatatgtgtgagctaatttcttctcttataaaggaaatgtaacaagtggttcatgttccmctccggttctttctcacatggctcttttttctagtggagggtgggcacatggagcacagaaggctcatggcctcctttcctatgttggtacatttgctatgatcaaaaactttgaacaccactggtatgcatattttttatttatttttttgcagcctcagtctcttccccatgacctctccaaaaatgaaaatcggatccttcatctctctgcttaaaatacttcatgagctcccattgttccgaggatataattcagaagccataatactgcttaaaaacccttccttgacctggcctctgtgtatctttccattctcacttcttggtattgtctttttttcctctgcccatggaggaaagacaatgcttttgtcccccttcccttgcccctcaccaccacatgccttggtgggcagcattacttctgccatccatgggctttgactgcttccaccctcaccattcccctggctaattctcactaatctaggttaaaggatgccaaggtggcctcttcccagtaagccattcatgcttccctccagggactgggtgaggtgaccctcctatatgcttctgttgcacacagtgcctacccctgcagactacagtgtgtctttatctagagtgcggtatttatttatttatttttgagacaaggtcgggctctatcacccgggctggagtgcagtggcaccatcttggctcactgcaacctacgcctcctaggctcaagcaatcycacctcagcttacaggcgtgcaccaccatgccyggctaagttttgaattttttttgttgagacggggtttcgccatgttgcccaggctggtctcaaacttgtgagctgaagcaatccatctgcctcggcctcccagagtgctgggaatgagcacttaattatttgttgtcttgggttttcttcctatgttgttcttacatgtatttatcctgtcagcccagggaaattgcattaaaaacaggaaacacctctccattaggaagaaaaacaatttgcttacagggcatggcatagagctggagatgatagtgccaataaatactaggttggcagggtctcagagttttgtgtccaactcagtataattttatgtttgttttaatgtgatcatttcaggagagcatggaatgtcatgaaaacagcaccaagagcaatgtcttagacttttaggagaaacttagatgcatttgttgaatatcttctagactgaaaccttatttcccttattagcctatgaaataaatgatactgtgagacttagttaaggaagttactattattccaagtgtaacttattaatatccgtatgtgaaagcatttttgccaaagcttgtttgatgttcagctgacccttgcacaacgtgagtttcaactgtgcgagtttgaactgtgtgggtttatctaaatgtggatctctctcaaacacagttggccctttgtgtccacggcttctgcatccacaatcagtgtggatcaaaagtacaatatttgcaggatttgaaacttgcagatacagagggccaacattttgtgtatccaggctccatggggtcaaatgtaggactggggtatgcttggattttggtatccttggggtgtcctggaaccaattcyccatagatactgggggacaactgtagtttgattttatatattatataatatgcagttaatatataatacacatttaaaaattatgtagctttgggtttattgctatatgtaaatgctagtttctattcctatatatgaatatcacaagtaataaagttctcattaatcatttttttaggatcccaaagaatatcttccatttcttaatacacttaagaaaatggaaactaattatcagcggtttactatagacaaatacttgaaacgatatgaaaaagccattggccacctcagcaaatgtggtaagtgtggggattagtatgtttatctctacttcagatcttctttggaactaggcaaggtataaattaaactgttagtttagacagtgactgatttcacttcccactcctgaaaactctaacaattatgtatgctcacgttattttgtcctgtgttctgaaaagctgaaggtaatcacttttaatgaactggaggagctccctaggtaagaacgtcaagtagatccttttttggttaagaatgagcacctgtgaagttaacttcagtgtctcagaatcaaaattggttgwcagttcttccttctcatgctgtttgcagacatgtcagggaaactctgcttgtctggagagagtgatgaggccacctccccgtgccctgcaagacgcagttttaattgacagtgatggggtgccagttgttcttcccatgctggaacagttgtgattctttactgaggactgatgggggaaaggaagaatcacctggggtgcatgttaagccttcagctgctggcatccttggagaatctgattcaggtggtctgggataggactgaggcgtgcatgtgtctaataagcttcccaggtgatgtcttttcaaggaggctgagaaaacactgggctggaaagctgggactcttaagtaggatgctgatcccaatcagtgctgctcttgcctcagaatctgcagtggtgctcattaaaaattcaaattccaggatcccattcttcagattctctgattatttaggtcttaaaaagttcctcatttattttgtttggtgaccattggtataaatgaagtccattatgcttcccatgtcttaagcctgtctttgtgtgaatctttttcctgcaggacctgagtacttcccagaatgcttaaacttgataaaagataaaaacttgtataacgaagctctgaagttatattcaccaagctcacaacagtaccaggtatgtggtatgtgaaaatgaggctctcctggttttgctttttgctttagtaggaaaggagtgaggatcctaagttcataacaccatccttggcttcaaaatttatcttaaaactaattagcctcaatttgaacttcttatctgggagaatggtcctgacctgttctctgattcctcatctggaataccacagcaccttccycgtggggttccctgcttctttcccacccctcctctagcccaaccttactgctgtaagtctgattatcctaacaagtacagatctttcccatatatttcagcataaagggaaatttttgtttgcttgaaaaagcatccctttagctttttttatataccacacactttgcttctaagttaaatgtgttatatgatcctcttaacagcctcatagggtgctgtacacaatttgtagatgaggaagcaacttgcctgaggatccagagctacaaagtgctggacctgggatacagagcccaggctgcctgaccaccctgcccatgccattaaccaccactctaccatgccaccagcatcaccattttcagtttgtcctcagacaatatacacatctttctttgatcaagcccctgccrgcttctttagcaccagcttctgccactgtccacattcccagttacttgtaggtagttctacagatgtcacatcgtgtgattcctctgtcatttctctacccaccagccttcctttagccccatttgtccatcagaacccttgggttactcctgaatgccattcctggaccaggcgccaaacactgagcccccagagcagcctgccctcgccttggtgattgcatttgtcaaactgctgattagctggtttgtcrcctccaccaggctgtgggctccttaagggcagggactccatgttgtattcctctctgaatctctggctaacatccagcctggagaatcgaggatttggccagtggctacctctttgcccttgttttctgttctcttccacactctctctgctctagtcacactggccgtcctgttactcctcagacctgctatacacattcctgctgcatggccrtggtgccttctstgccctctgcctggtgccccctatctcatcacgtggtttattctcctgacagccattagagctcacactccctgagagctgcaaggagactgtcctctgtccctttactcacgtttgccattatgctatagactatattttgtccctaagtccatcctctgttactataagagcagcaacttggtggtggttcttatatggtttttcatttgtttggttttattttttgccttgctgtagtatccatactgcccagaatggtgcatatgtagttaagagtaattatttgttgagtgaataaatggcacatcctcagtaaggttttgaatgaaaaaatgactgtactaactgatcaactgtaagattttcccaggtaattctttcaagggagttccaagtataggaactaaggcagctacactggagctttagagaaatgattgtcatatttcctcctcagtcctaaatctcctcttgtcacaggatatcagcattgcttatggggagcacctgatgcaggagcacatgtatgagccagcggggctcatgtttgcccgttgcrgtgcccacgagaaagctctctcagcctttctsacatgtggcaactggaagcaagccctctgtgtggcagcccagcttaactttaccaaagaccagctggtgggcctcggcagaactctggcaggtaagtacaatcatttatatgtytacrtctacaaaggttttaaaaaatttatttcttttgtttggtaattttgcaaataaatttagggcagaatactctgagacagtcttgttctcactgataaaaattaatttagaatgctttaaaggataagctactacagcaagagtcccagaatgcagtggcccaatatggaaagaagtttatttctctctcccatagggatttataggcccttccgttgtgtggctctgcaaccttttaggcagatggttgtagctgggttatctccacagctgtggggaaggaaggagagtggggagaagttagaatcatggtaaaacatttacctttaagttggaaatgacctggatggaagttaaactatcaccttctattccatctcggccacgccatgtagctggatgggctgtgccctgtaagaaggtaaagatgaatttttggatgggtccattctgttatagacagtaggttgttggaatagccaggaatgaggtggggaaaataaaaggccaaatgtcgaagcattctgaaagcaaaggcagtttagctgcgtcagggacaagggttgccygaaccagaggcgaggctggtaccaggggctctagtaccagagtggaggaaagggtaaggacacctatgaaaagagatgagcagaagctctggtcatctcagcagtgcttgaagtaaagcaatgactggtatatttttttccctaacttgtaaatattgttgagatctcaaagaaaaaaataaaaagcagtcctaaaaaaattccaaactctatcctgttaaattttgttaaatttatgtaccagtccttctttgtcatttgcagtattctttttttcttgggattataccagtgtatgggattatcacttttctttttctggttattagcctttcccaaatccctccgtttccatgctggcctctttttacaaatgtcgagaattccttatttcaggccttttagttattygttcggtctccattgttcctttctgctttagaaatttatgatattggttgtttataccttctatctctgttcttggatctcttctattctttacagctcttagcttgctatttcccatgtcttatgagggagtatttctagtttttctcagatgtttagcaaaagtaggtggggagggcagtggtcaaagatgtttgagaaatgttacacactggagtcactctgtgtgtacatttaacgtaggcagtttacacaagagagcaaaagaaaggtaactatttaaatagtggaggtgattttacctactttttttagtgatatatgcactggagtgagcatgcaatgagagaccggaatctaccagctccttcgaaagccttgggttctctgtgcctctcattgtggtttatctcaattgggctgagagtgattctaggatctaaagacactgcatgactcaaacataagtcagctacctccatctagtgctcaaccaaagaaatagtggtctcttactgttaagggacgaagtggtttagtgagagataccaggtcattttcccatatacatgctttggaagcatctttcaaggctaattttggctgtatatgattttcaattcctgtgctaaatttagattctagctgccatttaagataggactctgtggtgtatatacctattccctcacagaaattcagaaagtacatagtttcatacataataaagacatattaaagaagcacttgagctaaagtatctgtttaactttgtagtcaactgctgcttattgtctctacaggaaagctggttgagcagaggaagcacattgatgcggccatggttttggaagagwgtgcccaggtaaactcaattcytcccttctaaaccccccagtcagcaagaaaggtcttctcaattgtatcttagtgatcatgaaagttaaaggaactgtgcataattgttaagtccagagrtrgtgtttgccccagaggtcttatcttgctggcttgacttggaaatctaaatttagtacatctctaagtttggtgaggtagaatatgaaggkgctctactttaacataccactggtttgaccttggtagaaagtacttaattacatctcaaggtagctgtgctttttaaaattgagtttgccaaagtagaaacaatgagaaaggaccattataaaacaggatcattgaaggctacatactcttggcttttactctcattctccctattggaaatgtctcttttacctcagggacctggaggtacagcagattataaggataagtacccatatgagcatttggtagtattataggatttattatgaaaataataaaactgcagtaacactggccacagactaacagtacacaggtgcacagttgacaccagggattattgccttgtagagttttgacctttgatgagagagtgttttttacagttgttactgatagcacatttatgtaacttaattgtgctttaaaaatatttaattgtctcttgtgtaataacagtaagtgaaagacgataactaaaattttatataattagatcctggagagaatatttgttgggtgattgaattgaaaataccagtgaatgaaacatacctaaaagggtagataggttgggttggaaagatataccacatcgagggttaattaaatggrtaagatgtcattatctttttttctttgtaaaggaagattaatgcataaaattattttgtgtaatttacatacaataaaattatgtgttgtacagttgtataatttacatataataaagctaattyaccaattttagatgaagaattcagtacatttggacatatgtttgtagctgtgtaaccaccattgcactcatgatctrgaacatttctaacacccccaaaagttccctacttccccttttgcagtcagccttctccctccactgccagcctttggcaaactgatcagtcagtaaagtttcacattatctagaatttcatataaacagaaccatatggtatgtagtctttttaatctggctcctttcactcacatagtgcattggagatgcatccatgttgtagtttattcctttgtattgctgaatagtatcccattatatgtatatgtcagaatttgttgatttaccagttgatgtacatttggattgttttcagtttggggttattatgaataacgcagccatgaacattctagtgcaggtctttatggggacaggagtaggaatgccacatcccgtggtaagtggatgtttaactttttaggaagctgcagaactaatctgcagtggycrtatcattttgcattcccctcagtgatatgtgagagtgcttcagtgactcctatactcaccaacactgggtgtattactgtgacactagatgtattatctattrctacgtaacaacttaccttaaaagctggcagcttaaaacarcagaccctattatcccactttttcaatgggccaagaatcttggctgggcttagctggggcctctggctcagggtcctttacaaggctgcaattaaggtattggccagggctagagtcatctcaaggcttgactagttttwaatttcattttctaatgttttattactagtatatagaaatatagctgaagtgttttgcagggaggctgtataattgaccttgtatcctgcaaccttgctaaactcatttattagttctagaasctcttgggtgtattctctaggattttctacatcaacaaacatggtttctataaatatagttttatgtctttcttacaatcaatacttttttctatctgtattgcattttctagggcttccagtgtggtgttgaatagaagtgttaagagtgaacatccttgcctttttcctgatattggagaaaattcacttgtcttttagcattaagtgtcatgtttgcttttttaaaattttattctatattattttatttttgagacagagtcttgctctgtcacccaggctggagtgcagtggtgtgatctcagctcactacaaccttgacctcctaggctcaagcgatcctcccacctcagcctcctgagtagctgggactgcaggaacatgccaccatgcctggctaatttttgtattttttgtagggatggggttttgccatgttgcccaggctggtcttgaactgttggattcaagcaattcgcctgtctcagcctcccaaagtgctgggattacaggcatgagcctccgtgcctggcctgatatttgcttttttttttttttttaatgctctctattgcagagttggcaaactacaacctgtgacaaatccagcatgccaccygtttttgtaaataaagctttattggagcatagccatgctcattagtttacatcttgtgtatggctgctttaacactacagcagcagagttagagttgtgacacagatagtttggcccataaggcctatatttactgtctaatcttttacaggaaaaatttgccaattcctgccctcttggtttgaggaaattcccttctgttccttgttctgagagtttgtatcatgaatgggtgttaaattttgtcaaatgcattttcaactatgaagggttttgtttttagacgagtgatatgggggactaggtgattgattttctactgttaaaccaaccttgcatctctgggttcaaccccacttggtattatagatttattaccctttttctcttgtggcagattagatctactaaaattttcttgaggatttttgtgtttgtgttcatgagggatattgtagttttttcgtgtctttgccatgttttgggtatcaggataatgctgctgtcattgaggggtgacaaaaatgaggggtggtgtcctttacacttctgttttctggaggatttcatgtagaattggtatgagagtctagcttatggttaaaaacctatgtgtgatgtttcagacctgaccataaacaattacagactttacctaggaggccacatggggaaaagctgccctccctacaccagacttggcgtactgccaatgcattacagtttctaaagggagttgcagtcaaggactcagggccccctgttagtcatgctcttgtaacagtatttgcattgagagtcctggcactttcattcttaggtctctctatctgaggccatgggccaaggtcttcttcaggcacctctgccaaggcctgtttatgcaagaaggagtggaaaaaccttgacatttttttccactgtgactcactacccagtacttttccacccttagcccccttcctttgcacccatacccccaagatccatcaaactgctaaagcctttttttccaagctccttcaacagtgaaccaaccctcatgtctgtgtggatccagctgactcttgactagtgagttgttccttgggaaaaaatggaacagagagagttggtgctttccctggttttagcctcttgcttataccaatgcaatgcctgaaggcttaattcatttttgacttgttgctttgatcagctactccaacacctgacagctcagctctttctcccagctcttgggagatatttttttctttaaatgtttagtagaatataccagtaaggccatctcggccaggagttttctttaatgaaagtttttcactattagttcagttactttagtagacattarcctattcaagtttatctgtgtcttctggaatgagcattggtagtttatgtctttcaagtaatttgttcatttcatctaaattgtcagatttattggtatgaagtgtttatagtattctcttattttactgtccgtagggtctatggtgatgtcctgtctttcattstagatattgatgtgtcttcttttttctgattattctggccagaggtttatcaattttattgatcttattaaagaatgaactgtttcattgtttttctctatgatttttctgtattctatatcattctttttttattattttattattttatttgctctttatttttctagtttcttaaggtgatggcttacttttatttttttcttatttttttcttttgttgttgttgtttttttaaagaaacagggtcccactcttgctcaggctggagtgcagtggcacgatcatggttcactgcagtctcaaactcctacattcaagctgtcctcccccctcagcctccagagtagttgrgattacaggtgcatgccaccatgcctggctaatttttaattttttttgtagagatggggtgttactagttgcccacgctggtctgaaactcctggcctcaagtgatccctccacctctgcctcccaaagtgctgggattccatgtgtaagccactgtgcctgrccaaggtgatggcttaaagctattgatttgagatgattccttactttatagtttaagcatataatgccataattttcctcaagcaccgttttagttaygttatacaaattttgaaatgttttgttttcatttcctaatttcccttgtgatttctttattgaaccttggcttatttagaagtatgtttaacttgcagatattggagatttgccagccatctttttgttattaatttctactttaattttgttgtgattagagaacatacattttattaatttaaatttataatttattttaatttataatatggtctgttttacagaatgttgtgtgtgtatttgaaaataatatgaaagctactattattggatggagtgttctataaatgtcagttagattaggttgatcatgctgttctagctttttatatccttattgatttcctcactacttgctctatcaatgactgggaaagtgttgaagtctcccagtatttgtctrtttctcctttgattctaccagtgtttgcttaatgtattttgaagctctgttataggtgcatacatgtttatgagtatgttatagatgtattcattttgatatccttctttctctgttactattcctaattctgaatttgactttaatgttattaatataattcttccagctttctcttggttagtcttttcattgcatatctttttctatccttttacttttaatctagctgaatgtagtctttattttgaaagtgcgttccttgttgatagcattattggttcttttttttttttaaatctaatttgacaatctctgtcttttaattggagggtttagacatttgcattgaatgtgattaccaatatagttagatttaaacctacagtcttgctgtttgctttttgtttgtttcattgatcctttgtttcttgtttttttctttttttgctttcctttggatttagtatttttcataattccattttacctccactgttggcttattagctatacttcttcatttcagtattttagtggttgctgtaggatttataataaatatcattaactgaccatatcttcagataatcgtatactacttcatatatagtgtaaaaaccttacaagagtattcactccataatactttgttattgcttttgctttaagtgatcaatgattgtttaaggaaattttttaatgacctttcatgtttattcttttttttttttttccaaaagattcagtattttccgagttttcaaaaactgctggccactcaaagtggatcaacaaaaatttaagagctaaaactgtaaaactcttgaaggctgggcacagaggttcatgcctgtgattccagcactttgagaagctgaggtgggacaatcacttgagcccaggggtttgagaccagcctgggtaacatagaaagaccttgtttctacaaaaaataaaaacacaattagccaggcatggcggtgtgcacctgtagtcccaacttcttgggaggccaaggtggcaggatttcctgagcctgtaagtttgagactgcagtgagctgagttcacgccactgcacttcagcctggacaacagaacaagaccctgtctcaaaaccagaacgaaactataaaactcttagaagaaaacagggctaaatcttcatgactttggatttggcaatggatggttagaattaataccaaaaacacaatcaataaattgataaattggatttaataaaaattaagaacttttgtgtatcaaggacattgtcaagaatgtgaaaagacagcatatagaatggaagaagatatttgcaaatcctatatctgataaaggtttaatatccagaatatgtaaggaactcctgcagctcaacaacagaaagccagttaaatcaattttgaaatgagcaaacgcctgtaaacccagctgcttggcagattgagacaggaggattgcttgaggctaggagttcaagaccaacctggacaacatagtgagaccctgtctaaaaacatttttttaattagctgggtgtggtggcatattcctgtagtcccagctacatgggagaccgaggcaggaggatcacttggggccaggcagtcaaggctgccgtgagctgtgattatgccactgcatcccagcctgggcgacagagtgagaccctgtctgagaaaaaaaaaaaaaaaagaacaaaaaaaaatttagaagattgctattctagtctactattttttcaaagggtggtcttgttaacaattctggagcccacctaaacctgctaaatcaaacttggtagtaaagctggggagatgggcatgtctaacagacgtttctggtggttttgatgtccaggcgtgcagagagatgatgcttaccttgtgttttgtcattattttcaggatttacaccccttccttgtcttttgtatcaatatttatggagtcatgaactctaggataggcatgatgttgagaactaggagttctcccctggccagggagatagaggcaggtctgtggttagttttgtagttggctgtgatgacatctgacatgctctcttcacttgttgtcttcttcctgttcccttgtcaggattatgaagaagctgtgctcttgctgttagaaggagctgcctgggaagaagctttgaggctggtaagaatyttgtaaatcctctggatgttgggtgctaagcagagagagcaagcaagggattccaggtcagttggaatctcttgtcttctgaggttcatgaaataagtagaaataggtcaggttcctggcttaaggaaaagcggtgtttttaaaatcattttyatcattcttgataataatttgaaatattactgtcttttactgaaatgaattgaatttccttggctgccttgtaggaggcctgtttttcaggaaaatattctgattacctctgaaagtaatccatgtctttctaagtatcttaactctccagtgactagaagttttccttcctaaaattattgtgtttttccttctaggtatacaaatataacagactggatattatagaaaccaacgtaaagccttccattttagaaggtgagggttccattttagatagaattcctcatttggaagaaggtgaggagagagagatgagagagtctcctcctatttactgtgttttcttaataatatgtcatgtagactcaatcaaaattaccacctggatataatatttaattctcactagaatttttaaatatgctgaactattaaatggtaacaaaatatttaaatgttagaaacctgtgatcaaatatgattaagaatctttgtatttggaaatagtaaacttgaatatgaactatattagataataatataacactgataaatttctggcatttaataatcatgttgtggttatataagataatatcctattattctcaagagataaatgctgaaatatttaggaatgaaggatcatatctctgccttactcttaaaaggttccacaaaagtattaatgaatgtgtgtatgcatgcagagaaacaggaagcaaaaaaatgtcaaaatgttagtaattggtaaatcamagtraagggtatatgtgtgttcattgaactcttacaacttttatgtaggtttcaacgtttcaaagtattttttaaaagttaccttttcaaatgaagtttgtggttcttagagaacatatgaatattaccagttctagaatactcagatggtcactgtgacctcttaaaagcaaagtggagaaggacatcagtttgacttatagaaaccttagggagtggttgattttaagttctgcatttttatgcacatctaccctgtaagtaacgtctggcctttctgacatttacatgtatgcacattcttaccttstctgcacccccttcctccatcctaattaaaacgttgctggggtactttttatgtcattcactttaggtacctctaactgggtactgaaaacatcattcctcatctataataatctaaccagctcttacttagattttcaccactaatgagaacctttcttagataaatgccgataattcatctacataggcccaaaacctattaataaaatgcatccttggatagtagtattttgcttttttaaaatgtattctactagtgttatttttctcttgtgtatttttccattggacaatatttattagatacattttttccacatccatgggcattttgatggatgtttagccagaaacatttaggtaattttcttcttatttttgttaactgagctcccctcccctaccccccctttttttgtttgtttgttttgtttgtttgtttgttttgccaatcctcccttgctttrggtatcaagtcttcgttcaggtgattttacaagttcagtggtagcgcatattctgggataatgttgatgaactctragatctggaatctcagtctctaatttgttaatgcttattaaggaaaaagagctcgcttggaaaacctagtaacctctttctttttgctgarttttaaccctccttcactgctccccgcctttagttttttctctttgcttaaacctcatgctcaaactattttccattctgcatctccagcccagaaaaattatatggcatttctggactctcagacagccacattcagtcgccacaagaaacgtttattggtagttcgagagctcaaggagcaagcccagcaggcaggtctgggtgagtatctgcgtgaaggccatcgacgtgcgggggcagtggggttgggtaacgccacacattgtctagattgcttggtgatccgcctgcaatctgattactgtgccatgggcaagtgtgaggcttctgtggagccccttcagggccctctgtgtctgtgtttgtgtgttggtgaagggcaggaccaagcatgaatggggagagctctgccagacattcccacctacccccattcacccagagcagctgaccacttccgtgtctaacaaaatgagtttcctcatttccagaaaaaagttcaggaaactactgatttacattagtaattactgtatttaatattatctcattcattttgagatcaactttgcaatcattttcatccatcctttgatatgcaccagttgactctagttagttcatttaccgccctgaaagtaaacccacacattagcaggcagtgttttcatcggcttctggttcttcttttctagatgatgaggtacyccacgggcaagagtcagacctcttctctgaaactagcagtgtcgtgagtggcagtgagatgagtggcaaatactcccatagtaactccaggatatcagcgtacgtatcacattgattcagcacattgactatatcctgggcatatagggaaagtggaagcaaatagattggttttctactgggacggtgtagtgggartggggagaatattcttcagcgctgtgtggaagttgttcagacactttcccagcatatctgagacattaaacttggcattggaaggttttcttcctcagcyttgtggcttgtgtgttttcccattccccacgaggcagttcctcccctgaatgctcagtttatattaacatctgattttattttttgaacaaatgttgtgactaaattataggcactgaaaaaatgaaaagataagcttcttcaattcaaaatcaggattggaagagaccataaatgtaaaataagtcataacacttttaccaaatatagtaatttgtcagaaatatttattcagcactcatatggtaggtgcagtagatgttaccaaaaacttataaggagatatgagttataagagtttatagtcttgcttgggatgtgtaaagcaatgcaagattatatattcaaactgaattttgctttaggaatttaaaatggagatctgtgaagttgtgtggggtcatcagcaactgcaagaaagtagccaggcaaggtagcacatgcctrtagtcctagctactcaggaggcttaaaaatatctgtgtaatttctaacaggagatcatccaagaatcgccgaaaagcggagcggaagaagcacagcctcaaagaaggcagtccgmtggaggacctggccctcctggaggcactgagtgaagtggtgcagaacactgaaaacctgaaaggtatattctcagtcctgatgatgattcctgaccacaaacaatagtgaataggcagtacagacaggcagagttcagtaggtgattaagctaccattttcccaatttgaggaaagatgagaacttttagcaggaagggtcatgtctgcacacattcctgaagcagcccttcttagctggtaactgagaagccttcctccatttggcatccccctaactgaactgggagagatgcttargccaggataaagaattgtgggacactgctttctgcgtaggccccccagcgtgcttgattttctttttgtartacatgtgtttaattattccagcatttgggaagaaaaaagataatgtgggagaaaggacctgcagtgggatsatagaaatttttggctttggatagaagctatgtatgattctgtcaatggagctgggaatataacttaccactctttcaaatttcttctctctagatgaagtataccatattttaaaggtactctttctctttgagtttgatgaacaaggaagggaattacagaaggcctttgaagatacgctgcagttgatggaaaggtcacttccagaaatttggactcttacttaccagcagaattcagctaccccggtaagttttctcagagacggtgtgcatttttttcatcattttcatgggttattgtattcacacaatctccaagtcaaaaagttttcctgttcttaaaacataagatgccatagttaaattatcttagatttatgtgtaagctgtcagtaagatttgatatttgcctgtagagtgactagtataccttggcwtaggttaaatggactgtcattttcctttctggatgaagtagctgtcatggagaaaatgggaaagtcacatgattgctcctggccttcaatgaggttggagtggggagagatgggggaagatggggtcagagacggcctctcactttcctttcagaactcagggatgggatcaggctttaaagggaccccaggnaattgcttttccttttgttttatgaaaaatttgacttgkcacttctatgttgttatgatggactttgcgggttgtgtttaaggctgaatcagctttgtatcgcagaattctagtatattgtcatctgtttattatttatacctctgttcactctcttatacttcaagtctattgttaagagtttttatttggattcaaaaaggctggtrtatcagtcaagatctagaaaggaaaacaaaagcctatctattattttatcacagaatttaatatatggatttgttaaataagtattagaggactaaacaaggcaaaagggaaatacagaggaaggacattgagatagtaactgtaggaagcagctttaccctctagctgagggaacaggaggagttgttgggrattattagaatttagaagcctggaagtggggccctgtagagctggctcttgaacctctgagaggagggtgccagccagctaatcctggcatttctgagggagctggttccaagcgtacagaagtaaatggaaactggaaggaacagctgctgctgggggaaaagccagccggtcgggccaggtgtggtggtggctcacgcctgtaatcccagcactttgggaggccaaggcaggcggaycacctgaagtcaggagttcatgactaatgtggccaacatggagaagccccgtctctactaaaaatacaaaattacccgggcatggtggcgcatgcctgtaatcccagctactcaggaggctgaggcaagagaatcgcttgaacctgggagacagaggttgtgatgagccaagatcgtgccattgtactccaacctgggcagcaagagcgaatctccgtttaaaaaaaaaaaaaaaaaagccagccaatcacggaagaaatctagaaatcttttgttcatcctccagctttgtactccccctctggtgttcactgtaggcaggacatgatgggaagccagcagcaaggaagaatatctttcaggtgcccagccccagcaccacaagcagtggatagaagggtgggttggagctgagagattacaaatcagctcagtgtttagaaacacatacgcttatcatgtcttgatttcctcatttagaaatgggcataagacttctctgtgtgcttcaatagaatgctttgaaggttaaataagagggtgtgtgtaaaagcactttacaaacygttgaaataaaagcaactaggaatcagggccccagaacttcttgaatttattataataggtatttcttagaagaaatgtgatcatcatcttcaaaactgtagtacttttgaagataattgtttttgttttttgagacagggtctcactctgttgctcaggctggagtgcagtgatcaccgctcactgcagcatccaccgccccgggctcaggtgatcctcccacctcagcctcttgagtagctgggactacaggygcatgccacaacacctggttaattttcaaattttctgtagagacagggtgtcaccaagttgtccccgctggtcttgaacaactcctgggctcaagtggtctgcccacctcacctctccaaagtgctgggactataggcatcagccaccgtgcccggcttgaagataataatttataataccactcccatgagtgatcttctcttctgatcacatattcacattaaggtctattttattttatttttttcttgctctgtcacccaggctagagtgcagtgacagtatgatcaatcatggcttggtgcagcctcgaatgcctgggctaaagcagtcctcccaccgcagtctcctgagtaattgggaccacaggtgcacaccaccatgcccagctaattttaaaattttttcctagacatggggagagggagtcttgctgtgttgcccaagctggtcttgaactcctggcctcaagtgatcctcctgccttggcctcccaaagtgctgagattacaggtgtaagccaccatgcctcccacattaagttctaagacatcaattttatgattgtggttttgattggtgaagtatggttgtggtatgtgcaggataccgtgagtgacttctcatggcattgctcttgagagtgtgccaccaagggtctgcactaaccaggggtgtgcccagaggctcgctgcaggcttgaaattcctgcggagtcttgtgttttacctggagcacatgtgcacagtttccattctgctccatagtatgcacatgtttgtatttatttcaacctaaaaatgtttgtttcccataactctttgcgtataattgatactctacgtatttgtagcctcttttactcttttccctttcctcagggagtggtttgctcatttagaaaaggccaagatatatcactgtagagtttcgtttcttttcttttcctccaccccmcatctttaccttgttctgggagaaaggagaattagaagtctgagttgcagctggagaaactggcaaattaaaatcacattgggaaagagaattactgtgtttcacaccataccagtagaaatgacaggctgttttctgskggtagggatttggcctttggtattggmagtcttgagaagtattagataatctttgctgatacagtctattttctcctcaggttctaggtcccaattctactgcaaatagtatcatggcatcttatcagcaacagaagacttcggttcctgttcttggttagtattttttctcatttaatattacaatactaagcrgaaggactatctttctgtaagtattgagaagatcagcagtataaggagagattggatacaatttttcactacaaaaaattgactacaattcttcctcaattctaagaccgcatctttagtatgatcagtttcatgcttctagcggtgggrgacctggtgcaggaaaatccagcatgaccattgtatgtgtaatttttaaaaatatttatgtgrcatatgcttgttcataaaggcacaccacagttccagtttcagtctaaactgtctacatttacatatacatcaaaagattcttctgaagcatcattactggctattggcagttatgctttgcatcttgggggcattttcataaaccttgcttatgagtgggacctttttattatgtttaggattgacaatataatttgaaggcaaatccaaagaatattagcattttatacatatttcctgtttagttatgcatgaagtgttttatttgttgaggggagatgattctcaattagattacttatatccctaaaaattaaaaaccctaagcgctttcttttgaaagttggttagaaacatttgatgagtcagcttgggactttcagtatttgcccttacttatagttggatcaatgaagcatcttagctttgaaaagtgaatgatagtttctaaaataattggcagttttaactgctattatttgcatttctagcatgtgacaagcaactttctgaaattttttttcaccgaagtgctacactgtaatagcattttgatgacatttgaagtagcctgtggggattcaaattaagtttgactttaacagcttatgttgctaccaggaagaacagctaccttccwtcccagctaaactcatacatccagactgtaactactgtattcctagctcctcttctgtctagagaatggcaaggtwcttttggtatcagtttcgacatatccacttattcctttttttttcttaagttttttcatttagaaaaaaaaacagatggggtcttaatatgttgcccaggctggtctcagcctcctggtctcaagtgatcctcctgcctcggcctcccaaagtgctgggattacaggcgtctgcccctgtgcccagcccacttatttcccagatgctaggaacttacattagacctgaggccatttggtcattgtttattttgtgctgtagtccaatccagttgtgatttctgcctcctgtgttcctcgttgctggcctgatgctgaccttcaggttaggtcagtcccatcattccccagggtattctagatggctttcccacttcaaagagcactttcttgttttccagctgagccttaaagacactctgtaatatttgagagcccctcattatctgagtgtttattatcattacccttgtggtttcaaggatgtataggaaaaggtaagttcctataattcaaaaattgccactgatgaactaatcacaaaattagtgccactcaaatattactcagctgcccctccccagctaacaatagttaagtatattggcacatccccacaagtgaaatcaatgacttgatgggtcatttctgattgtttcctgctttgatgcaatacaatatcatgcagatcaattgcaagtcttgcaaaaatttagtattacataaaatagattaaaatgatattggaaaagtacttgaatcacagctgggttggacttgttgcaattgatgacaaaataagtgcttcaaatgattttgactatcaaaggattgagagaggtccttagaaaaattgaaaagccctcaagttatttttataaaaatggccttttttgtgtgctgtgaaatccacatatggaaatgtgaaatatgtcatgtcctgctgtcatataatttgtcagaataattactttcttgcccaaaagtctgtactttgtgtttatttcaagttaagtctagaatcaaatatagttgtagttatgcctaattttaaaaaatgagatagagcacattatttttgtaactagtttttttttttttttttttttttttttttttttttcagacagagtcttgctctgtggcccaggcgggagtgcagtggcgcaatctcggctcactgcaagctccgcctcccgggttcacgccattctcctgcctcaccctcctgagtagctgggactacaggcgcccgccatcacgcccggctaatttttttgtatttttagtagagamggggtttcaccgtgttagccaggatggtctcgatctcctgacctcgtgatccacccgcctcggcctcccaaagtgctgggattacaagcgtgagccaccgcgcccggcctgtaamtagtttttttaagataaagtcttattccaactttaattggaatttatgraataccttgttgatagtgaatttatttaagtagccttttttcagtattgatattcttatatctttatggcaccatttagtggagagaaatgtaaacaaacataaagatgtagtattaaatcataactgcataaaattaactgtagtatgtactgcactactgtaataattttgtagctacctcctgttgctattgtggtgagtgagctcaagtgttaccaatatctgcttaaaatgccatgtgccgctaaccatctccacatgagcagcacatgagagtctccattaattgcatatggcagcgaaaagtgatctcttgcattgtcgtgtattttttatcacgtttaatgtaatatcgtaaaccttaaataacaccatgagacctataggaagtaccacaagtgttgctcccaggaagcagagaaaagtcataacattacaagaaaaagttgacttgctcgatatgtactatagattgaggtctgcagctgtagttgcccaccacttcaagataaatgaacccagtgcaaggactattataaaagaaaaggaaatttatgaagctgtcactgcagttatgccagcaggcatgaaaaccttgtactttttgcaaaatacctttttatgttgtattgaagatgcagcttttatgtgggtgcaggattgctatgagaaaggcatacctatacaactattatgatttgagaaaaagcacagtcattgtatgagaacttaaagcaaaaagatgaaggatcaaagctggagaatttaatgccagcaaaggatggtttgataattttagaaagaggtttggctttgtaaatgtctggataataggaaaagcagctcctgccatccaggaggcagcagcaaaggcagtcaggtttatgatcaggactgcccttatctgtaaagctgctaacccccgagcctggaagggaaaagattaacaccagctgccaggcttttggttgtaccatacaacaagaaggcttggacaaggagaacactttttctggattggttccattgtcgatttgtccctgaagttaagtagtatcttgccagtaaggggactgccttttaaagttcttttgatactggagaatgcccgaggccaccccaaactscatgagttcaacaccgaagacattgaagtgatctacttgcccccaaacacacatctctaattcagcctctagatcagggtgtcataaggacctttaaggctcgttacaaacagtactctatagaaaggattgtcaaatgtatggaaaagaaccttgacagaacatgaaagtctgaaagaattacaccatcaatgatgccatmattgttatagaaaaagctgtgaaagccatcaagcccaggacaataaattcskgctagagaaaactgtgtccagatgtgcatgacttcacaggctttacgacagccaatcaaggaaatcatgaaaaagattgtggatctggcacaaaaaaaaaaaaaaaaaaaaaaaaatggtgcatgaaggatttcaagataggaatcttggagaaattcaagaggtgatagacatcacaccagaggaattaacagaagatgacttgatggagatgagtacttccaaaccagcgccagacaatgaggaagattacataaaagaagcagtgccagaaaataaattgacatttgttccaaaggttccaattattcaagactgcctttggcttcttttacaacatggatgattctatgttatgggcactgaaactaaaagaaactgtggaaggattggtaccttagagaaatgaaaaagcaaaaacatcagaaattatggtgtatttctgtaaagttagtgacactgagtgtgcccacctctcttgcctcctctttaacctcccctacctgtttcatctctaccacccctgagacagcaagaccaacccctccacttcctcctctacttcagcctactcaacgtggagatgacaaagatgaagacctttatgatgatccacttccatttaatgaatagtaaatattgttttctttatgattttcttaatattttcttttctctagcttactttattgtaggaatgtagtatataatacatataacatacaaaacatttgttaactgactttttatgctgccaatacactgccgaacaacagtaagctattggtacttgagttttggagattcagaagttaaacatggggccaggtgtggtggctcacacctgtaatcccagcactttgggaggctgaggtgggtggaacgagaccaggagttttgagagtagcctgggcagcatggtgaaaccttgtctctacagaaattagccaggtatggtggtgtacacttgtagtcccagctacttgggaggctgaggcaggagaatcgcttgaacccagggggtcgaggctgcagtgagtcatgatcgtgccactgcactccaacctgggcaacaaaatgagaccctgtctcaaaaaaagaaaaaaaaaaggtatatgcagatttttgactgtgcaggggggtccgcacccataaccctacattcaaggatcaactgtaatttttcatgcctgcatggctcatatgtacagatttactgctggaagtttatcataaataatgctgaaaaagaaaatccttatatatacatattttctcctatctctgcttgcagtatatgattcctggttagaaaagaaacttaacaaatctaagtgaaagagtgcmtgggagttttaggttacaatgacagaatcttttcctaaccctctctctccattcactttttttaaagcaggggcatctttattgatcaacatgtttgtcgaagtttcatcataaagtagttcctgtccattaacttcacttactgaatatgtgctatcrcattttgctattccttaaaaattgagctagactttacatatagtgaaatgcagagatttcaggtgtacaatttgatgagttttaataaatgtatacagccatgtgactgctgccaccacccctcccaccagtttgaaatacagaacattcttccactttgaatcactgggtgagcatgcctgaggttgaaatgcagtccctcctctcagggcrgggcctccaggttgtgtttgctctgacctggaggttgcaggggtagcagacacatgaactctggctctgatggtcttattgctgcaaactccacctgcctagtttgtttagtttagagttactgcctcagcgccctccaacaagagtatgtctgtcacaatttcccttcctttcttgcttttagatgctgagctttttataccaccaaagatcaacagaagaacccagtggaagctgagcctgctagactgagtgactgcagttaggagggatccgacagagaagaccatttccactcattcctgttgtcctaccaccccttgctctttgagggctggctattgagaactggaaagagtaaaatgataacttaccttagcattgccaagaacttcagcagacaacaagcaattctatttattttatgttgtgtatacatcttgatcattagcaagacattaagctttaaccattatggcaccattttgtgagaatgattgttctttcacttgggctgtttgagagcataattatggtaatcatgagattaatgtttcatgatttctacctccaaagtgtgaagacaagtaaaacaatgtttctaaattgtcttattttgttggcggagaagattacaatggctattagtgctacatttggtcaaatgtaatcacttaaatagcttcwtgtcaccttaaactaaagcagaataaaaagtatcctttgaaattataagccctcctttgctgacagctattattttgtaacatcttaccaggtcatgtgctttcagttataactgggctgagcctcctataattacaatgtctatagggactgttttactgcctgtgtattttctgctagagagttagcaatgttagagctagaacagattagaatttctaaacagtatcatgcacagttggtgtgagtgatcagtgtgcattgtatggcatgcatggttgtgaattattctctgttctccaaatactgtttctttaactcagatatttttgttagtgtctaggccacttcatttatttttcgtcatggtactttactgacttctctttattcaattctccacgccctcaccaaaaaaaactgtctcaaaatgagaatattttattttcatggtgagtctagaaaacgcccacttcattctgattaaaaattcttccatgttttaaatatcagaaccagacctttcttactgtgtatcttagcccatttgtgtctctataacaacaaccagctttcaaaggaactaatagagtgaaaactcactcattaccacgaggatggcacaagcgattcacgtaggatctgcccctgtgaccaaaacacctcccattgggccccacttccaacactggtgatcacatttcaacatgaggtttagggaaacaaatgcctaaactacagcactgtacataaactaacaggaaatgctgcttttgatcctcaaagaagtgatatagccaaaattgtaatttaagaagcctttgccagtatagcaagatgttaactatagaatcaatctaggagtattcactgtaaaattcaacttttctgtatgtttgaacattttcacaatctmataggagtttttaaaaagaagagaaagaagatatactttgctttggagaaatctactttttgacttacatgggtttgctgtaattaagtgcccaatattgaaaggctgcaagtactttgtaatcactctttggcatgggtaaataagcatggtaacttatattgaaatatagtgctcttgctttggataactgtaaagggacccatgctgatagactggaaatagaagtaaatgtgtttattgataatggtgtgaattttcctggacattcagtttccttaaataatgtattgaagcagcaagaaataatttgtttgaatgcaaattactatcaattactgtttctctcatctgagcaggattggattttgttcctttttagaagaagcaggcaggaggagaccttccaaattgaggcaaagccaagaattgaatattcatgggggaaaattgagtgtatgagaaaaggaggaaactcctctgagtgatgaatgcttaatttgggggaaagagtctgtcaagttttagaaaagagtacataaatttggatcctgtcccaaagcaagttcatgctgcaataagctaaaaccttcacttttcttggttccattgagtcagatagctttgctcagatgctctaaacttcaagaaggaacttgcagaagactgtcttcttcggtcaaagtgcattttaaatttatgcttttgaaaaaactgaggccgggtgcggtggatcacacctgtaatcccagcactttgggaggctgaggtgtttgagaccagcctagccaacatggtgaaatctcacctttactaaaaatagaaaaaaaattaggcggtgtggtggtgggcacctgtgatcccagctacttgggaggctgaggcaggagaatcacttgaacctgggaaggtggaggttgcagtgagccaagatcgtgccactgtacatcagcctggacaagaacaagactctgtctcaaaaaaacaaaacaaaacaaaacaaaacttaggagcaatttttatatgcctttatggatgtagcttggtgcaatttcttagccctgctgcatattttaaattaaatttaattatatatgcatgtatatatacatacacatttgagagatttgtcatagcaatagctgaagtgggtgtttttaaaaataagtaaaactgatgaagcttggtaacttaaggtgactgcaaatttgagaagcaaaattagatttgttcttcctcttgtgctggttattgtactcccatattctctagaagcaccgcctggacaagccctggggagtctttggctgttgtttcttgtttgttgtatttattagtaactgggtgcaaataaacatcttaggagctaggtagctgtacatattcacgaggctggagataagacaargctaatttggtaacatttggcagtgctgaaggcctgctttggattctcgtgtttctgtgctctctgtgctccctgagcccttgcctgtgcctgcagtgggctgctccaccactattcttactggctctacagtcccaggacatttaggaacagcagttgtcctcctggttataaaggaaagaacaaggctttgggccatgtgtccaaccatcttagcagtgttggacaaagtcacttaatctcactgagccttgctttccttcagtcttgtgtgtgcccatcaagctaagcagagtttctcaatggcactgttgtcattttggttcatgtcattctttctttgggtgttgggaggtgcttccctgcacattgtaagatgtttaacgacttccctcatctctaacccctagatgccagtagtacacactcccacccctgttatgacaaccacaaatatctttagacattgttaaatgtcccctacaggccaaagttgccccctgcttgagaactactgtgctaagataagttccaaatacttagtaactatcacttttttatgaggagattctctttttctactggggcatacttgtgaggatcaagtgagaaaattcataaagtggtttgaaaaagactgcacaattgttcagccttcagttggcatttttcatttaaaaatgaacattgaggcctaggaaggcctggagacgcccatcctccagaaccacctcccaaccctcctcttcattaagaccctcgccttttttagggatctttgacatggggtttatttacccctaagggatcggtagatagagcatacttctgtatgataggttttctctgtaatcatacattttattttatgcatttaataacattattctaagaagaggtttatgggtttaccacccctgccaaagaggtccaaaggttaagaactaaccaaacttcaacttgcgcatcagtgaatgatcatgggttgacagtagagcggtttgggcagaaactgaggtaaagatgtccctctctctcaggtcagtgtccccaactcctgattccttgacagtccagcataaggcttagtcatccgtgctgaaccatgggaacctcacatgcccctctgtggctctctttctgctggtgccagccagatactcttagtcaccagacctggatccagggtcaggcactttaggtctttcaaggctgtcgaggcaagcctggaaccagtgagcagctctggagggcttctccctggagatggtggaggtgccagctctcctctaaatgcagaatgcctgcctttgagtacctgtgtggctaaggactatagtaagagacttctggccttctgcataagaggtagaaacctaaagatactagctagctattgtgaggacccccaggagtctagatactggtattcagatatttttcgctgttttttaatcagctgtgtgaggtaggcatttatactcagttttgcaggcaagcaaacaaactcaagtcacagttaggtggtagcaaaattgcgtttcaaaccacagagtccagagcccatgttctatcctctgttttgtgcaccaactagtgttcagattttgaactttaaagacaagacagagaatgtattggaggctgttctaaagaatctccaatttaaagtgctcatattacaaactccccctgcaggaacaccagagagctcgctgggccctggaagggcttccctggctactgagggtctctgtgtatctttgggctccccagtggggttagaatgacccacatagggcagcctcccacagacccatatcatcagccccagaaccagcagcctctatcctcagcacaccccagactccaaccgtgtgtgttctaggctgatggagaatccagcctgctgggagatggtcagctactacttgaagtgtctagagaatgactgtggcctcaatccctaacctctctgctgataacccaagatcagtcttacttcagtttttaaaatgggaaatctgtatagcacttgttctctgaagagttgccctttaaggcacatacaaatgccttgcttgtaatatgctaggcttcagcagccagtcgctgtgatggcttagtaagaactggtactgagacataaatgactgttggaactaaaagaaactcctgttaaagcagggctcagacagctttgccagctctttccagtccctcagggttgttgatgaagtatgaaatggacactgatgctttgtgggagtttgcactgttacagcatacttcctattggcatttatggaaagggaactgcttatatgccccaacagcatttaccctctaatcttcattgcactcccccttccaagcagagtttaaccgtaaagtagttcctaaagcggggaatgcacaaaataaggggcagcataattttagaacaagtgaatgtttaagcaatccacatacaatgcatgcccttttttgttcatcctccccctactcctgcttttgttttgggaaatgtatattttaaggcagatgctgcacgtgtgaagttgtttcttatgaagtcaggaagtagagaaacacactgtggaggggcatatgaggggtgtttaatgctacaggaataagcgccggctccaccccctgtgtgtaggagtgcgctcaccctgtcgagggtaggcactgccagtgcagtgtccatcctcgtcgccgttcagaagcaccttctgtagaggaagaaaggcccgtgttcctcgtactcaaagcggtggacccacaatggttggaaaccctgaagtgaggccaggatggagccaccggtccacacggcactgtctctttcaggcagcacgtttacctgcggggtgtcattgggacacatgctgcttagctccttctgcagacggttagggaagccactgagcatcgtgctgcccccgcagagcaggatgttccccatgaggtcccgtttgagggcgatgtcacacttgttaaggcaggacacggtttgggtgtggaggcccagctgcatggacttgatgagagatggcttgaagaacatctccgagcagaggaaccgttcctggcacagctgaatctccttcccatccggcagcacgtagcggatcgtatgctcactgagagggactttcttctcctcaatgggatccagggccacaaagcagcatttcttcttgatgtcctccacgatgcccatctggtcctgggtgaattcgttccccgcactgttcagcaggcccagcaggtaggctgtcaggtcagagcccgcgtagtccagccttccggtgatgctgggcaaaggataaccctcgtagatggggaccacgtaggacacgccatggccyacctccaccaccaggccggaggtccttccataggagtacatggacaggcgcgactggtaggcgatgtgcattgcaggggtgttgaaggcttcaaacagcatttcagcatatttctctctgttggtgtgwgggctcagtggcgggtctgaaaccaagaccgcatgctcctccggggsgatcttcatctcttgtcggaagagatattcccagatatcctgcactgtatcccagtccacgatgatgccatgtygcagagggttaaccagcttgagaygaacgtttgtgttgttgagttcctgccccacgaatgtctccttgcgattatccccagtcttggcggtctccatgtagggcttgcccaccgttgttgagatcttgtgggtgggtcttggcaggccggcaaagccacatttacagtagccagtgcccaggtccacgaccactgctttggtcacctcctgcttgggcctctccttggctgcctttgattcagtaggttcttgtggctctgaactcgtatggcggacccacacggcccgcttcgccgggccatcccttaaagaggcagtctggagggcctgtgtctgcaggggggcctggttgcccaccttcttggtgggcccatcccccatgattgctgctggtggagcccacatgttgtcaagagccgcaccactcttagaaagttctcaatcccactggattcaaggcctgaaaggcctacatcagaggataccctgagaattttcccaacagtgacatcactaattatgatgtaatctggtgacctgggctttctagatattgcaaacccttatcctgtgttagggtacatttgggatattgtttttgaaatggctccccttttcctaaatttcgtaacaagactgatttattcaattaattaatatttcttgaatgtctgctatatacaaggcagctgggaattcgctggtgaaaaaaacagacaaaatcccttattctagtcggtggggggtgggggtgacagacaataaccaaaatgagcgttaagagcaaaagcagggtggcagtgctagtgtggcctgggcagggcttcctgagagggtgacatttgaatgaagacctgcaggaggtgagggagagagccatgtgtatgtcaggggagcagcaggtgcagaggactggaggcagatgtgtgactgaagagttagatcaggggtcagcaggctgcagtccaatccggtccccagcttgttggataggaatacagccgtgctcattcatgtacgtattgtccgtgactggcattgcagtacaacagtagagctgagtcacggcattgaagactgcattgcccaaaaagctgaaagaaagtaaatactgactgacccttaaaaagtttgccgacctcttgagttagaggaggagcaggaagaaaagtgtggctggcatagaaggagtaaggaaaagtagatgaga
